United States Patent Application Publication US 2014/0325702 A1 - sequence listing, part 11

SEQ ID NO: 9834 - DNA, 3840 bp, Heterodera glycines
tgctcccggtggtttaacggtggggcggtccgctcttttttcattatatacttgatggccattcgcaaattgctatgcgccagcggcttaccgtttgcggtgttaattgtattcacccgaacacccatacgatcggcataatggttacatttgagatataatcgttctattctctgtgtcatggtcagttgatttgacggaatagcaaacagctcacgttgctgttgttgttcttcttcactttgtgcagatgttgatggacctggctcgggcgagtactgtactcttacccttctcggttgcctcactcgttttcttatgtgcacctcatcatcatcattctgggggtaggtgcgtttggtccccctcctaggcggaggaatatagggcatttcttcgacgacaacagctggaggaggaggaggttgttgttgctgctgctgtaatggcttttcttcaatttttggctcttttttcgggatacggtatggcactggcctctttgtaggttgcaactcatgttttggctcggttttgattttcgggggcgggaagtacccggcttgcttcgatgtggatggtcgtgggtcaacttcaaattttggttcctttttggtgaagtgacgcggaggaggaggaggaggagctagttcaactttcggttcccttttggagacagtgcgaggaggtggaggaggggcgagctctatttttggttctctctttgcgcgatgtggaggcaatggtggaggcggtggcgaggcggattttttcaactttgttggttgtggatcccttttcagttcaactttgggtatagaacgaggcggaggagggggatggtctggtcgtttgtacacgggtggtagtgtgggagatggtggaggagaatagtaaattttgtattttttgtttttatctattccctcctctcctttaatctttcttctgcttgcaagtctttgttgggcggtgtccatttcctcaatttcatctgcatagtcaggcaatattggcatgtctccataattttgtgatggtgttggcagcagatacccaccttccagcatttgttcatcgtcatcgtcactttcaggtaaaggagcagctgctgcctcagcgagtagatcacgtactaccggttgttgttgcaagtcacgacgcctttgcttccattgattcagccgaccatgttttatagaagattgatggtttttctttgttctttgaggacgtggtggacgaggggggcgaggcggatgactatcgtcagatgaggaagactgctgatcgggagggctgggatggtgacggtggtattgatgaggaggtggaggaggtggtggtggtggtggtggagcgggaggccgtggctgagtgttgacgacttcgccgtcgtcatcatcaacacccccatctcgcttgagcaaaacactcaagcccttggttaactcaactttggtaggtctatcggcaagctcccttctcatttgcagataacgcctaagctgttgattgtaccggacattttttgttgtcggattagtccgttcacgcctggcacgctccaggtcatgccttaccgcatccaaattaatgactcccgtatccgacgctgaggttagccctcggtaaatttcttgtggaacaagcaaaaatttattagccattttgcaaaaatgtgagcgtgaacaacaaattgtggggtatttatgcgtttttggtcacaaatgatttcgctacttcaattagcacgggtgttaggagggcagcaaacaaccccccaaatcccgatcctttctgaacaagcacacgtctcgcgccgcgttcacttctcgatctgctcatccgtcgcacagtctcaacatagggcatcaatctttttttctgtcgtgtagtcaatcggaaacgtgaagcgacgagattcagacaaatttccactagcgctaatagctgatcgctgttcgcgtgacgtaaaatcttcctacactttttagaggatttggtcctcgccaaagcatacagccagtccgagttgtcttttattagctgtcctatttttatctgttgctgttgttgactaaggtcctccatttttgggaatgaacacaacaatgccttcgtcttcctcctgctcttccttaaatatgtttgtgcgcagacgcaacgatgggtccgacgatgcatgcatgtcgatcagcaaatagccgtagggacgggcggtcgcttgacgatacgcatccagaaagaagtcgagctgacgcgggaaaagttggactccaatatttctgatggacaacagagagttgggtgctcgcatcagtaccaggtactgggaggataggcgcgccactttgagcttattctcaagctaatgttgagtgacaaaaactgacacaaattgattgtggtgggacagtttggtgaacaaatctgccaggtcttgttaaaaaatcttgtcagaacaaaaaaaactttcgtcaaagggggggggtaccatctacagtattaccaaaacatgtaaataaaagtcccaactttttttcgcaaacacaaaatgaaaaattttctcctactcattaaaattttagagctatttacataaaaaaggaagccctaataatgaatggtccgagactaactgtctcgggaaggaaaagtcccgcattgattgacttatctcgatttgagcttaaagaaaaataatttctgcaattgcagcatcgagagtctgctgaatggcagtgtgcagctgctgatcacttccgttccgatcactggcaattttttcgtctccgcccgtcagttgtccatcacggcactgttcgacctgcaaaaagaccagcacaaagtgccgtaccttcgcattgccacctgcgagttgcgtagcggaatgattagcaccaaagtgacaaatatgggcctgctcacagaaccgatcaatttgaagtacaaggtgggacatggccaaacaaaaagtttgccacttcgatttgtaatggttttaaaaattcaaatcgactaatcatgctcagattttttataaaaagccatatatttgggatgctcgagaccaaaaattcccggagactcgaccccgagatccaaaaaatccgatactttcttttctcgagtcgagacagggactctcgagaaccactaatgtttatgttatatttgctttaagcgtggcgaaggttgccttttcatgggcattttgtaaaaaaataaaaatttaaatccgaaaaatgatttttggctaatcacagatcatatcctcgtttgtctcctccgattctgacgactgttcttcgtccccgccaattgctgctgcagaacaaaaggaagtgccaactttgttgtccggcgggtatggcaaatccggcaaaaactccaaggaacactttggccacaatggcacaagcagtgcccgaagaaatgcactttctgcggaatgccatcctatcaatggcggatttcaaggagaaaattcgggtgagaaaaaaactcgtaccgtagccaaatggtccggtaacgaatggtaggtacagtaatcaactggactactgttgaggaagcacaaaacttacggtgggcagccacaaagtgttggagacggccaatttcgcactgtttgtgtacaaccgggagattgtgctcgccatcaaataccatgtcagagtgcgcattttgggcgacgatttaaacttccttcgtaaggtgaaagacgaaaagtaaccggggaattgcctacggtacttttgaccggggaattggttacagtactttttctgggatacgatccaagcggaacttgaacagagttctaagtgtaataaa

SEQ ID NO: 9835 - DNA, 2382 bp, Heterodera glycines
caccctccgccggcatcagtgccgccgatgaacaactgcaggcagaagccgacaagcagcagagcaaggcacaatttcaaattgttgatattcattgaatcttaatattattaaagaaataattattgtatttttaatatcgaatgaggttaatcagtgggtatttatactgactgacttgccgcttaaatagttttgtatatttatcattgatggtgagtttattaatttgctgaaattaattaatttaagaaacagccaaggggcattttttatggtcatctaattgatgttcagtttggaaatgaaaaatacacttgcccttgatgagtgaaatttgaaacaaaaaaatgtacaattaggtaattggtttgacatattatgcaataaaaaacgaatttatttacaaatgttgcatgatcattttcaacttaattcgatcatttgaaaattctgttcaacaaaataattaaagtgaataaaaaaaggaaattttaacccatccttttaccattttgtgaattaaattgcttcaagagtttatacgtcacaaaatatttgatttaatgaaaataattccatcattaatgatttaatctgctgagggtttggacgaaaaagggcgaaattagtcatgcattctattgaagaaatgaaattgcatttcatggctacccgacatttgaggacttgacatttgaggacccgacatttgaggacttgacatttgaggacccgacatttgaggacttgacatttgaggacccgacatttgaggacccgacttttgaggacccgacatttgaggatttgacatttgaggacccgacatttgaggacttgacatttgaggatatacacaatttcaaaaaaaaatgaatgaaaatcattataaaaaagagaaaaacctttcccaagggccaacgggtgcaatgtttaaggacaaccgaataatttaaatatttgacagcacaaataatgatttcaaatttaattttggagattaacagcctttttctttcttaatgatttacaagtcatcctaatattcaatttgctcagactaacagcaattgaacacgatataaattataccagctgggaagctcctgtcaatctttgatcattttggatcgcatttaacacaaaaagtttgtaaattaaaatgtatttaaagatatatgaacttttttgcctttcccacaaaaaaatgccattcattagtgatgtgaaaatctttcactccaaaagggtgaaagcgaaatcaaaccctgctggaaactggaagtctttataaattgaaaatttttgaaaaaataaaaatgtaataaaattttaataattcattgattttcatgaaattattctaatgcgatttgttaacagattttgagaaaattttttcaagaaaatatatatttttagggtcgggcggtttttatttttttataagtagccctaaataaaaatgttctgagaaaatattttgggcttctctcgccataataacgcatagaaaaatatgatttaaaattccgggctctgttctaaaaacaaatctccctgagttggttcaactcattcaatccgctctcctttcttcagaacaatcattaatgactctgatattaaaaagtattataaattcattcttgctttgacttgtggtcctaacaatgattccacatgttaatagaaaaaaggggatcttcatgaattaccaaaacacaagtactatttaatgaagtagttaatcttaaattgtttttgaatatgaaactttccaaaataatcaaagattgataagggcttaccagcatttggtacaatttattttttgcttccccggccctcgggaatagctttttctctttttttataatgatataaataaaattttcattcatttttttttgaaattgtgtatatcctcaaatgtcgggtcctcaaaagtcgggtcctcaaatgtcgggaatatccgcaaatgtcgggtcctcaaatgtcaaatcctcaaatgtcgggtcctcaaaagtcgggtcctcaaatgtcgggtcctcaaatgtcaagtcctcaaatgtcgcaccacggaatcatttacccgaaatcggaatttgccctttttgtcgcatttttggtccgtcaattggtcgagcaagtccggccagctcagtcccgggtttgtcatcccgtttctgcacgtgctgctgcatgacgattccagcgacacattcgtgtcaacattgtagaacacttgacagcagttgagacctgtattattaattattaattatgaatattaggtacttttccgttttggggccacagattcaaatcggtgcgaattcctttggccagaggactgctaatatcgatgtatggacc

SEQ ID NO: 9836 - DNA, 3227 bp, Heterodera glycines
ttataaaaatataaattttattcatttgacacatttataccctccccacaccaacaaaataattacacaaattgagatcaaacattaggaattttgcgttttcaagtaaaaattaagctcggaaccactttagaaaatttgtaaattcgaaaaaattcaaaaatctaaagactttggttaaagtggcaccgatactaaaattgacaaataatcaaaactttcagcacttcattaatgggatatggtcgcccactttcgttggcatcgctccgtcgtcgccgatggcgccgtaatccgtcaccgaattggtgcgcgagtcggccaatcgtcggaaaatgtcgtccaccggacgaccctttgtctcgggcagcaatttgagcatcaacagaaggaccaaactgctgaacgcggccaacgggaggaagaagagcgcaccgatggagacgatcagtgacgggtaggcgagcacaatgccaacgacgacaaagttgggcaaaagcagtgccacctgtgcaaatgggacgcgatattctccaatgttgcgtgacaactttttttctattttttttttttttgctgtggtgccctttaagaatttaattgtcacggtttgaaaaaaaaatgtcgctggaaaattttgaaatttggtgtggtgtaattttctaacatattgcccaaaagaatctactgttgttttttgaggatttttgatcaaatttggagtgatttattaaccggctgtacctattggcacagtaggagaaaaataacgaattttggaattcataaataccaccaaacaattattatcataaccgtacctgagtggctctagcgcgtgccgggtgtgggaacaattcacccacgagaatgggcgtcatgttaaacagccccaggttgacgctcgcttggcccatcgtacacccgatcagtgccattgacgagacaaaaatgccaccgcctcctgaatcaattctgtttttatagatcgtttgctttgttagacttaccgagtacgtcatacagtagctgagcaaccgtaagcagcgttagctcaagcgttgacagagcagtgatcagcaggaacaatggacgccgtccccaactttcgatcagacacggtgccaccaaacacaacggggcggtcagtgcggtcatggcctagcaaatgggaaaacaattaatgtaatttcaaacctaattttaagagaattataatttattatgcaaaaaagaatcaaaaatgaaaattgattatcaaaaatttataaatttctcccattcaaaaccagcggaattctccggcctattataaatattaatttatttctgttttttatttaaattaaattcaccattgtgaagactagagactcggattggcccaacccatagcgcatcagcatcggctccaagtattggctcttcaaatttatcagcgacaaggcgggtactgaagaggccagcagtgtaatggccatggaccatctgataaggtaaaaatcctttttattatttaattgatcaatttatgaattttttttcaagcttacggcaatatattgaatggtaggttgtttcgtaaaatccactaatttggcattttttaaacaaataacgtcctaactttgctcaaattagtaaagtttaaacttcttgatttcgatagctattagcttcaaaatttcatcaagtttaaaaaatgttatactgatttttggaatttgttgattattgttttctgaagctggacagaatgtttaacatttcgcaggctaatagatacttataacgacagaatgaaaaagttaaattttgttgatttgagcagttaagttttgttgatttgagcaaagttcttagaatgatttgtttaaaaaaaaattacaaaattggcgattttacgaaacaacccatcactcaatatatggtattatttatatggtagcccaatattttggtaattttccaggaaaccctaaacgtttaaagttaacctagaatgcctaaacaaaaagccattgttttttaatggactccacctcaatcgatggcttgtccaaaactcggtccatcccactttctcatggtgcacaattagacgttcatgctcaaattcgtcaaagagttcggctaaatataaaagaatattaatataaattagtgtaagagtaagctctaattgccataattagattttcaaataaaaaactaccaaggtttgcgctggagccatggtaaaacattgcggactgtttggcctcctccttggcaccgttgccgatgtacagttgcttgggcgactctgggaaatgggcggcgccgaacagatgaaacatggccatgaggagacagccggctggcagcaaccaccaggaccaactgttgccgaacaacgccggcaggcacaacggggaggccagcaacagcatgaggttggcaccggagccaattgcggtcgaggaccagcctaacaaatgagtggattaataggcaattaaaatttcaaaaataaatactgtatttcttgtattagaacccctggggactatatttttcaactcccctccccttcaaaagggggctttatttcaaggggtagggctctaatttatgggggggggctatattataggaaatgcggtaatgaatgagttgggatgtttcgggagtcaaattctcgagttgagaaaatcgtccaagactcttgcagtctcaaaacgaataattcccagtcgaactaaaaattggcaacaatcaattagcgaatgcttttttgttattcgaattttgtgttagctagctcaaaaacaaaaccaggaactttcaaaaacaaaattaaattgtgcccacctctcgcctggtccggagcacattccgccacataaatgaacacgaccgttttcagcgcagagatggcaccggctaaaaggtgtccgagcacaaacaattcggccattccaagccatttggccatcagcatggccagtgctgcaataatgccaagagaagagctgaaatgggcaattaagttgctaactaaatttcaatctttaccgtatatacactgcagtacccttgcgcccgtaacggtccatacaccacgccatcatcaaactcgcaatgatcgcgccaacaaagaaagactaaaatgttttttgtaatttaattttaataatttaagtcgaattttaatatataaatatttgttatttaatttaaattta

SEQ ID NO: 9837 - DNA, 3070 bp, Heterodera glycines
  unsure (1)..(3070): unsure at all n locations
atctttnntaagggataattgacatnnttgcctttaattgccttgccgcgtgatccaaaatattattatttggggttttgacgaacaaggaaagtgaaaagcaactcgtcacaccgaaaagcgggggaaagggtaaattgggaaggaaagcgattggtttgacaggcgacttttaagcagccaaaagaaggggagggaattggttggttccatctatcggagcaaaacggggcaacttttccccgtcccttctgttgcgtttccaatcgccgccattcctcgctaaaagcaatagaactggcgacacaaacagcacaacaaatgtccatttctctgtaaacatttgtccaaacattccatttacgatcggcgcgacgctttcagaaaacgaagccaaccgaaacccaaaacatttgtgccgttggactggccataacagaagacactgacacgacaaaattcagtggcgattcgtttttaaaatattgaaacaaattattattttttaaatgttaaaagaatattgcctatcattttgttttgtgtgtcggtgtttgtttagtgagactggaactgcctttattactggacattgttttattttatttttgtattagaaaaataaaatggaaaaataattaaacaaaaaataagtggtgggggcgcatgacaattccagggaaaataggcgaacagttcggcacttcaaatgaatcaaaaaagggatggatggccttgagagggattggactgaaatgaccgttggatttgcaggtccctttcacccatatattctcattgttgttttcattgtgccaccactaataaaatgtgaaggccgttgaaataatggaggattttcaggggagaaaataagagaaaaaatgtgccaaaagtaggaacagccaactgaagaaagttaagtagtgaaaagggtggtaaggaaacgaattgagacataaacataattaaactgaatctacggaaaacaaataattaagtccgataagaaagagttgatgcgtaattcatgttcaatgatcaacttcatttttgtggatcctgaaaagtcgagagcaagcctcgcgcaactttccccagaacaagtccctctgatcgagcaacaaactctcatccccggcatggtaaaatttggcatggcgaactgaaattcaaaaatttatttaaaataaataaatttgaaagttttgcccaccagcgtaactgcgaaggtaattctcgaagggtttgtcacaactgacgcatttgtaaagagggagatgtaaatgtctgaaaaggaagattcgggtggacgaatcgcaaccgaacaacttggtgttgacgtggttcagcagaatccattcctggttgatcactaagtcgccgcaattgccgcatttgatcgaattctgcactttgtttcctccttcgtcatgcgcttgggaggccgacgaagacggaatcaaaccgacggagtcggaagattggcgcacgattggagaggtgctgcgcttgtcaccaccgcctcgagcgatgtcgactaattgagccaaaattgtgttcggagtagagtggccaccaactttgtctaaaaagtgatgaaatgtttcgaagtccctcgcccactcctttgctgcaaattcggtaaaatttcattttttgtggtcaaacccaccaagttgctcgtgttcgttgccctcctcggccgtcgtctccgttttccgctgtttcacttcctcaaattcgtccccactctccgccgtctcttcctttgcggcatttccgtccaattcaattttctgttcctcaataccgctcaaaatatgttcctgaactgttgggctattcgaggcggctttgccagggggcaaattgaaatattcccgacggtgacgattcaaaatcgggaagattctaaaatcaaaattaatcaacacatcaaacataattaaaccaagccctagtgccccttttcttcccacctttccgtgttgttctcaattaacgactcgtcccctccgtggcgtttggcgtgtcgattagccgccggacgattccaaagaaattcctcgccacactgtttacacttgaagattggcaatttgagatgccttaaaaaagtgatgcataaagtacggtggtgaccaatgagatatttttaatcaaaaatgttttaaatttgtgtttttggcttgcatttcttatttagctttacttgacattgacgtggtacatcagtgaggtgcttctgttgaccaccatcgctttgcacacatggcattggaggggcagcttctgtttcgccgatccaatgccgggcgtcggatgggcgactatcgaagcgatcggtgaggcgacggggacattcacactgacaatgagagacaagaataatcacgcgggaattcgaatcagaattgcactgcacctgtgctgctgggtctttccaattagccccgtgttaaccacgttcacgccggtcgacccgactccgagcgccggcaactgaggcgatttatgatgcgccagaagagcgcccaagtcgtgctgctcattcgtttgctgttgaactgcgattttctctttaaagtacaaatgaagggagtcccatcacacactttcctttctctcacccaatcctttcgtcgccccattttccacgttctgtgccgcgatgtccgccgcgtacaattggtcaaagtgggacatcacattgccgtccatgtccgttttgatgtgttccaagaggttgcccattagactggatgtgcccatttggtcaaactcgtggacagaatcttaaaatgcagcaaagtggggatgatctaccgatttttgatgatttgtttaaaataaaatgtaattagggtaatactggggaatctgggctccacccaaaaaaatatttttctgatatgaaaagaccaacccgtgggttttcggggctctgataacgaatacaatatcagatttgcgaaaatcagttttattgtgttgaaatcatttcagaaaatttgtcaaacgtgtcggggtggatttcaaaattctgagttatcagaagccccgaaaa

SEQ ID NO: 9838 - DNA, 1480 bp, Heterodera glycines
agccggcgaggaatggcaaatgcattcgctccaaaccattcgcggaccttttgcttcttcttcgtaaatttcgcgacagaccctattccgaacctgaaaaaaaaataaaaaaacattcagcaaaatattattttggagaattaaaattaagtaaaaagttatttctaaagataatttgtatacaaatgcattttgcataatcatttatttgcccaaaattcagcaaagaaaaagtttttggccttaaaatttcttcaatttttatttttattttttgttgtattaatacaaaataaattgatcgaaaatctgctatttttaatctataatggacttatcaaaaaaagatggaatgcaaaaatttggaacaatttattgatttgttttgccaaaatattatcttaatattatgtccgtttatgtaaataaaaagaaaaatcaaaataggtataatattttcccattaacgctaaatttcaataatacaatttttcaaatagaaatatttcttatgttcgtattactgaccaaaaagatagtccaaattaaaaattgaaaaactcacgaagtattcggataagccatggtcctcttcgtagtggcgttttattgcaaattctgttgggaatttggcaaatttgcacttttcgcattcgaaaggaagacactgaaagaataattgttattaaaggaaattgttgtcacgaagaaaaatatgcacgctttcgatggttgggagaaaaaagaacaaaacattggaggtaaaaaaaagggggggggggagggaaatgataaaaggaattattggaaatgaaaggagaaatgttatgaataggaaagaaagaatgaatgaataaacacgaccactgctgatatgtacatatatcatcaacacttatttattatacacagcacaaaacgcacgttaaaatggtcagcagaaatgtgcgcctccaaatcgtctatgctggagaactcatcagaacaaagggaacattttgccgtcagtgacattttgtttaagctgaatacaaacaaacaaataatgtgataattagcaaatgcatttgagttttgttttgcttttttcccgtttcttgagtcaaacgacaactttagatagagtacagtatgcattttagtcaaattaccatatatatatttccaaaataaattatataaaaacttttaaatttaatttagtaaattagagaattagaattaatagagcagtaagagaatgttgacgctgtgggttttatggtagaggagcatactgacatagaatttattgtggtgcggttgggtctgggcggacatcatgggcatagatcgatattaatggtgtagcgatgttgtagaccgagagagcgatataccggcgatatactgagacactgtgtaagtaagtgaaataaaaataggggaaatagaacgcatagagaagatagagcggaatagaaaatagagcggcagagag

SEQ ID NO: 9839 - DNA, 1234 bp, Heterodera glycines
ttctgcacattttgttgcccgtcccgaccaaaacggagggaaggcaagcaaagaacggacccctctctccccgcttcactcatcttcctcccacttatcttcttcacttcacttggggtggaccttctccaccctcttcgccatttgtcatatattcaaaaaagcactttgctttggctaatcgtccaaagcgtgtgaatttttttttaaattcttattttaaatgagacacacacttttgctgaagatgccctaacaattctcacgaatgacataatttagctaggaaaataagcacggctattgtcatttttctctgccaatttaaacaaaaattgtacccctcgaaatatttttaattaaaagaaacatttgaccaaataaactgccggtatcaatcacagttttacgccataaatgcaaaataagaaacagaaaaaacaacacaacgaatgcttaaatatcaatgaaatgcatttttgcgattatgcttctcatcatcacaataatttatcaaaccacaggttcacgtgcaactttgaacggttcactgactgttagctctgaaaaatttaatgctttttaagtcagaaaacatttgtgaattgcctccactgtcaacgatcacgacgtcttttttgggacggtctccgccagcagtttcgccgtcttcgatttctctaacaatgttcatgccctcgagcactttaccgaaaacaacgtggcttaaagaaaaacaatttagaattaaaacttagaaaagtaaaatttcaccgtccatccaaccatggagtatggacctgagcaaagacaaaacaaaaattaaaaaactagcaaaaacaaataaccgtggtaatgaaaaactgggatccgttggtgtcagggcccgcattggccatactaagcctgaaaaggcgaaacaaaataaattaagcaaatgtcctttctaaaatattttaacataaaaagttgctctagtgcactttagggatcatcttcagtttcttaggtcataactttttttcttacttgatggttttttataccttttgatttaatttatctaattcatttatacctttttttgcctacatttttgatattgcgtaaaattcttatataactaaataatgaaagcaaaaaaaattcttattgttagtatactcgaaaatgagttttatgttttctcggcggggtttttcgttttaatgccattatttgtactttttttgta

SEQ ID NO: 9840 - DNA, 1073 bp, Heterodera glycines
cagggctcccagatcaaagatttcaaaagcctcatttcgcaggcaaaaaagcctcattttggatcaaaaagcctcattttacaaaatttatccaaaacacgcttaaaatgttcaaatgttatatttttgattgtctatgatcaatttgagcaattttttgttagaataggtaagcattttatgaaattctaagcttgaaaaaccgaagttggtttttttgcggcgcttttccaaaaaacttttggggaacaaggggggccggcggtactgataggcgccgccgggaaaaaatttgtaattttcaaagcgatttgttaacagattttgtccgaacaataaattaagaattttgactatatttttagcagattttcattgaaaaaattcttaattttgtgattttcggaaaagaattgattattttctagtttttatgaagaatttaacaaaaaaccacaaaaaacctcaaaatttctcaaaaaaccacaaaaaacctcaaagcctcatttgaaaaaaaaacctcattgacctatcaaaaaaccacaaaatgagactaaagcctcacatctgggagccctgactgtaaatccgcttactattcatgatcggagttctcaatgaaaattttcaaaaatcaccagttggccgacgcaaaacgaagatacaattgaaatggaaattgaaaaagtgtccgaatttgcgttggaggaggtgggaagagcgattaagcgatgccatggaaattgggggattttcatggaaaatatgggcagaaatcaaaagcaaacatgaaagaaatcagaaatggttgggcttttacctttacaacaatgaccataaaaatggtaaacaaaaaaacgctgatgcttttcgtaagtctgagataaaaatgattaatttcattaaaaaaataataaagttactttaaaaaatatgaaaattttggtccattgggcattaataaggcattaatgtatgttgtgtcccggggtttaaggcttcaagccatttcaaattaccattttaagagagagcaatttattgaaggaagagcattgacaaataattatatg

SEQ ID NO: 9841 - DNA, 2455 bp, Heterodera glycines
agaattgccaaaggcaaggaatggcacagactgatccaccgcagacatctcgcagcccccgaggggaaattgagtggacttatatactggcacaattgggatggacattggataggatgtggggtatgacggcataaacacaaagaataagagagaaagggatggcatatgcaacagaggtgaatgggatagaaacggcacgataacattggaaatgagagggataggactggcttgggatgggatgaacattatgaatattaaaacttagcttattaaaatatttaaaaagtttattatatttcaggcgaaaaattaacttttacgcgcacttgaaaaaacttgctagcaaaattctcacattttttcaatttcaattttaaatgtcccaatggataaaattaattttgtcgttttccatcttcaaaagcaatgatggtcttcattattttgccataatttatttatgtcctcccttcctgcggtagccaataaaaaaatttaaaaattgaatttaaatcataataaattaattttaaatatgatcaaattcattttagaacgaatcaggtgcaaaattaatcaaatcaaatcaatcaaattattaactgttccacttcttttttttgggtcgtcgttttgccgttatattttatgccagaaaatttttcattttatcagcagtttctatacatacaaatttgaattagggcatttttaatagagtttgaattgttaggaaaaattccgaaaaaatcataaggggattttttttttttgaaaattgactaggcctaaaacaattattatttattataaaatatagatgaattccattaattattttctgatcttttcctccagcagaaaatactttacctagtaatttttttattgtgttcgaaccgagtctcatattttcattttaatatctggacgcaacttttgcattggactgtacataatccaaaaaactgtttttaaattaaaattacataaacagtagggaaataaattaaaaataaaaaatagctccaaaaagatgcttattcagtgagatttttcccaaaactttgttgcttatttaatatttatgctctgtttttgctcattttacattcaaatcatctatgcgttcttataaatttatttgggatttcctaattgttggaatttatttttagtttaaatttttaaataatccgatagattctatcaactaaactccgttcataacttgacaaacttttttccattggtcaatggagatgaattttttttcccaaattatccttctcacctacatcgaaaagaagagcctgggcattcgcaaaaaaaaaaacattacgcaattttgagattggaattagcaaagaggggccggcattaattatggtaattagcaaagactaattgatacttaattatgatgataaattgctggaaaaattaacggagattctactaagattcaaaaaaaaactttcttagtctccataaaaatttgcaaaaatagaaaattttctaacaatttaagttccattaaaagtggtctaattggaataatcaacatatatacatagcatgtataaaacatatattgaatagttatagccagtatgtaatacaaatattaatactttgggtacttaactttgaaaaattatggctaattttgtatgaaaatgctcctggcgatttgggagttgaggaattcccttctctcgccctccccaagtcagagataaaattaatagaatacaatggaatttatacaattctccgtccattttgtcccaaattacagtattatggccaaatagtatcgtatctcaaatgttacgtaaatttccctttattacacaaaattagccccacttcggggttttaaacgaacaaagccaaattgataagaccaggaaaaaaataaaattaattttacatattttcttcataaatttgttaataaattaatatttttcagtttatgcgagttttcttattcttcaatttcatccatttgggttcatcgataaacaaatccaaattctttgttatctgtgttccttgattccaatctctctcttgtttttgtcatcgatctgacaaaaataattttctttttcgataaataaagtgcaaaataggaataaaaaatgcattttctattttttaaaattaatatttttgttcaaggtttaaattttgggcaagaaatggacggggaaaatttttttagaaaatttaatttatgatatttgttaaaagccaagcgcgactattttttgcctttaaaaatgatttttttgcgacgcacttccaaaaaattttgggagcaggggtccgcgccgggaaaaatttgtaatttttaatgcgatttcttaccgattttgctcaaaaaatgacaagcttttacgatttcgagccaatattgaagagaataagaattttaggg

SEQ ID NO: 9842 - DNA, 1004 bp, Heterodera glycines
tgtcgtctggtaagaagtagcaaacatgtcacaaaatttcattttcgttaagaaatttttaataaaagatcgggagtttctttttttattttcttttttcaaattataaaaaatgttttgccaattcaaaatgattgattttaagaggaaattccgtttttcggcatttttgtggtcggtattccaaattcaaaaaatgtttagccttcgatattttgattttgaaaatttttgggacctcagaatgtcattccttttgaaaaaatttgccgaattcagtattttatttatttatttattttataacacttaaactcctgcagacgacctcgatctttggcgcgaattggatctgttgttcgccgaaacggagaaggaggagccggaggaggctgacgacaacattttgcaacaatttccgcccaaatcagtcgagtgtaagaacgaaaatttttgatataataattcaaaaatttttgcttaatatttaggaaataatttataattgaattctgaagggatttttttgacttatattcataaaattatttatttaaaaaataattgaataatataaagttaaataatcattttgtcagtttgcaagcaattttaggctggtttgaagcatcgtacaaacgtccttcttggaccgtaatcgaggaggctgcggacgcagaaattcaggctaacggagtgcaattgtcatttggtaagtattttacacatcctataaaattctaaaatttttattgtttgtaatcttttaggtcccacaaaaaatactgtatacgtttagtgaatttgtgcgcatttttttggtttttgaaaataaaaattctaataaatcctaatacatgtgagttaattaaaactttcgaaaatataagcaatgaataaacctcaaaattaatcaaatttatttaatattaatcgatgtttgttctattatggttaattaaggaattgctggagccgagcaaaggcttttacgacaaaagcga

SEQ ID NO: 9843 - DNA, 4977 bp, Heterodera glycines
tctgaagaaaattgcatatttttcaagattttcccgatttttacctgctttacagtagtccgcaatgacctcacggaggtcaaagggcgtgttgcggttctcctcgtaccactgctccaacttcttgcgctcctcagggaagtgcccgccagggtagtagtcctcaagcggcggaagagtgtccagcacaacaccataatttgcagccttaattattgattatttttggttttatttattgattttttttactttgttgaacttgtgcgggaagtatttcttgttgtccactccctctatttccaagccgaacgtcttcacaaaggaggccagcttgatggggatcagtttgtaactgaaaaataatcgattatttatgttattttacactttttacctgtcccggaagatggtggtagtgattgctcctctcttgcgggccttcatctccagcaggtgattcccctggcgcacgagttcgggacgcacacccatgcgcagcatctcgccgtagatcagcacgtgatcgtaacgtgacccttaaagttgttttctgcatcgttgtcatcgctgtcgtcgtcttccgcttccatgtcgatgaaggcatttgcagcaggattccgggccttgttgttgttgtctccattcgcacgcttccgtttgcggcgcttctccgcagggtcaaggccgaggacatcagcttcaaagtgcaggagccacttggtgaaggccgtcagggggtcgtccacaacgtaggcggtctccacttcggtgttgtagaactcgaacggtgcccatgcgaaggtcctcgtcagcccacagattccacagcttcggtccagtggctggtcccagatgccctttgcaatgcattccgtgcaagtgacgtgcgcgtagcagaagttcacctgaaagaaatacctaattttcgtatattttgtgttttatttacctgatgcttgaagcgcaggagttcagggtcgggcttgaagtccgtagtgcattcaaaatcgaagaagatgatgcgcttttcggtcttcttctttggccggtacgggatgtagcattcccgtggcacatggaatccgaggcacactttgcaaaacttctgaccgcattcgtgagccttttgtttgtggtgcttaaaagcattttgttttcaatttaaaatatcaaatgctacccgaatttggtaaataactccacagtcgatgcactttttcgagcttttgcagatcgatttttcgattgttgccacttcggtgccacgcttgactttgcattttgtcacttttgtatggtgatcatagcactctcggcttttgaatgtctaaaaaaatatattaaaaataacaattcattctgtggtactttggagcattcaaggcatgagtgaaaaaagtcgtcatcggcatcgacgcagtttccacggaaggcacccccgacgcgttggcagttatgacatttccatttgcaagtgttgtaaaacgaaagaaacatacccaaggtttggtagtggcgtaatacagccaaattcacgagcaacttcctcaaggattggcacacattcgatgagtcggaattcggtgttggatgtgacggtcatttttttcaataaaaatcgtaaaataagattgaggaaaattaaagtatgaaatatttgtacagtaaacagtacgcgaaataattgaacatttcaaagcactttatgaatcaacactgaagaaacacatgacattgttacggaggaagttatagaattcatcaattcccttttctttgtcgaagtagatagtctcaacgcttaggacgtatccaaactgcttgacaattcccttgaactcaatttggtctccttcttcgctgatgtagatgaaacgcggcttgtcctggtgctcgaaaacgtaacgcttctgctcctcctcgtacggcaccggaattttgcagtcgaacataaccgcaaccagatcaaatgctgtgcaacattcggcgagagtgaacggctcctcctttttgttcagttcttcgtccattttctaaaatattatttctatttgatgatattaataaaggttaacctcaacagatcgtagctcgtttgatggttcatccaaagacaggctttcaatcattgtttgttcatcaatcggcgtagtcaaattgttgaaattcatagttggtttggctaaacagcattgtaaaagacagaaacagaaaatattcatgttaataaataatgaaagaagataagaatgattttgaaaaaagggtaggattaaggatagaaacaaaaaaaaacgactccaagccacttttcccgccaaattttgaatttgaatctaatgcgaaaggttttcgtctcaataaattatggcgttatgtatatattgtggtgttttgtcttgttttgcgtattttcaaagtttttccaccggactacagtacccctcgcagtgatgacgtcatcatctttgctgcatatagttgataattatcctttttctggcaagtggtttcgtggcagagtggtaatgtgttgggttggtggcagaccaaaagttcgagtccacttgcctgcgactaatttattgcgatttttcaccggactacagtacccctcgcagtggtgacgtcatcatctttgcagcatatagtggacaattatccttattctggcaactggtcttgtggcagagtggttgtgtgttgggtggcaaagcaaaagttcgaggccgcttgactgtggcagaatttttcgaataaaaattttaaaaaattcaaaattaaaaattataaataattttagaaaaaattttacaaaaaaagtcgcgcacccctgcaataggtttaggcttgcagaaaaaaagtcgcgcacccccctgcaataggtttgggtttccaaaaaaagtcgcgcaataggttttggtttcagtactgaaaattttggcgctcagttggcccgcgctcacttggcggcgctcacctggctggcgctcagttggccgtgcacccctcccataggtatgggaggctaccgtaatccggtggaatttactgccctaactacttagaaacctttcagaaatggaggacatcaattgagtttccggtgtgtcttttccctaacgagcacacccccgtttggtatcggatggaatttgtcaacacgatgaccctcagacacgaggatggtaattcctatcaaattgatttgagtaaagaacagaaaaatgatccagaaatattggcattcattgaatttttagcaaatggcaatatgccaccagacttttcggaaaatgaaaaagaccgattttcagccctgtgtttaaatatagtctacgaatcagaggtactttattttaaaataccctcatcaagtacacgaatttttgtaccaacttcgttaagggccttaattttcgaatcgttccatacatctccattgggaggaggtcacatgaacataaaaaagacactacggaaatgcaaaaatatttttggcccaaaatgcattctgatatcgtctcatggacacgtcaatgtattacatgccaacttaggcataatcccacccctgcatatcgtgctgaaatgcaactcgcacctagcaataccctttttgcgaaagtcggcttagatttggcaggtccatttccaaccacatcgcgtggaaacaaacatattttgaatataatttgttggttttcaaaatatgtaatatctgttccaattccggatgccaaagcaaagactattgcaaaagcttttctttcaaattgttacttaaaatttggaggttgtactgagctcattagtgacaatgccactgcttttacctcagaattttttaaggaattttgtagtatgttatacataaacaaaacttatgcaattccccactggtcacagggcaatgcggtaacagagaggtcatttcgtacatttcataatattttatcaaaatacataacgaaagaggaccccgattttgacgaatttttagatttcgcctcattttgttataacacttcttgtcactcatccacatccgaatccccatttttccttgtttttggtcgggacccaattttctgtgtagaccaaatattggatgctcgcattcacagtcaagtccaacaagcggaggaaaccgatttcaaacaaaagttagtcagctcattaagaaaagcatggaaaagtgcagccgatgccaatgaagcagctcagcagaaaattaaagagcaatatgaccgaacagttagacaacctcaaatttgtgtaggagaccgagttttattaagaaattatgcaggtaaagttggaacttctaagaaatttcatctgccttggaagggcatttttagagtgatagaaattgatggcatatatgccactatcgttagctgcatttcgccgcaacaaaacccgaaaagagttcacttaaatcaaattaaaaaatgttttgaaaactttggtcctaattgcaccttgccaaaattaccaatcgatgaggaagagagtcttgataaaatgcatgcaacaaatttggacaatttccctggtcacaatcattttcccaggactaacagacaacctagtaaagaaaatcctgaacaggaaaatgattcgcaaaatttggccgaaaaaacagattgtcaagaagaagatggaaataattcattagacgaatcaattaagcccaaaaagggaccggagtatgccttgagagaccgaaaacgcctaaatcttccattacgctttagagaataatttaaatatttttttttattttttttgttgttgggtttgtcatactttcataaaaaccacttacggagaatttaaaaattcatttcatatttaattaataatttaatttacggtttgtcgcatttgcgccagggatcgatcccgagtggttggtgcaccaattttggctttaaaataattttatgaatttttttttttttttgt

SEQ ID NO: 9844 - DNA, 949 bp, Heterodera glycines
  unsure (1)..(949): unsure at all n locations
taaaaacccaaaacttaatcaattaggtcatttttttttacaaattctagttaacaaatcgcattaaaaattacaaattttttcccggcggcgcctatcggcaccgccggccctccttgtcccccaaaagtcttggaaaaaacgtgccgcgtaaaaagcggtgttgaaagcaaaaaaaaggtcattgatttacattaatttacatggccggagaccccttcgcaaaattggaaaattggctgctgaccccttgttttgcaataatctgaattttgaggtctacatctgaattttagtgttctatgtcctgaatttgaaaaaaaaaaacttggtcaccctcaatatacatatacttctgaacaattctaatgctaaaaaacaggtactcgcgcgaaaactgaataaaaattttgtatttggaaaattttgtccaaaaatttttatgttctaaaattaccggtttttaccggtaccggtaccggtaccggttgaaaaagttggtaccggtaccggtaccggtttttgcagtaccggtcagtaccggtaccggtttttttgcaattaccgattaccgctcaactctacttaaaagcgaacaacatttttcaaaatatttaaatataatgggtttttaggagatgccatgtctatgccattttttgttggaaacaaaaaacgcatccaaaagtttgaatgggcatacttacaacagattgtcaattgtttaggcattttcttacacttttatacttattattttccttttttgtcataatttcaagtttttcaatttattcaagttaaatttctatcgaagtctaaaatataatttaagaaataatcatttttgaatccaatctttaaacaatcaaagggggtttgagaatgcatgcggcacttccgggagacgccaccgagagattaattattanatacaaaattcccctta

SEQ ID NO: 9845 - DNA, 5731 bp, Heterodera glycines
  unsure (1)..(5731): unsure at all n locations
gatgcatagcccagcgatgccactagaaatttacaaattcaaactacagtgtcaaaaaatgngtagttaagatgaattttgtgtcaattgngagtcaaaaacaatgaaataaattaaattttagctcacattcagctcaattaaaggattttgaagtcagatttggagttaattaaaattaggattccataattacgaagttttcgaaccccccgtaattacgcattactgggtttctgtgatttaaaatcttgttacgcccatactgggtaccgaaaagcgccatcggggaaacttttggaaaaataaaacgcattttataagaattttcatttagatttaaaatatatttttaaatttaattttctccaaaataagtttatggtctagcttcttccaccccaatttttgggtatttctcgattaacccaaatttattctttgttttttaaaaatggcattttatctgtacattctaccccaccacaattcatacgttataaattatagcagaattgcccaagaattttttcgtacatttttccgctatgatggaaaattgtaaagggcggaatcattagggaataatgcgaaaaaggctgctgaatgaatcaccaacaatttttagcagggaaaagcatcgaaattccaacacaatttgtcggcctcattcaaggcatttgcttttcatctctctttcgccaaatacagccattttccgacgtttttactaatttctatcatttatgttttggcgcattcatttttttgttatactaaaagctcatttaagaaatattttgggttttttaaattttggattttctcgtaaatgaaattaaaaattttgtagaaaacttctaataaaaataaatctcactctcgtttttcaatgccctaatttgtaaattgctaaattacagtattttatatttattaatatttcttaggacgctgaaaaatgctgaaaaaggaagaacaagtaagtttcaaattaatttttttggttatcatttaaattatgggtctctgatttatagatagataaaaaattcgaccatccatccttttttgaagtttaccgacttttttcattttttgacaactttagccatttgagatagccgatagaagataaggatatgtttacaataataaactcctaaactatggcagattcataaactagtagaattagattactccaaataaactaaaaatgccaaaaattctccccaatgagctaattctggaagtgaataacttcaccaaatttaatcgaaaatggacaaattgccgtgtttcatttgcattcgacaaatttttactcgaaaaaatgggcgcttggttaattcaattgaaaaaaatggtcactaaaataaataaattagttattttttgattttaaatgtttttacaggcccaactttgcgcacaatcgatcgatgagttgtgcattacgatcaattcggtggctgatgatcagtcaaaattggcggcagctactggtgcttataatggcaagttttacaaaaattagcttcaacaaatttgatattttttaatatgcagcttgaattgaattcatttttctatatttatgttcgatcccactttaggactgaaaaatttcatcgaccaactgcccaatttgcccccggcgccggcattggctgacctcagtcttgatgaggaggaggattatgtaagtttcacttggaatttttctaaattcaatgcttatgatttctttcattttgcgtttttaaattaaaatattttttcttaacttgatttttgcaaacaaaacaggcggtgtccgtgcttaacaagtgctcagatttggttcgcatgtgctgtcagttccatcgttcttccgcagcggctttgggtctccttaatgcttgtaagtgttatgtccgaatatggtttttttaaaacttggttttcatacacttatgatttaaatagtaccgaaaattcatggattggaaatttatacttctcgtttaagacgcagttggaaagattttttcattgttttttaattaagtttaattaattttttatttcaatttcaagatatcactggcttcaaagacgcctacgcaacggtttgacgacatcgttgctttttgatgtgaagaagtcatcattagtgccgttcgcattgctttcatgcatggaaaggggggggggtggggtcctaccggcacagcctgagcagaaaaattcttattttccacaaaatggctaaacccataaaaaacggcctttttggtgcaaatctgttagaaagaacgaaatttgcaaaagttttccggcggcgctgataggcaccgccagtgcctttgttccgtaaaaggcctttggaaaaagcgcgccgcgaaaaaagcggttttaaaaccaaaaatgatctattaacatgggaccggactccaagaaaatttgcggctgacctccctcccgccccccccccttttcgatgtatgattgctttttcagtgatttttgttgacatttatgctttttgtttgtcattttgacgtttacttcaatgttgtcagattttaaaaaatggttaaaaattctttggattgcgccaaatggaaaaacttcctnttgtttcaacattaatttttaatgctgccttaacttgtttgttgtgtaacggaatgttgggttactgtaaagaaaagaaaaatgaaaaaaaaacaaagtgtaaatttttgattatgatttaattttgggatacataaatttttgcatttttcttaagaaatttctataaattgttacggataattttttatacaaaaaagcttaaagcaaattttccaataagtattagttttcttgtgtgtacattcatacaaaaatggtatggtccgttttttgattaatatttatgtatattaattaccgcaattatggccaaaagataataaaaaaattaaaacttgaacaaaatttcttttctctcacaaaactcatttaaatgttaaaaacaagaaacattgatgataaatggaaaaataaaattagttggaaatatgaaaagaaaattaaatcaattaaaaaacggaatatttatgaaaatggcgatgaattgaaagtgccaaatttggcattatattcatccaacagaattgtaatttttctattatcttttgttttgttcgatgcttttctcaatttcgtcctttcttccttggcattttctttcatattttcatacattttttccattttttgctcaaattctttcncaattctttcaaggtcncatgatcgagtcaaaattccttttcccttttgtataattttatgataccaaattttctcctctttaaattccaaatttaattcctcctcgtttaccaattttattccataaaggatttcttcatctttgccaaaaatatttggaataatcattcagttttttgactacttcgattaaactttccgatatactttctgctgaattataaaatattggcttcaccaatggtggcaattgtttcgacaattcggattttagcttaataaaattatgtttaattattaaaatttcaaattaatataaaacaaaaaacaaaccttcggcatacaatcggaataaatattcatataaaatgttcaaatatttacgatattttggaattctttcagttcatattcttcatatgcatccgcaattttattacattgccaattttttcgcatcaaatgcataatgccaagatgagtctcatatttttgctgaaaattcacttccccttggtaatagaatttgaatattctttagccttcttaaaaaatttctctaaattgttgctaatcctttgataaattccaaaaatagagcatcttcgttctaaattttgaattacatatttaattttcattgaatgtttactctctctcacccatgccaatttatcatcgaatttagaatataaaaactatttatgcatattatcttttgattgattgattttccatggtttatactttttttccttatttttcgctttttgaaacattttccctaacttttcttcaaattttttgtttaaattttgttgaattattcattttaaactttcatttgtttggcattcattcgttgtttcaattgccaattgcaaaatcatttgattaatggcaatttttgttcatttttcaattttattccataattcaatctcttctcattcaacaattttggttgtaatttcaaataatgaataaatttattttattttatattttcttgtccgacccattcaataaaataaaattctgaaatttcgacgaggcaattcaccacataaattattggcccattaatccacttcgattgccaattcattctcataaaacagtaaatgccaaggtgtgcctcatatttttgctttgtaaattcactgatttgcattttctgatcatttctcacaaaggcaattagcatttttggtcgtctccctaagcaaaaaaattagaaaaattaattgcctttattaagaatcacatataaattgcagttgaaatgtgaattaaaatatgatgaataataaattgaaaaaggattatagaaaaagaataaaacaattatattttctttaatgaattaaatatcaaatgaaaattaaaagaacattaattgtttttcaatttatttacataaaaaagtaaaaattatttttattattatgaaattaacgaatactttctaattaataaaaaaaatatataataaaataatttaaatctattttaaatgaaaaattaaataatgcaattaagccttttttatttatatatttaatagtttatatatattaaataagaatataattaaaacttagattgatcaacagtagaattatttgaatattatttatccaaacccttatttattaaatatataatttattatttatcccttaaaggatgacgcaattcaaatttttggaatgagtgaattgatctgattttatagaaattatttataaattgcattgaaatttaaatttcccgcctgccataaactccttttgatttttaacagtttgaaaatttataatgaagatgttttttataaatttcatgcacttttcagatgggaacctccttagaaaccaagaaggtttactatattctgacatcaattttgaccaatctctaacctaaactcggacaaaggtagaaatttaaaattcttggatttcttttttttttgttcgaatttaggttagagattcagaattggttgaaatatttgtcagatttgtggtcagcgaccgcaaaaaattcctagaaacaaattttcacaattgttatgacaaaaaatcccaatgattttacaaaaattcaaatcccgtatggaaaagtgccggtttcatctgataagcctggataaacagattttccaactttttttttatgtgatcagtttgtggtaattttctgaaacagaaaaatgcggtaaatgaacgacagttattttaaatttatttaacgagctatgagaaatttaaaaaaaatgattataagtggaacacaaataattaaatttatttaataaacagtgtaaatctaaaaattaaaaaatattaattctttatacttagaaaacatttgatttgcttgcatttttttgaaaaattctttaagacgacctttaaggtgccatttgaacctcttgaattgagaagaataataa

SEQ ID NO: 9846 - DNA, 3009 bp, Heterodera glycines
tttcatttttttgacaaataacttaatggtcgatgcgtaagcggaattggctattgaaagaccgatggcatccttcaatactgttatttgtcctcattaaattttcatcaactctaaatttttgtttcttaaaattctatttccacttttacctttcactcatattccacatttcctgtggaaaacttgcagacctcccctgtaacccattgttttgaatgcgatttcgaatccatgcatccactcgtccataagcacccaattccggatcatcttcgagcggaattgattgcagttgccaaacacggtcacacccaatccaatatgtcacaaaaattggacaagagctacaaaatagtgattgccagcagattttggccaataacaattgcatcagaatcctgcgcatccaacagatgatctccagcatccacacgctgcttggaaacttctcgacgatatgagcggcccattgacgaagttgcaagttcggctcggattccttctgggattgcgcctctggcaatgtcaactgcatgacgagttggcgctgggttttcagcttgagcagaagctcttaaattcgtttgagccgttcgaatcgattggtgagaagcggatggttatgattggcatttttgaccggcgttaaccgtggttaaaaatccttaaccggtatgctcgtccttccctttttaaccgtggttaagactaaaccacggttgagttaaccgtggtttactccctccttaaccacagttaacgcaggttaaccgtggtttatttccaaccggtatgctcatctaaccgtggtttaatctttcttaaggaatcttaaccacaactcgagttgtggttaacgtaaatttatttaataaatttaaatagtaaaataaataaataaattttttctagggtaattttacaggcagaaaaagaatctgactttttttttttgtctatgatataaattattgacggattagtgttatttcatcaaaaaaatttgcacacgcccaaaccgctaaaatagctttttaaaaaaggtgacaaaattgctgctgtttgtagcatgttgcataacaacgtaattgtttgtaatgcactattaccaagaaattttggctccattgcagttcacacggccataaaaaaataatttgacaattttaatgcagcaacaggtcaataagtcgtacggtgtatgcagcgataaatttcaatgcctatgatcaaaacgcggcgctactgcattttactggccaaatgcacggactaaccatctgcaattcggcttagagcttcaaagcaatactcgaaaccgtcggccaataaaatttctctgcgctgagttccaaatttacttttgcatattcatttatttatggttgtatgggtcactcaaaattatctttaatatttcttattttattatacttttgttactagcacaccaaactaacttttttaatttgttaacaagtttaagctaaattgatttgattgatgtatttttaggaaataatccgttctgatgactagaaaatatttttgtttaatttaaatttactgtcggattgtccactgtcggattgtccactagattgtctagtcacgaattagagaggggaagagaatctaaaataaagagttagttaatgggaagtgaaatgaaactgggaagaaaataatttaatcatttaattcattatcacaagtttttatagcaaactttttaaactctttgagatcagagcggttggcgccgcgaagcggagcccaaacgctcgtcaatattattttatttggctgaataaaaaaaaagtttacgtgaaccgagaccccaaaaaacccgagaaacaatttctcgactcgggaatcgagaaccgagaaatcttaaagaaattaatttaaaggtatttttttaagagcataaacacataaaaaagggatagctcaaacggaatttttgcttttagggtaaaatcagaacattttgtaaaattgctttaaatcagttatttttacaatttattcgatcaaaaatatatcaaatattatattttttgtctcccattatcgattttatctagcgcattcgggatcactaaatcagatttttaacaagttttgaggcgtgctttttgtgcacggcggcgccgataggcgccgacgggaaatttttttggaatttttcatgaattttgttaagaaaaatatgttcaagcttgaataatttttcctcttttctccctttgccggagacccaccccccgaaatggtcatcttaacagtgtaaaaatttctcgatttccgagaataaaaacccgagaccgggaagcgaaaaacacgagaaatttcccgagtcgggaaccgagaagtgagactctcgcacatccctagtgaccccgacccaatttatatacatttttaatgcctgcagtattcttcagttttaccttattttcaggtgtgcttattcacttacatgggcagcactgtcagctcgtcttgtgtcaaatttcgttcaatgatggcgaattctgaaacagaactcaaattgccgtcgaacatcgtcccattgcgtgaaatgcaaagatttgcgggattcagcggcgatttaatgtcagtccaacgggggcaattaaatttaatgatcaatttgaataattttattgaatattttatgccaaaatttgtcttcacaatttcgtttccctcctattgaagagctcagaagatggcgcttcatctgttctccaatttgatggaacccttttgcaaaagcaggctaagtctcgaagaatttctgctgctccgtgccattttgatatgccattcgagtgcgagaagggaagagcagggctggacgtaactgattttcagttaccgccatcattacggcgattttttcagttacggccatccgtaatccgtcattacggaggtccaaaaaggccgtaatttggcgtaatccgtaattttcaaaaaacatttttttatttaaaa

SEQ ID NO: 9847 - DNA, 1990 bp, Heterodera glycines
ccccccccttttatgtttgttaattatgctacaattaccaagaataaatcagatgaaatcgaaagccgtaatttccgtaatccgtaattacgtccagccctggaacagagagacaaataaatgccgatttagcgattgttttggcataattattagtgttgttcgagaccgaaaatttctccaggccgagacttgacctcgagaccaaaaaaacccggacttttctcgagtcgagattctcatgcaacactaataattatcatatgacttgtgttttctcaatttagctaaaactggttttctttaaggcaccccaaatctttcgcgctcggcccaaaaactgcttcagagtgaatctgaacgctatgccggcattttgttgcattttttgcagttaaagcacggaaatgttgcgggtgcttctcgctattcggaagtcatacaggtgggaaggccgaacgagaagcattttacactttaaactgttaattttgatttaagagatattttatgtttttttcggtaagtaaacaaagaccggtcggggtcgttttcccgacgtcgttttcgcgccagcccgagtttttgggttctaacttttttcattatcgaccaaataatcttggtatcattcgaaagcttaacatctttagaggctgtttctaagctgttgctttgcgattagacaattattaaaaagttataccatgaaaattacaaaaaaatcaaaatttttgaaatttttttaataacttttttgcaggctagaaaattttttggcttttttgtaaggctaatagagcttgtaaagggctttcgaatgataccaagattgttagatttggtcgacaaagaaaaaagttagaacccaaaaactcgggctggcgcgaaaacgacccccgaaactcacgcgtaaaatgggcagaaaataaacatttgtgttcaattaaaataaatatttaaatatagaaggcatacaaatttaataaaaagggaatataaaaattaattgtataatataacccggcacaggtggtcgtgtgtctgctccactcgaagaacaaacatcagtcttatctaaagcatttgtcatcagcaattctatgcgattccctatctatgtatacaccttcgctttttgttccaatgatgttggatggttgacaatggaaaagcattttagttgattattttattgtgtatttatgagatagcaatttaaagattttttattcaaaaatgttaaagcgccgtgctgggtcgtttcgtaaaaagtgccaattttacagattttcgagaaaaatccgtcataacttttcttaaacaaaaaacccaatttaactttttgaaaactcaatgaaatttctgaaaattgagcaagtcaagagctataaagattacttaatttggttgtgtttaagaaaagttatgactagggcataaaaaatatggatataaaatcgcgaaatatggccataaaacatggaccaaaaatcgcaaaatatggacataaaatggcaaaaatatggagataaatttttcaaaattgagggtgtaatttctcaaaatttcttctaattctctaaatgtaaggtaaaactttcaaaaatggataaatatggaattaaaaatattaaaccaaaaaaaacatgataaatttaaaacttacttatttttagagaaaaatcaacccaaaaagcgaaattttcgtttttttgcttatttttgacatacatttaccgggaccagagcgtttgggcccccgtttttgggcccccgcgtttgggcccccgtttttgggccccggggtcgtttgggcccccttttttgggccccggggtcgtttgggccccaacccaaaaatagaaaaatgtgcttttttaaaaattaagattctaaaaactaagccttagggatccctcgccaattggtataagttaggtttaattaacattcgctcattttttacaattttacttattccaaatcc

SEQ ID NO: 9848 - DNA, 4495 bp, Heterodera glycines
tggaagggaaaggccgagttggccaaacagcagcagcaccaccagcaacaccaccggcgatttaaagtggggagaaaaagcaaaacaagacaaaaaaggaattatcaaaattaattagataaaaagagcatgcatggagcagccccggaggcaaaatcaggcacaaaaagggcaaataatggcacaaattgggaaaaaaacaaatttaacagaaaatccatccgacaattgatgaggggcaagcagttgagcacaacagagaaacggaaggccaaagagagcatcaacagcagcagacgcagcagccgaagaaccgacgcttttcgagagggttaaaaaacgaaatgaaaaaagaaatttaaaaggaaatgccaatttaaggggcacaattttggaacatccgccgaacattgaattttaccgcaacactttggagaaggaggagaacggcacggtacggccgacaatgttcgacttggtggagggggacaaacagcagcaaccgcagcaacagagaagggaaagtgggaaggccgtggagatgttcagggtgatcagaagcaaaaggggggagggaaagacaaacgaaaatgaaaacggaaatgacaggaaaaaaatgcgcaaattttggagggccaacagcggacaatgggagccaaattgacatggcgaaaccaaccgaaacgcagcgaaagtgacgcgtccaaggtgaaaagcattaagcatcgccaaaagcgcacaaatggtgccaattcgttggacagaagtctctgcaagtgacgccgcgccgcgtcgtccgtccgagcggcgccgacggagccaaagcgaagctgaccaaattcggatgggtcgagggcgtgctgatccgctgcatggcttccatcttcggcgtgatgctttacctgcgcctcagttgggtgtccggccaggccggcatctgtttgttcttcccccccccccttccgttgactatcccttctcttttcccccatttttgtgctcggttcgtgcattgttctcctcgccactttgatcaccataatcaccactttgtccacctcagcaatttgcactaatggcctcgtaaagggcggcggtgcttattttctggtcactttgtgttgctatgccaacaattttcagctgatggcacccttttcagatcagccgatcgttgggccctgaatttggtggttccattggcattattttttccattgccaatgccgtcggtgcggcgatgtatttggtcggtgaaatcatttatccaatttgtgaatcggcatctcatctttaggttggatttgcagagacggtccgcgacttgctgaaacaccacggaatttttctggcatggaattcaaattttgaaatatttttttttacaaattttagttggacggcgacataaacgacattcgcatcatcgcattggtcgcatgtgcagttcttgtcgtgattattttggtggggctaagctttgaaagcaaaatgcaggtgaacactctcaacgcggaagaggagggagaggggcataattggccattaattagcgttaattactgagtgcattaatgcgtttcgcttctcagatgtttatgatggttttgctgtgggtgtccgtttccgactatatgttcgtccgtttgtcctttagttaggcttaatttgcgcatttgtcctttttagcattggcacttttattccgccaaatgaagagcagcaaaagaaaggaatcaccggctttaaaagtgccttttttggctttattttgcaaagcagttttctgttgctttctcagtggaaacagtgaaagagaatttgatgccgcagtttcgcgacgattacagcttcttcaccgtttttgccgtttacttccccgccgccactggcattatggcgggtgccaacatcagcggggacctgcgcgaccccgaggtgaatggaggggcgtcggaccataacaaatttggcaatgccaatttggccatttgccattgtgccgcttccttcccctcagactgccatccccctgggcactttgatcgcaattgcgatcacttccgtcgtttatttactgctaatttggctgaccggtgccactgttgtgcgtgacgccgacggactgaccattcccacgcttttgctgaacgcgagcaaagaggtgcttgctagcctttagcccgctcattagtccaatttgcgtctaattaccgctgattttctgcggcatttgtgcccaattcccccctccgccccccaccggtgccatcgctttctttcccttcaggtgcttttggagcaaatctcctcccagtcggtccaactcgtctccctgtccaatgattctgtggccaacgaaactcagccgatggtccaccaaattgaaaccttgtcctcctccgccctttcctatgcgccgccccaatgcgcgtacaatcaaagctgtccctacggactgatcaactattttcaggtgcactctttggtctgatttttttctattttgtatttcttccttttatttcctcccctaaatccttcttttctcttattatttatccttttttatggctttaatcccgcttcatccctccctcccccatttccccccattttgcttctctattttccgcttattcatttgccgcttctttcctcagatcattgagcttggctccgcctggggtcctttggtcactgtcggagtcatcgcctccactctcagctcagctttggtttccatggtcggcgcacccaaaattttccaggtgttcgttcgttcttccgttcctctccaatttcaatattttgcttgaatttcccctaaggctgtgtgccgtgatcggcttttcccttacataaatcgctttggccgtggccacggcccaaacgaagagccccggcaggcgctttttctcgccgctgccatcgccgtggcagtcattctgatcggtaagcttttatatgctaattgatcatataaatgctttcttcttcttaagggaacctcaatatgatcgccccactgatctccaactttttcctttgctcttacgctctgatcaactacgcttgtttcgacaatagcttcgcgcactcgccaggtgttcgttcgtttcatcctttgtttctcttccctattatctctgtgccatactccgttcacattgtctctcttccatccctctttttctcttccctattgtctttgttccatctttttcaggcttccgtccctctttcaaattctacaataagtgggtgtccctcgccggttccctcatgtgtgtgttctgtatgttcatcatttcctggtggacggcacttctcaccttcttcttttttatcaccatttacgtgtacttggcccatcgaaagccaggtcgaagaagaagcatttgccaattgaccatcattttccgccctttaaagacgtcaattggggctcatcgatacaggcacacagctaccgtaacgcgctacagtacgtgagcaagttggagcggactgaggaacatgtgaagaactatcggccccaactgatggtgcgcaatgggggccaacttgatcaatgccaaaataaaaagggggatcaattaaaatactgagtaattaatgaggcctatgatattctcaattatctaaattccattaaagtgtgacgctttctttgctaattgcctgccaaattccctcaaggttctgaccggaaaccccgccgcccgtgccggcctcgttgactttgcctattccatcacaaagggcagctctcttctaatgtgtggatacgttattccctacaaagcgtgcaattcggtcaaatcgatggctaattaattaattggttcattaattagtgccattgtgtccattcaggtgtttacgatgatgcaaagcttcaaccagcagctgcgtgattggtttgttgttcgtcacatgaaggcatttgcagtcaccgtggccaaccccaaccttcgttccggcgttcagtcgttgctgcaggtaggcaaaatcaaataattaattaattactaaaataattaaaacttgaagattgccgggttgggcaaattacggccgaatatcattctgatgggctacaaatcgaattggacccaagcgaatgcgaacgtcgaaaaaggactggaggaaatcaacgattatttcggcctaattcagtcggtttcaaaagggacgattaaaacggacaaaaagcggacgaacgcccgtttcagagacgcgttcgacctgaacatgagcgtggcggtgttgcgtaactcggccaagggattggacatttcggaattaattcttgaaacgacggatgagctgaacgaacagcagcgagaaatgtacatgaacggcaggtaaaaacgggaaaatagaggaatttgaattggcattcgtttggcgaattgcaccggcagaagggacagttacccgacggagcagcacccgtcccatcagctgaacgtaaacgcagcagcacagc

SEQ ID NO: 9849 - DNA, 1668 bp, Heterodera glycines
ggaggggaacgggagagaaggggaggaggagaggcgatggggggagaagaaattggggaaatgaaagggcaaatgaatttcggtggggcaagtcgtagggcactgctaatttggtcacactcaaagtgccgatgtggagcatgtgcagctgcagcatcagttgctcccgcctttgcccctcccttccgacgcccttcgctttcaaacccgcgtcaaacacggcaccatcgacgtttggtggctgtacgatgacgggggactgactctgctgataccgtatctgctaacacagcaaaaatcctaccttgaggttatacatattcatcccccaagggtttcccgtccatctgatttatgcttttttccaaagaatgccaaattgcgcgtctttacgctcgctgggcagggcaaaaacctgcagcaggaacaccacggattggtcacaatgctgaagaagttcagaataacggcagatcaggtgatgaaaaagggaattgaagggaatcctttggactttcaggtcaatgtcattcccgactttaccagcaaacgcccggacccaaaaaggtgggccaatggacgaatgaatggcaaatgtttggtcaattcactatttgagtttggcaaagtttgaggcgcttatcaagccgtttatgagcccaagcagccgaacggaatcgaatgtgacggtccaattggagtcggacaatgaaaatgaagagacaaatgttggacaagccgagggattgattacggagactgagctgaatgcccagcaggcaatcaaccaatcattcgttagcatttcacaaatatgtcttaaatttctccaggcacgcacttggcgccatttgcgcatcgccgaattgttgcgtcgttatagctccgactccgaccttgtcgtcgtgtgagaattggccattggaattaattaattaattgattgatgctctctttgggtcattcatccgtttcccgacacttcagtactttgcctgtgccacgtcgcggactgataaatgcggcgctttacttggcgtggcttgaagcgatgagcgccgaattgccgcccacgctgatgctgcggggcaaccagcaatctgtgctcactttttattcataaaacggacaaaggcgaaggaatggatggaattgtgaagccattggattaaaagattgatgtaaaataaacacatcatactcaaattgtttttcaataataataatttcgaattttaacattgtttttttatttctcactttatacaattgtattttaattttaatttcacagttaaaataaaaacaaaaaattttctactaatttcaaaaaaattatgtaatttatctttaatgactctatgatctatgaaagaattgttgaattatttttgcattttcataaaattgcttaagatatctgaaaatggaccgtcccaaaacaaatttctaatttgtatatttggaaaagcatcaattcctttcctctttatacatatttatggtatgttcctatgtcattccttccaaatgaaacgagttttgcttcttcactcgtccttttgcatatcatttgtaatggtaatgaattgcttcttctttcttcttcttgtttgtttgtttcttatcgtctgttgtccctcttttactgatttttaacgccatttt

SEQ ID NO: 9850 - DNA, 1665 bp, Heterodera glycines
  unsure (1)..(1665): unsure at all n locations
gcgcgccaatgatgagcaggaaaccgaatcatcagacgttgatgaagacgaatatgtggtcgaaagcgatgacgacatcccggcggttgaggtgggaataaatttgaaagggagggagggggtcaaacaaaaattttgcaactatgaaaattatatatttaaaaataaaagttacctaaaaaatttttcagcccaaagagcgtgaagagcgatgggtggacccattaccagaaaagttgcaatttcagcagcaggtgaacaaaattgccgagctgaaatgcaaatactcgcgggccaatgccaaaggtgaaaagccatggatttaatttataaaatttacaaaaattatttttgaaaaattgttcagttttcactattttaaaaattgagaaaaacacttatttttaaaaagcgattgtttactgattttactaataatttaaatgccaaaaaaatttaaaaaaaaaattttagctaattttttttcaagtatttctttccaaaattattattttttcagtgcactggtacaaggaccgaaagaagctgttctcggacggtctcaagtacaaaattttgatcgacaaacagtccgtcacgctgatcatcaacaacccggacccggacgacagcggcaagtacacatgcgaagcgaacggagtgcccaccaattcatttgtcactgtggagggtatgttttggacggggcggacaaaacatggaaaattaattttgatttgcttcatgtgtttattattgtattattggcctataattttattaagctctcaagaaaaatttgaatttttaccacttataaacagattttcacgaaaaaaattactaaatttgcagttttttttttttgaaaatttgggtgcgagagatcttggagaggtttcgattcgtttttttttataatttttaattgattaaaaaagtagttaaacattttccacggacatttttggttttttatttaataataatttaattttaaaatttacttttttatcaaattaatactttcattttatttaaaatatatatttttttaattgtatataaaatttataaaaatgttttaattttttttaaataattatttcatattaaagaaaataaattattgctttttttcaaattagataattattatatttttcacataattttatatagaatatgttttattaaaagaatgcattttgtttcagactcaccagaccaacaaccattgtcctccaccgctcgtcgccgcgactcgcgcagaccaaaaagtgccagaaaggaagccactgcattgacccccttggacgccatgcagtggttggtttaacaaacaaaaaacgaaaaagaaagtttaattcattcattttattttttagttgcagcagccatttgacgccgccacgtcccaaaaacatggtgagcaaattcgggttttttaaaattatgtattgggaattttgagaaaataaattttttaatttttaacctgaacccaaaaccaatttttaaaagtgatgcaaaatttttgaatttttataaaatatttatacaaacttttttttttgttttttttctcataattcctcttctgnntggtctttgtcctgacaaaagcatccacaggcaaaaattttttctaatgatcattttttt

SEQ ID NO: 9851 - DNA, 3184 bp, Heterodera glycines
aaatttattgtaaattttcaaggtttgaattttttttcataattttccgggggtaacgatacttgaaatttgtccaaaacccactaaaaattggcatcactgaaggtggccggcgtcaaaccgcagcacacctacgagttccgcgtggctgcagtgaacgtggcgggccgaggcgagtggagcaagaactctgtgccaattgctgccacatggtccccctgtaagccgttgatcaccatgggaccgttggcatgcgacatgactgtgctggtgggtgaacaggccaagctgctggtgccctacgcagcgaaaccacgtccgaaattcgagtggagcaagaatggcgaagcgatggatccgcgtgacgacccacgcgttaaggaggaaaaaagcggtaagtgagcgcgcaatcctggcattaacagggtggaggcgcagagccatacaataaaaaaaagggagggggattaaccaaaatttttgctaaaatggtctggaaggagggggtcgacgggaggggggtcagcggccaattttgcgaaatggtccagccatgaatttgacgttctttcaaacagatttttttttgggtgcgctttttaaaaaaaaatattttttggggaggacggtggtgcggctaggcgccgccggaaaatttttgaaaattcagtgcaatttgttaacatattttcactaaaaactaccaaattgcgattctttagcaaggcgatggctttttttttgtgtttaaaaaacctttttttcgcggtacacttttttaaacaactttttttttgcaatttgttagaagattttgtctaaaaaatggccaaattttaaaattttggctaaatgatctttttaaatttttttaattaaattttattttttatcatattttttattttcacgtttttttctcccatttttagacattctcatccagctgtgctaccagaaatgcgaacaatcggacaccggcaactattccattcgcattgtgaacgacttcggctcggattcggtggacttgcgcctgaaagtggtcgatcgccctgcaccgcccgaggggtcattgaaggtgcaaaacattggtaatatttttgtaaacagaaaatgatatgagagtgacatatttgtaaaacaattaggagtggatttttttaagtttttttttagaaatcaatttttaacggagtattttcgtttttactgtattttatttttacaaaatatttttataaaaaattgatgaaaaattgttaaaagcatttttgtaaatattttatttatgaaataaattgtacaaaaattgatatttaaaataaaaattttaatttcctcgcttaaaacaggtattatgatgcatatttttgaatattttataaaaattttttaccaaatatatatttttttgttttttctcaagaatttcgcttctgctgatcatgttccagacaaagcatccacattcaaaaattttttttaaattgatcattttttctttgtaaaaattttggtttaaattgtccccttattcaaaacgaaaactttaaatatttaatgcataaaaaatcatgaacaggagcggaccgcgtccggtggcggaaggcgacgcgttggcagcaccgcggcggaccggtcggcaaaggcggcagcagcggcttgcgctgcgggcgaagaggcaacggacgaggaggaagtggccgacagtgaggaggagcagcagctgctcgacatgacgacggttgaggtgggaataattttgaggcgggagggggtggggccaaattttgcttcttgccactttttttctctgtgtttttttttttaaatttttttttggggatgggtggtgagatccaatggtgccaataggcagacgcgccgtggaaattttgctaaagtgaatgcaatttgctaattgattttatttaaaatttatttagtttttataattaaaatttttgtatttttttttatttaaaaaatttattaaataagatttaattaatcaactttaattgatttaatattaataaaacatgcataattatcattaattaacgaatttatgataacaaatattatgatttttatccgttttatttataaaatccaaagcttttttagactcaaattttttgtgtttaattttttattacaaaaaacccagaaattaaaatttctgctctttgttgaaataatgaattaatattttccaatttttaggtgcgctgtgcggacgaacggctgctggccaaggcgccattgaatgtgccagtgcggcccggcccgccgaagccactgtacaccaccgacaaatcaatcatgctccaatggacacgaccgttgcgggacagaggcacgccgatcactgactacgagctggagatacgcgagcgtggcaccaagctgtgggggaaggccaccaccaacgcggagctgtgggagaaagacgcatttggcaatgtaccggacacacgattcaaggtgggggaaaacatgagccgttcgtcccctccccctcgtttcatcccccccccccctcgccgtaaattttttttaaatttacaattagaaatttaaagaaaatcttagaaaaattttatgcgacttttcagcaattttttgcaaaactgaaaaaatcgttagtttttcaaaaaaaaatttttttttttttgatatttttttataaaaaaatttctaaaatttcttgtaaatttcaaggcttgaatttttttcaaaaacttttcgggggtaaacgatacttgaaatttgtctaaaaaagcactaaaaattggcatcactaaaggtgatcggcgtaaaacggcagcacatctacgagttccgcgtggccgcagtgaacgcggcgggccaaggcgagtggagcaagaactctgtgccaattgctgtcacaccatcctcctgtaagccgttgatcaccaagggactgtttgcatgcgacatgactgtgctggtgggtgaacaggccaagctgctggtgccctacgcagcgaaaccatggccgaaattcgtttggagcaaaaatggcgaagcgatggatgtgtgtgccgacccacgcgctgaggagaaaatcagcggtaagtgaatcctggcacttacaagggaacattccaaactgtcaccactcagatcgttttaaaaccgcttttatcttgta

SEQ ID NO: 9852 - DNA, 614 bp, Heterodera glycines
  unsure (1)..(614): unsure at all n locations
gggggggggggggtcagcgaccaattttgcgaaatggtccagccatgaatttgacgacctttcaaacagatttttttttgcggtgcactttttaaaaaaaaatattttggggggggggacggtggtgcggctaggcgccgccggaaaatttttgaaaactcaatgcaatttgatatttcactgccaaattgcgattctttaacaaggcgactgcacttttttttgtttttaaaaagcgtttttttttttttgcggcacacttttaaacaactttttttgctatttgttagaaaattttgtctaaaaaatggccaaattttaagatttgggctaaattctctttttattatttttttaaattctattttttttttatttttcattttcacattttttttctcccatttttagacactctcatccagctgtgctatccgaaatgcgaacaatcggacaccggcaactattccattcgcattgtgaatgaattcggctcggcttcggtggacttgcgcctgaaggtggtcgatagccctgcaccgcccgaggggacattgaaggtgcaaaacaaagagaatattttttgtaaacagaaaanntgatgagaggggcat

SEQ ID NO: 9853 - DNA, 2359 bp, Heterodera glycines
tttttatggatccaatttccattccttttttaatatcgcttcatacggctataaaaggaagaagaaatggctgattaaaataaggataaatcaataaaaaaattttattttaaagaaaagcattgatcattttttgttttcatttattttcctagtcgccttttcgaattagattttttaacacgtaattttttttcaaaaaacttaagaaactcaaaaatttaaccaaaaatgttttactgatgctttcgagactgtcgccaatttttttgagccttgaaccatcgttccttctttttcagccagccgataatgagttgttcaaaagtgtgctagggcaaatttgtacaaaaaattcaaaattttttgcttggttcattcattaatgatactgtcgaagtccacgaatattctttccattgaatgtgttaaaaaaatggtctttctgcttcatctcttcgtgccccccccccaatgcttttccctcccatcatgcacaaaaaacaaacaaacagagaagccttctctctcttttgtgcttcttgtgatgcgttgcttttgctttcccctccccccattaaaaccataaaattttaatccttaaaatgcgcttcacctctccccccccctcgtcctcccaaattttgtccgcttctgtcctgtccttgttgtccctcgtcccctcagctgctcccgcccctctctatccgcagatgaagcatgcttcatgcttcttcttcccgctgtctcccatgccccgcttttgcttttgccctctaccccaccacagagagctctcaaaaaaatgtttgtgcttttggtggcccaagcaccaaaaccaaaaattgattattagcccatcatttccaatgcgtcctccccaacctcccacacattatgtaccccattcctaccaccgccccctcccccgccccacgggagacgacctccgcttttcctatgctgccgcccgccgccaccgtcgttcaaataattcaatttggccaccaccatcagcgctgttcgtcctgcttctgccgtcgtcccttttcaacactttcggcagcgcctttcatgctgcacctccaaattttttttatttttgtctctgttctcgggacatatcagcggcatgtcaaaaaatcgaacgaaatgtcagaacgcgcgcgttattaatttttttaaactaattagaatctttcctacaatgcaattacttaatttaattttgagtaccaaatttttataaaatttaaaagtaaaaaggtagttctatcctttctccatttttgtctatttaaaaaaaaattcctcccttatttgcacttttctgcttacgaattagtggccatacggcgagtgccacttcggcatcatttcaaattctgtgtgaatttttaaacacaacaagtgtgccatccgcgcacaataccccccccccccatcctcttccaacaatgaatgtgtcgtcttcctccgtccgctgtctgttctgtcccattattcaatccttttcgccccacccccgggggatgccatgccgaatttatttatttgttattttttgtgccgccacccctttattgttcgccaccattcgtccgcgccttttagtcaaattatctttgccttctccgctcttttttctcattcgcccccctcccccaggggcttttaatggaccgccgccgcttttgaattggccgaatggtgggcggccacggcacgcaacggaatgccaaaaagcagtccattgtattttttttttgttgagccgtttccaatcattttttattgtacatgcaaacaaaaaatcattgattgcctttcaaaaattaaatgaagcgccaaaattactgaaatacaaacaaaatatgaacgaacatacctttgaattttattagctcattacttttccacaaaagcgcacatactttttccattttatctttccattttcaccaatttgctaattaatcattttcaaaggaattatctttaaaaattaataatttagcagaaatggaacgcagtgagctgtccagctattcaatggccagcagatcgaggacaccgaggagaaaggttggtttgattccttttatcgagataaataatacgaaaatttctatgatttaatttttttttaatattgaaacaaatttaaattcacaaatggtaatagcgattggcaggaattgggcatggaaaaccttaattactcatcaaattaactaattgcttcatttttcatttaattaatgtgacaaaaaatcggctcagttaaaaaccaaagaattttctgtgaatcaataattttggtgtcaaaagctatcaaaatgtatgcacaatcaaatta

SEQ ID NO: 9854 - DNA, 2064 bp, Heterodera glycines
gctcagttaataaccaaagaattttctgtgaatcaccccaacccggtgtcaaaagctatcaaaatgtatgcacaatcaaattagtttatgccacgcgccagtgcgtcaaacctttgccccatggcaatgggcaatttacctaattatgcaaaacattcccttggggtcggtttccgcccggggcatcgccttacaattagcagctaatttatcggttaaaattcggtctgtccctttctatgcataataagcctgcgaattttctcccatggattttgccctcattttgctgcttctgacgcgcttttctcttccattaagccctcccgccttccgagtgggtcttccaattaatgttcacaagccaaaacagtgtaaaataacatggaaatattccaagggcatgctaatgacatcctcgagagtggggcctcaccccatagatcctttctcgaatagaaaattttaattcattttccgttgggtgttggcactgatgaatccgacaaatttaagccattatgtcatccagattaattttaaaaaaattttctttagaagtaaattataaatttaaatgccagattcaacacttgaattatttttaaaattatttatgcacaaatactcaagtttctgcaaatatttcgagtgcgtttttaattttcacgaaaaccagtaatcccaacatttttgtttaatttatataaatatttattatattctttacctctgaatagtttcttgcaaattgaagcaattgaaaattaggcatatattctctgcaaatgaaatgtaaaacaaattgaaatttgctttaataaccaaaatttatattaatgaattaattttttaatgaattgaaaaaatttatttgctctcttgaaaggactaacagtattgttcctcattaaaaaaaatttgctttttttcgctgccatcatcgccatgcttaattttttaatttcatcaaaaatcatgcgaaacattggtagtagagcttcatcgaattcgtcataattattcacatctttgcgtgccatttgttccttataagtgtgctttttgcccatatctctctctgcacattggcattttgagacgggacgcattataatgttctctaacaaatagttcactaattgtcaatttaattgcacaattagagtcatttggaagctttaattctatgaaacttcattaattcattccgatgaatgagctacggcaaaagaaggatacttaaaacaacgtaaaaacaaattgtccgtttaacgctctcattggaatggtttaattaaatcgcacgcttattaaaagcttacgcggaattctcgaatgactggctttaaattatttaatcttcctacaaaaaaatatgtcccctgaggggatgtggctcgaactttccattccaatgccactctcatgtccagtgatctcgaagtccatgaaaatgtaggttcgggtttatcttttcatatatatatatatatatatatcttttcatatatatatatatatatatatatatatatatatatgattttataaaaattagagttgagtggctcgtttaggatacattttaaatcttaaaatttttcacaaaaaattataataaaatttaataaagctagtttggtcggcaatctttatgtagccgatttgactaggcacccatctatggtcggttccgggtattggattttcaaataatattccccgggttcgtgtccagaaaaaaacggttatcaggtcaagtgtccgagccgtgcaccaaccttaaattggtgatcattttaaatggtacacaattacatattttcttcaaattttatttaaaaaaaaaattttaattcctaatcttcatgaacaaaatgttggtgctaggtcgtttcttaaattccgccacattgggcgtttcttaaatccgccaaggggtaggaaaacaaaaaatgtaagacatataaattcataacttggcttaaattcaatcaaattaataattcttggtatcattcaatagctctagatgttctctaacggaatattaatttacaa

SEQ ID NO: 9855 - DNA, 5818 bp, Heterodera glycines
cgacaagtttcgagttcttgtccaagtctcaatcttgtggtgccaagtctcgagtctgagtcttgatagtttttgtcaaatcttggtacctatatgctagggttacacggacctgggtatttgggtaaaaatcgggtacgggtattacctggacccgaaaagcctggctcaggtccggatccaagtttttaaaccgggcacgggtcctggaaccggtattgaaaaagccggatatccgggtctggggacccggtcgggcacccgggctcgtctactgtaggtcccaaattcatagtctcgatacttggcaaatgcaaaattttatcgaacattgttggtggttggtcccatcacatttatgttcagtttgtggttcgtcgtggtggtggtggttccggtgccggtggttgtcgtcgtggcagttcgtcaaacagtgccaacgccgtggcggcagcggcggcggcacaacgccaacaacagcagcgccagtatgactatcgcttaaagcgcggctttctgctccgcaaaatcagcagtttctaccgctgcggtgaagcggaacggttaaaggcacggtgccgtaagcgaaaggtgtcgtctcattttggggacaattttaatggcacaaaaatctcgaatttgatgactatgttcgagagttagggggtttgatgtattataaaacacaggtttatatcaattccattagtccttgaatgccaaaagtatccttgaaaatcaatccctcccttataagccgtctttaggaattaatggttggaatttcctacttaaaaaattcacataatttattcggcatttgctcgtattttttaatgaccttaaatcctaagtccttggaaattcgttaatctgtacttgattttccatttaccaatccgatccatgataataaaaaatttacaatagaaatactgactattaattatccctggatgtccctttgttcataatttaacactattttttccatattttttgttgtgatggtctctctgtctctttgatggtttttgtttttccctaattttctaaaattggttgccctttaactacactcacttttttttggtaattaattagtctaattaacagtttaattgtgtaaatgtcattccaattattatccatttctctcttcttttttttacaggaacgtgaagatttggatgccactttgttcacgtttgaaaagttcttgcgcctctaccataaaatttgtccacgcacagaagtgcaggaactgttcgttcgactgtgagtttcttttgttggcacactcttttgtcggcatttttgaattttttcctgatccttaaaagcaaattaatgtgtctctggcacttggcaccagttaagcaaatcccaatatattgcttttttttttgcccagaaatcctcgtgaatcaaggacaaccaaacatatatgcaagaattaattttggcccaaagaaccatcaacaaatcaaggacaaaaactaattcctatatacaggaattaattttggcccagagaataccttgaaatcaagtgcaactagttctatatcccggaaattaattttagcctagagaattctcgaaaattaaggacagacagacatttcagatgcccaggaaccgattattaatttttcgggctaaaattttcaaggacaaaccgccacccttttttcaggtcgggtcaaaaggagtatctgacgcgcgagcggctgctccagtttctcaacgaggagcagcgcgacccgcggctgaacgaaatcctgttcccccactttgaccaggagcgggtgcagcagctgatcgccaagtacgagtcggacgagtcgtacattgcgcagggaaaaatgtccggggacggcttcctgcgctttctgttgtccgacgaaaatgccccggtgttcctgtcctggaacgagcggtaccaggacatggaccaaccattgtgccattacttcatcaacaggtggaggaggatggccatgaatattttatggctgctgggagtacgaattctggcatttttaggggggtttctgaaaattttttgcgccgcggaaattttaaggcatgagaatagcgcaatctccgattttgttggacatgtcagaattttggtttccgacttttttttatcatcggaattccggtttcgaattttttttaagcctcaaaattttgattctggtgaattacttacgatttctgaatttcttaaaattttgttcactgatattctccgaatggtgtgtgctcagaagtgcaccaattttaattgatttctaaaaattcgaaaaactcgaaagcataggcactttcccttttgataattagctttcttttttgccaaatagacaaagtctattaaaatttggtgcggtttgatcatttggaagagttaggggctcctaaattagcatttttgattttttaaatattatgttctaatccatatttttaatcggataagattgtcatgtcatgatgattaaatgatcttaattaaaatcacgctctttacagttcccacaacacatatttgacgggtcgtcagtacggtggcaaaagttccaccgaaatttatcgccaagttttgttgtccggctgtcgttgcatcgagttggactgttgggacggcaccggggagaacaaaggcgagccgatcatcacacatggtgagttaattgcttaacgaaatgaagagacactccaaatttccaaaaaaaaaatggctaattgattgccccgagtattcaatcgaagtaaaaattatcgttccgtttctagctgatcagttggaaccaacaaaagtgatctatggaatatccaactgatcagttaaagccaaaagacaatcaatccgatatccaactgatcagttaaaagtcaaaaacgattgatcggaagtcaaactgatcttgagaaattgaaagtggtcgatcgatcggatatccaactgaagttaaaacccaaaaacggtcgatcgcttacccaactgatcagttaaaagccaacaaatggttgatagagcaattggtcactaatcgggctttttccaatttccactccccccccccccccctcaattcccaattcaaaagccattacattggcataatgccaaaaattgataaatttgtttgtaataattccccgcttccttcagggaaggccatgtgcacagacgtatttttcaaggcaattttgctttcgatcaacaagctgcttgcttgatcaccgatcgcctcattaactaattaattacatttaggaagtgctctatcaaatcaaagagaccgcctttacgcgcaccgatttccccgtcattctgtccttcgaaaaccattgctccaaatccaatcagttgaagatggccaagtactgcttggagatctttggtgacatgctgctcagcaaaccgttggacgaatatccggtcggtcttgatccattttttttgcattttaatcgaataatgaccggatttccgaaatccgcactaattttatttaccgttaaatttcaataatttttgtgcttgtaaaataataaatatttcagttggagccgggcgtgccgttgccgtcgcccaaccgattgcggcggaagattctgatcaaaaacaagcggttaaagaaggaagaagagcggcgacaaatggaggcattaaggtggggcttaattaattaaattattgttaggcattaattaaattaattaattaggcgaatcaataaatttatcttttggattttcgggtgggaagataggcctaactaattataagcgaatctggcacacatttaataattggctgagtaacctagtgatcgcaaggcttaaaattataaaactgggtttttgatcaggaggatttggagttgtcattgactctttgtctttgctatgcaaaaatttccgggaccttgatcccggcttttttgaaaaggccgggattgggatcccgacaaatggggatttgaatcccggggtcggaaggatttaaatttcgacaaaatccttgctcccccatttgacttggatgtcacaatttgccacaaatcttgatcaaaattcaatgtttttttatttattttagccagggccgtctgcttgacgaggaagaagcgcaggaggagcaacaaccggtggcacagccggcggcgatgccatccaccgccgccgccacaacggcacaaccaccagcagcagcagtaggggacaacaacaatgctgttgttgtggaggaatgttgctgtaacggtggtgaaccaccacaacagcagcaacaagggacgacgacggcggtggcaccgcgtgagtttggcaccgtttcttttctcgggttgtgccattggcgcattgactgttcggatctcgagtaactaattgggtggactattagtgccacgctcgagactgaaaatccgagtctctagcttatcatctcataattacaaatttattattttcttctgatgctaattgtttatcaatcagtaatcctacttatctcattttattgtttaccaaatttttaatttcttatatttatcattatgccaaaaaatgccaatattgttttttaactatatttggcatttgtgtcctttacaaacaccaaattttggtggcattagcccgccatcaaattttggcataatgtgctgtgtcgggcaccataaaaacccatcttcgccatttttggcaccaataggcgcctctccgttcggcacgccgccggcaaacagcgccgaattggcacggtcttttgacttggccgaatgccgttgctcaccaccggtggcacccgggtcggccaccagcaaccgttgtagcaggcacacgttgtctaccgcctcttcgtcgtcgccgagcagacgcgccagcatggaaccgatgttgtcccatgttgtgtcgccccccatgatggtgttgggcatcgagtcgtcattttggtacatatgtacaataagtactaattaccttagcgcccgctagcgtaaacaaaattgatgccccgagacttggcacgaaaccgaaaatgttttcgaaaacgaaatcaaaaattttcaaaaaccgaaacgaaacgtaaaagaaacaattttttttaaattttggaaaccctaacaaaaacgaaatgaaaatttaaattttgaaaaccaaaaacgaaatttttaaggacgaaaacacgatcagaaaaaactcagaaagtgccaaaaaagtgggggacgaaagtttctacccctccggcgctttgtgtccgtgtttgatgccctcatcattcatttcaccccatattgggctcttgcgcagttcgtcccgcaactgttcccagcgtaactcgttcatcttctcgccgtccgccccaggcggttcggccaacgccgccgcctctgccgaaccgcgtctctcctttctcttttccgcttttcatcccgcggaattgcgccggtccgccaggcgtcgccgggagcagcagcaacaacaacaagcggcggcggcggcggctgaccgtatgccaacggtcgccactggcggtaaggaatcgttgcgtcgaaccgcgttgcactcgcacagcggtggcggcggcagtggcgacgcggaagcgactgctactgctgggtcgccgcgctcgcggccgccgtcgcaggttggcgacgcgggggcgacaacggcacgctcgccgtcaccggcgagcgccaagtgcccgtatcaccagcagcagcaacgacgggagtcaaagaaagccaggtagatttttttatgcatttaatggtggaaaatggtttactat

SEQ ID NO: 9856 - DNA, 1703 bp, Heterodera glycines
  unsure (1)..(1703): unsure at all n locations
ggattactgtgtgtacnttgtttgcacgtcattactgtacttttgtgataaattactgttgttgtgactattactgtaccttagttccgttttccatttccaactgtcactctctgtgctattcttttatacatcatttttttggaaataccagtagtctattactgtaggttttttaccaattatactgtattgtttcgcaaatttcatactttccatttctaacctaaactgtcactttaactcagtttcgtcctattgttgcagcaattttattcccagttactagactactgtaccttgtaacataccgtttccttttcctctttaactaagttttgcacattttttaattttctgcccaattttcctttccaagacttcgtttttttcaaaaattttcttttctatctaacctctctctttggcacaaatgtgcacaaataaggatagaaaaaaaatgtatgtatataaatttaaatgcatttttaaggaaattttttatttgaaaaatatctttttaaatccgcaaatccggcatatttaaatataaagccaatcgggatcgggattcgacatgaagtgtacatggtgccaaaatccagattcactgcataaaatctcggtttttctgcaaaatccctgctcatcccgataacatcatgggtatactatactgtacatcatccaacacagtattccccccatacggtattgtatacataaatatttaagtgatatatatattcatgcacatgtgtgcctacaacttttagtgctgtctgtcctctttctttccaaaactttcaaccgctacagtataatagcaccgtaattatgggcacggatattataccaatttcgatcgacaaacaacaactaatgacagatcagtttacagattccatcagttccgctgatcaacgcgcgcatccggaggctgaagaggacgcgcgaagcggtggcagcggcggcggtgacgcggcacaaccgcctgctggcatcaccagcgtttccgcgcttccgtcccatctttgttgtgctctgccggcaaagccccggctgtgccccaccgcttccagtgcctcgttcaatgccagtcagtgtccctgttttggcattttttatgcctaatgatgcctaaatgaccctatttttgatttattccgtcatttttgttgccgcctattttaagaattttcccaacatttcttaaaaaacatacctaagatcgacctaaaaatttttcaaaaaaattcatctaaaaattgtataataaacttcaataaaatttaaaattttactgaaatatattttgttgttttaattacccattttcattttttttaattttagacctaaaaaaggcttttttaataaaaaactgggtcccgaaattgcacaattcttttcctatttttgaatttgtcattttattttttttatttttgtagcaggggctttcctttcttttgacgttggaattccgcttttcgaaaaattttaggactcggtattccaattttcgaaaagttttagagcatcagaatgctttgatccattccatacaaataattgatcaacagcactgatcactttcagctgagtttatgcccgcttcactgtgctccgctgtccaccgtgcctcactgtcccacacgccgtcccggcaaaattccagcgtcacattggccggcactcgg

SEQ ID NO: 9857 - DNA, 1019 bp, Heterodera glycines
  unsure (1)..(1019): unsure at all n locations
ttagaaataagcatttttntgggattctgaacatgaaaaacgaagttgatttttttgcggcgcttttcccaaaaaacttttggggcgcaaggggggccggcggtgccgataggcgccgccgggaaaaattttgttattttcaatgcgatttgttaacagattttgtccgaagaatgaccaaattttgcgattttgagcaaatttttgcttgtaaattaaggatttttacggtccggcggtgccgataggcgccgccgttggaaaaattaagaattttgaccatattttttgcgtattttcattaaaaaaattctttaaattgccaaacattatgccaatttatcaaaatttaaaggattctgaggtttttccccaaaagcctcaaaaatcctcaaaatttctcaaaaaaccacaaaaagcctcaaagcctcattttgaaaatttagcctaattgacctatcaaaaaaccacaaaatgaggctaaagcctcagatctgggagcccggagtatgagtcactattttaaatttttcaattttcgtattgaaaattcatcaataattttaaagatatcttcataaaatcaaataaattcaaaaacaacaacttacgcgaaacaaaaaagtagtctttttattgcgtgcgtttcttctcgtggagctgatttcattctcaggctaaatttttttttaccaatgttaatttattgcaaattattttataaaaatattaatccaaaaatatttgacaaaacaaaagccgagtgagaattttgtgcattttttaaattattgccttctcgaaatcgaaaatttcccaaaatttgacatgttccaatttagacttttttgaaattttgtacgggccaataaactattttacaacaggcgccaaaatgtgattaattatttatgattattaattaattgttgacttgtattacctgttccacttgagctccaatgatgcccatgtagtcatctttgatgtcatcttcccagcccgaattggcttgcgct

SEQ ID NO: 9858 - DNA, 1885 bp, Heterodera glycines
  unsure (1)..(1885): unsure at all n locations
acattcgagaaaacatgagataaagcagttccacattttcacgatttgaaagaaactgtaaatcaattaaataatataataatggtgactcaaacaattgtataggtatttgtttggcattgaaaataaattatatttttaacttagaacaatttttgcttcatagaaacatataaatcagggtggttccaaactaccgattatggggtttttgtccgaaattctggagaatttttttgagtttccgggtttccgtattacaccacaccgctcctggtcgttattaattagaatttattttagtttttgttttaatgcactatatgttattattatttatatttgttttaaattacatgtttttattttaatttgttctttgtaattggaatttttatttatttttattaaaaattaaatatatatatatatatatatatatatatatatagttaattacctgatcaatgtctgtcatttgctgcgctccaactcgactaacactgcgcaaaattgttgaagttggtggtaaactttcgctttgactttggcaacgtgtaattttttttgtttttctaaagataaaacaaattgtttatttgaatttgatatttaagcaaaaaatattatttgatttatttttaattcaaattttaaaattatttccaactttgaaatttttgaaccgctctgcgcaagctgaagcgcttcttgtagcgtgattttgtgatatgcccgaacaattggtgacgcttcgtatgttttgcgctgctgttcaccagatcgcatcagaaatggggtcaacacggtgttgttgaaacgttcaaatctaaacgaatttttttttcaattataattgtggcgaactgactaatttttttaatttcgtttaatttgtctttttaaagttttaataaaattttctttgaaaattctttaacattgctgccaatatcaatttacaagaacgtccttgatttgtcttgatcaaaaacaaaaacaacttacgcatcgcgtaatgaatgagtccctttatgtccaatgattgcttccaacccgctcattgtgtgatcagtgtactaaaaatgaaaaagaaaattaaagaatatttaattttaataaaatggtatttcaattcattaaaaatttttaactgattcagttcattaaggattagcataaaatattggtacatgaattaatgagtttttatgagctgaaaatcagaaaaatgcccaagtttttaaaactttagtatttcttaaataaagaaagaaaacaaaaacattttttaacttattttaacaacaaaaatgagcttaaaaattataaaaaattaagttaagtaatttttttgcatgcgaaaatcattaaaccatttaaaaaatgaaaaatttctttatttgttttattaacctagtttttaaaaaaatttacaatattttagccacaatttaaaattttgtgcatcctaaaattttttaaaattttaatgatattaattaccctctcaaaaattttgttgctcatcattgtctcaaggccatcgaggcccgatttctccacttttaaccagaataataatggccgaatggaaatgccttgcacaaaaacggtgaagaaaatcacagccaatgttgttgagataaacattgaacgggccttaaaaattttacaaatttaatttttaatttaaatttaaaaaaattacagggaattgatcagctgaattatttgttgacatgacaagtccaaatgcaattgcaccacgaagtcctccataagaaagcacaaatttggtcggtgaatgaaaattttttgcgtcggaaaaggttcanaacagcgcattgaacaacacacccttttatgataatatatttcaaat

SEQ ID NO: 9859 - DNA, 4630 bp, Heterodera glycines
ccgtaaatccgctattttaaaaacaaatcatagttttatttgaaaaaaataaagaattttttctttgaataaattcaatggcattacttaaattaatccatttgcataattcaaaataattaaataaattttaatcctatttttttttaccgacagtccgatgtatcaaacagaatgcaattgtgctgcacacaaatgtccaatcccatgtgtactcccgtgacaccagggaaaagccaaggaacaagaaaatcaccgtctcactgcattgtgccaacattttggtaaaatatttgacggaactgtacgcatcatgactcaaattgcccttcacaaattgcttcatcgcaattgtgcacgcagtaattctaaagaaagaaaacaattgatatcgttttcatttttgcccaaaaaatgctgatgatactgtatgttctaatgcattactgtaaaaagtttcttacaattgtgcacgcactaatttttgagagaaaaaaacagtatttattcgtgcaaaaaattgctggtgatactgtattttcaagagaataaactgcaaaaaaaacattttttttttaatatcgaaatttaattattcaatgaaaaaataaacattacgccaagattgaggaaatgccaaacatttcagcagtcaaataggacatatatggtacaacaaacacaaatattggtgctatcagacgcacatgggtataccttaaaaataaattcacaattttagttgtgctttgccgaaaaatggtgtcaataagaaataataattcgttaatttattaaaaaattctataaaaaaaaaactttgtcgctatgcatgttagtgcagcaaaaaatagtccaagaatgcaaccaccaatggaaatgacaaaaaaggacaaaatgccttcaatgtaatccattgcatgtaaattgtaagggccaatattggtaaattcttggaacattttgtaaagtgtctgtaaacaaaaaaataataataataacaataaataattagctattatttattgttcttaattttttaagctatttcctcgttttttggggtcgccccataaaaattttaaaaaatcaacgaaaaaaatgtccgaccatgtcacgcatttccgagtcgtacccggacagcactatcgactaaaaccatgtcctgttttaacaggattatgaaaccaattagaaagacgaaaagtcatcaaatatttgaataaattaattagaacctaaatttcctgcgtcatatttgaaattttgttgtttcaagttccgatgttttatttcaagttattaaaaaatgattaaatatatttaatcatatattattttttgtcaattagctatttttaaatattcctaagcaattcatttgtttgctttttaaaaccaatttcaaagaaaaaaacatccaggccatgacaagcctgtatttttccaggacatggattttgtttagaaaatgcaggttcatgtgcaacatggaatgttggttcaggcccaggtcaacgacttttttttcaggaaataatttaaattaaaatggaattaaaaagcaaaaaaattagaccactgctgccccgtcattgaacaatgcctcgccaaaaacgttgatgaacagaaactcgttgacacgaatttcttcaaaaatgccaatgacagccaccgggtcaacagatgaaatcagtgaagcaaataacaaaatttgaaaggttgtgaaggggacagaaaaaaagccgacttggcccatccaattcaatgagtaacctttgaaaaactaatttaattaattatttaccaaattaataaaaatttattattttttttaccaattgcaattgtgttccaaattgtgccaacaaaagcaaacaacagaattgagtcaaaattttcaaacagttgtcgatttggcatgaaaaagcctaaagttcaatgttagaaatttgggacaattaattgttgaataaattaaattaaaggatttttggcactttatggagtcaaaaagtctgactaagaatcgaacaattttattacaaaactaaaagggggacccttttgattttcaaaatttttttatacaatccttgattttgcaacaaaaaattttaatttttcaacccttaccctgattttttttttgtcaaccactccttttaatattgcctgatttttaactaaatttaccagcatcaaaaatgattggagggagaaggtacagaaaaaatataggcgattggagcatataaattcggtgatcaatttggcacaagcgtaaaatgaagccgagaacaaagcccaacgcaatcagcagtgccgaatcaggcaatgcttcggcaattcgtttgtttacatgaaaaactaaaaaaaaaaattaaaaatataaattaaaaaaataaattatttttacataattttgacatgctggctaacagaagccaggcactaatggaataagctgtcgacacttcattccagtcaaaaatcaacaactgaaacgtgctttttatataaaaataaattaattcaattttattttaaaatttttttatttaaataaaaatgtaattaatatactttaatttgtttttacatgaaaatgccgttttgtttctgtaaatgattcgccaaaaagattcaatctgattgcactataattgctgatgttttccatgaattgagaagcattttttaatatgggatattgtgccgacaattttatgaataaaacaattacaagaaaaattgtaattaaatatttagaacaaaatgttgccatttctaaaaatttatttaaaatataattgttaaaataaacaatttatttgatctatcaaattattgaaacaaattaaatgcaatgaaaaataaatctcgtaaaatgtgtcaacagcgttaacttttcgtataaatgtcgcaattagcaatgaaatcaaatgaacaattcccaataaataaatttatgatttttgattagtacatacatggagctcttgaacattttgctttctaatgcaaataaaattttatggctttcttgtaataaaactaaagtattgaatttttttttaaatttttactataataaatttattggaaaattattatttttttaataattaagtatataagaataaatgatcatatcattataaaatatacaattatattaataattttaaataattttataatttagtttttatagaattatttgttaaaaagaatgcattcttctattatagataattaatttaatgaaagcattattgtctgttaaatggacaaattaatgaataaaaatagttttttttctcaattttagtgaatcatcacgagtttgttctattaatttcttatcattaacaaatttaaatctcatcagtttacctccgatttatagaaaaaaacagcgaattgataacgcataaatcgaagaatatttattatttaaaataaaaatttatttacaataagcaaatatatcccatacccatttatagatgagcaaatatatatcaaagcaaaatatacaaaatatagcccataaatatttgcatagagtggcacataaataactttaaattctttgatacaaatgccatcaaatttgcccatttgattattcaaaatttttaaattgtggaaatcaaatttttactaaaatccaatttggatttacaataaaatgaaagtttatattgagattaacaagaagtgtcattgtcatccattatcatgtttcatcatgttaacaatggtcggccctcttcactttccgttcgacttcgagttggcatgttatgcaaatgccgtgccaaacttaaacattcaattattaattacagcattttagttattaatttcttaataaagaatttctcaaaattaattaaaataattataattgggttatgtaactttgattcataaatcactaattattctttaaatcaattaatattataatagcctttgtcttctccattaaaataaaaaaaattacgcttttcgtaagaaatgtttgcccgctccgctcgtaattgtctccaggccagccattgcataatctgtgtactgaaaattaaattattttaaattatttatttatttttggcatactgactctgtccaatttttcgtctggattatcatcctttttttcttcagctgctggtcgtgccgtatcatcatcacgttcaacttttagccaaaacaatagaggccgaatggaaatgccttggacaaaaacggtgaagaaaatcacagccaatgttgtcgtgacaaacatttgtcgtgccaaaaatagaaatttttaaaaatttagcaatttttattttgttttttaactggcgggatttcaggatccgcagatcttgtcgttaataatgcccgggaaaaataatatttttaatttaaatattttttttattattttacctggaagtgttggagagaaatgacaagaccaaatgaaatggcacctcgtaagccgccataagtgagcacaaattggtcaacaaatgaaaatcttttgccgcggtatcggttcaaccacgcacattgggcgacaacaccaattgtatatttataatttattactttttttagcattttaaat

SEQ ID NO: 9860 - DNA, 4447 bp, Heterodera glycines
  unsure (1)..(4447): unsure at all n locations
ttaccatcgctggaaaactttaagcatcccttttaacaaatttattgatgaatgcatctgatacttggtcttttgacgaagttgaatccaattggtcattttatgaaaataaaacggaaacttaagtctacaagttgcgagaaagccagtgggaagtatataaaacaaagattttcaatatttatctaaaattttttaaatattcctcattgatgaaatgatcagcgacgaactgaacagtgacgaaacgatcaatgacgaaatgatcggccaccataacatacagtcaagtgcaaaagtattgcatcaaaaaaaattttttcgaaaaattcgattttctcaaaaattaatggtgggatatcaattagtgtacaataaatacccaaaaactgccccaattactttctatgctatcgagaaaatcggtcatgacctaaacaaaccccctttttggcggtgcaaaagtattgcatcaaaatgtttaatcaatgaaaaatcaattttatttagaaaaaaaattctgaaacaattcctgctaggctaacttttgacaaaaaagtcttttataccaacttgaccagatcactctttcatggtgatatccgaaaatggcttgaattcggaaatttttcggaaaaaattcctagggggttgggaaattttttctggaaaatttgagcaggcccattgggttttttgagttcctcgaactattttttaaaatttaaggaaattttttgaaattttgcagactgatagagaacacttagggctataaaatgatatcaagaattaaaaatttggttgctttggagcaaagttataaataatttttcgacaaaaattttcataatgatgttttttaaataacgccctttatgatgttttctaaataacggctccgccccattatgacgattaccgaaaatgagtccgaactcattacggtgtttgggcatttcgaattcgtaccttaagacaatttatttttataaatttaaatttgcccaattttctttggcaattgcatttccaagtggaatttgctgcctattgaatgggccgcttattctgatgtcgtgccaaactgttctttccatgcaaaggccaatgctttgaaagttccattaattttttttatatttaaatgtaatataagatatatttaaaaaaagatttaataataaaaagagacagtgaataattaaaagaaatgcatccattggtcaattatggtcgatgatcaaaaactccttttctttctgctgattgatcatttgttatctccgcaatttgtgctctgcgcaatgatttgccgtgttattgacatcgatcattcgcatctgccttttactgtgctgtgtttgtttgagctgcggcattctgttactgtaatgggttgtgaatggcgccatttcagtggcatttctcttccggacaaatggcaaaattttgccaatcattcgcacaaaaataacgcgcatttctttacaaagcatcagcaaaaacagcttaagaaatgtttatttaaaatattttattcaaattccattaaattttaattttgattgcctcgtccgctatcacataaatgcacacgaaaagttggatggggaaaaaagcaatttgtccgattggatgacagttgataaagtcggagtaccacttgtaattggccgctgaattggcccccacataagcccaagcttggatatgaatggcaaagcatgtcgcagtgattcgtccgctgtctttgtccgacgattgggcggacgccccttcggagttccaactgcgattatgcgctttaaaagtggataaattgggaatttcgaaaaattaattatttattttaccttttatccacgccaaacgaattgcaattgccacataaagtgaggaagaaacgatcagataaggccaagtgtaaagtgaaataactaaaagagaagagaagcggaattgatactgtagaaaatacagtaaccaatcattacagtaaaacattcacttaccagggtagaaatatgccaaaacagtgaagaggatggacaacaaatgaaagagcgcacattggaacagaacaacccttaatgaaccgtaaaaaaatcatcaaaatggggggcgaaggctattttattacgcaaaaagggtttaaactaattaattaattacctttttgtgactttttcgttgtaatgaaatggaaagaacagtgcgtgtgctctgtttacggccaatgccatgatatgcaaacgatagttaaccaatccgaaaatgatcagactttggcgcaccatttggccaatactgacgaaacgaacgaccgaatcaatgcccaaaaagaaggagcatatcatgatgaaggcaggaaaaagctaaatggggaaggaaatcacttaacttacaacaataattaactgtttaattagactgaattggctaattgattaattaagtgttcaatttttggttaatttccccatgttcgccttcgcactttgctgatcagaatgtacagagccaagcgttctcgagccaatttgatcaaagggtaaacacagaaggtgagaaacagaacgaagaccagataataagacatttgaaggcattggcgcactttgacatcaatcgaagaagcaatgccactgcgattcattggcaaaagaaaagcggaaaaacgaagaaaaaaagaattaaaaagtgtcgaaattagagggagaaatatctttttaaagaaagtgttggctaacagaagcctaaattaatgcccacccactcttctgtagctgtgattttcacttatttcgcttgacgccactgccaattaatgaaaaaaagttaaaaaatgcaaagtctcagacattccgcacaaattaatcaaaaagtcaacccatgtaattacgcaaatgcataataaattatgggccacctgttcttacttttttcttttgcctttcgttgtgccattttccaagaaaatattttgagcataaaaagtaatcattgcaaagcagcagcaaagaagcattcattcttgctagattttaaatttaaatatgcaattgggaggaaattgatcgtctaagtacaaaaatgggatttacataaataatattgaaataaaacaaaaaatatattcgaaaaaatcaatttaaattaacaaaaaatggactaatgagaaaatttgagaaaaaagattaatttatctatattttaaaaaattttaataagtctcgctgccagttctcaagtaggggaaattgaacaatcaatctcggtcttgttcccggaagcaattttctgtctcagaaaattgaaactctcggcagcctaattgtttcatctgtaaattaaaaaaatagaggtccaaaagcaactcagctggcaaatgaatagagctgggaatttaagtcataaacactttaaaatcttaatgacttgacttgatgttacatcaagtttcttaatttctttagctgcaatttttcccgctcaatagcaccacagaaagtttttatttattttacctattccaaaattgaagtaaaagtgcaaaaagagtaacacattgaaaagggacccatttttgaaaaaaaaagatttttaaatttgaatgatttgactcatccaaaaagtacaataaatcccttaataataataatggtacaagcgaacgtgttaaaacattttaaatcataaaaaactaataaacttatataattttatttatcagttagttgctaaccaaaaataacctcttgcttaatataaaagtgcaaaatatatttactttctttttcttaaattttgttttttttaattatgtgccaacgacgtaatgtttttatttttattttaaagaagtttaaaaataaaaagtattctaaaacaataaacaattttactagggctcgaaattatatggataaaaaacgtcaaatatggacatataaaaatgcccgaaatatggactaaaaagctcaaaaatgccaaatatggactaaaaactgccaaaatgtatgttttaaaccttcaaaaattccaaaaaaggtgtgtatattcaatatttgcttaaataaacttaaaaagtacaataaacaagaaaaaaaaatggatttaaaacttaaaatgcaaatttttattgtccaagtttgccaaaatttcgaaaaaaattctcatttaaaaaaaagaaaaccgcaaaaaatggaaaaaatatttattaaaaatgccaaaatgaccgacgaaaactcaaattttttgtattttttgngggtgtaattttttaaaatttccaaaaagtctattctttanggggtgtactttttcgcttttttgcatntttcttgtgaaaatttgccaaaaatggccgaaatatggactaaaaaaggcaaaatggcgaaatatggatttattcccgaaacccctaaatatgtatttatatgga

SEQ ID NO: 9861 - DNA, 1876 bp, Heterodera glycines
  unsure (1)..(1876): unsure at all n locations
aatgggattttgtcatagcatatgcgcagaaaaaacatgttaatccatataattcgagccctagtaattactaattagttgtgaacaaatatatntaattcataatntgaaaaattttattatttgactcaaaaatctgtagaaaagagacaggtaaaattgattacatcggcttaattgggcctttttttgattattaaattgatttttaaatagaagaattcaatatttaagatgaacatatttacattattcacgcaacattcggtagttttttatggttatttattatttttaaaatgcgttgcaaattggcacaaaaacatattccaaagcaaatatattaatttcgaaattgggtataattaacgtagaaaaaatggtggtctaaaataaagaatttttaaaaaagttatacaacaaaaacaaaagcaaacaaactccaataaaacagatgagattattgaccataattatgcttagtgaaaagattattttcttcatattttgtggcactaaattaaaaaataaattaataaattaaaaaaatttgttaataaattggcactttgttcttcccgacaccaaatgattgcccaaatggacaaatagcaaataaattcgcagacaaaaatgccaatcccaccaaaggaaaatgctgcattttcatgcattgaactcaattcaagcataccgcacattactgctaaaattaaagtttatattaataaattagaaggaattttattaattacttttcccattgtttggagcattcagaataaagaaaaagagaaaaaagtaatacgccaaacgatgacaagcaaagacctttattcgtttaataagaaaagtaaattttaatattgacacatagaagaatgggcttaaaaatcacagacagactcactaattaacattttaaaagaaattaagtctcttttcaagcaaattactgatctcatctatatccgaaattaaattcaattgaaacgatgctattgagaagtacaaaaagtgcaagtgatcaaagtaaaaggaaaataattattttaaaattaaaaacaaaaaattatttttaattaaattatagggtgaaaaaaatcattttttcctactatttagcaaggagaaccaggaaaaaatatgtatttacacgaaattggccgccctaatcatcggtatggacggaattgaaacaaatcgcacaagtttttttttattaaatgtcattcaaaaaattgttaaaatatgtttttttttgcttttgcttttgcctaatttttcagaaatatttttgcatttttcgttgttttttaatgaattttggcgatttatttatgctttttaagtctttttttggagatttttaatgactttaattccagccctaatcctcactgcagtgtcttaagcttttcctgagctttccttggtttgaaataggattatacgggccgggtatttaagcaaaaatttggtcctggtattacagggtccagaaaagccgggtttgggtctaagtttttaaaccgggtgcgggcgggccgggtttctggtctaaccaggccctgaaaaaacccaaaaaatatttttttttttttaaattaacttttttcattaaaataaaagcttacacttaagcgccgcattatttaaatactcgctatacactaaaaactttataaaaatcatcatataaaaatggacaatgagtagcagaataattttaatgggcgagaaaagagtaatcgaaaaataaaacgagaaaagtaaattaatatgataaaaactaataatcattccttaatataacgaattaattaaatattttatattgatttgcaaataaaatttttaataatcatgttaaaaa

SEQ ID NO: 9862 - DNA, 1515 bp, Heterodera glycines
tccagggaagttgacttccaattcgtcattcgttgaccacaattgtgcttcgtgattcgtcatttcagacttggcgaatgggcattctctgctcgggcttgatgattttttgcgaagagctcaattgccaggttgagccattgagcagtgagtgatggcgggggacggcaaaaaggtgaattttccgtgctcttgagtttccaaatcgtgcttacgcgatctggggcgtgtcgttggctttttcgtggtctgcgttctcgccctggtgacgtactggattcgtgtccttgctcttgttgcaagggttgttcgctgagtcgtcgtcgtggtccagtgagtgccattgcagaagacgcagtgtgaaggcggatccctcgaccctgcttgtactgtgccatcccggattggcatattttaggcgcttgagttggccttagtcccctctgttgtgacctccgcggttgcggtctgttgtggttcattcgctgctgaacctcctcaatcgttgaggacatgtgaatttgcttccggaaacgtgctgtcagctgcatgctcgagtgcttttgcttgaattggtgacgtagtttaacgtccttatggaccaattgtcgttgcttgtttgacgtcatttcggccctgaccgtcggatggattgctagtttagcgtcttttcggacaatggttgtttggtggccggtgctttgctagtttaacgtcattgcggacaattgatgctttgctagtttaacgtcattgcggactttgcgtggtttgtttctctagtttaacgtcattgcggacatttgatgctttgctagtttaacgtcattgcggactttgcgtggtttgtttctctagtttaacgtcattgcggacatgttttgtttgcttttctagtttatgtctttgcggacatttgttgtttggttggttctttagtttaatgttattgcggacgattgttgtgtgggttggccgatgctttgctagtttaacgtcattccggactcgtggcagccgggtgattagcgtttcggacagttgttgatggcttaggctagtttaacgtcattgcggacgattgttggtgattagcttagtttaacgtcttctcggacgagtgctgttggcatggtgtcttactgattgttgccgagctcatgtttgggcaattctgttgactgcccttatcaattactgttgttgagtccgagcttctggccaatgtagcgacgcaatgatggttggcgcctgatccacttgcggttggcgacaaggctttcatttttctgttgagttcatttgtttggcttgtttgtgcgggattcgctacttttccttttggttgtttgctggaagaaaatgctggtcgcttggcaactgatgaactcttccttgttggtgttagccgttgcactgccataggaattggtgccgttgaatgctcatttggtgatttggcttgtctatccctgactggattttgtatgatctcacatgcctggatgcgtcgct

SEQ ID NO: 9863 - DNA, 3444 bp, Heterodera glycines
tgaagacttctgatgtgttcctccggggctccgtaccctttatgtgacagctgaaggaccgtctcgtagtttgcgtcctctagccggaagcccgctatgagttctcgcgcttctccacccagcagattgcggagtaagttcagcttctgcgctttgctgattgattgactgccgattgccgatttgaaggattcgtagaattcgggccattttcgcttttggccgaaaaatttatccagttgaattggctggaattggtagagcggtgctgtgaatgttggcattgtcattggtgctgccattgctggtggcatgggcggttgttgctgcggattggccaattgatccgcctttgcttctctgtcggctctgcctctgtgcagtttggctgcggcactaagtgttgcttcgagatctcgcaaatcccgaagtttggttgttgctgcgtcgtatcggtcggcgattttttcatttttgtcgaatttgatgtattctttttcgccgttgtctttgtcgtctccggtcaggcgggcgagaagttcaatccaagcgttggatgagtctcgtagactgtccatctgcatttccattgtacggatttccttgacgacgcgatcaaattgagcctccaagttgacggcattttcccagtttgataggtccgggtcggggtgtagaatgagtgaggtggcgcttttggcgttgtccagagctttgagtgcattgatgatccctttttgtattggcccagacattgcgtgcagtttggttgtgcgtgtgtgtgtgttgtggtgcacttgttgttttgtgtctttttccgggatcagtctggccttggtcctggaccttttgtgactaaacacctgcctcggaggacaaggtgtttgccttttgccttatggctaaactaaagcctcggaggactgttagtttgccttttgccttatggctaaactaaagcctcggaggactgttagtttgccttttttccttatttgtcaatggccttgtgcgcgcttgaacacccttttgtacgaagtacttcctcggagggcaagtacttcgtccactacacaacaccttccaaccctctgttcggacgaagtgcttcctcagagggtaaacactaagtccgctacgtccctcgtgaagttatgcctcggaggacaataactacacgaaactatgaacactagacaagcctcagagggtcttgtctaggctctctaatttgcttttcccttcccctgtgtcaccgggattcgtcgagtcaatccgtggttcacagcaaatccacccaggagcgccaatttgtcccgacttgctctggggtcgggccaaatgaattccacggtgcgggggtcaggggcaggcagggacgaggaccggccaaatcaaatgccgagaattgattaagcaaaatttattccgggaaaaagcctcaaacttgggtaattaaaccaaaattttgaaatggtgaacgaattatcacaaattgattacagaaatgccatcaccggggaattatcacaaatggaattgggcaccgggatgggacaggaaatggagggcactggggccacagaacaaaaatcaataaccggggggttaaagaatgatcacaattggggggccatcacagttaaaggcaaatggaggggcggggagagaaacggcaaaaattgccaaatgaaatttggttgtgaaattgggggcatttttggccgcttaaataacaataaaattagataaaaagtggcaaatgtgagcagaacaaaatgggccgaaaatttgggcacaaaatgaaaaacgggggacaaaaatgaacgaatgaacaaaatgggcggaaaacgggaaatttgggaggttcatcgttctttggagtcgattcgccaaattggggacgggggcagaaaagttgcggtttgacaaattggtcattaatttgtgcgcagggcgggggaggaacacacaaaaacaattgacaatttgaaggaaaagggggacagagggatgaaacggcgaaaacatgttgcgcggcgggcgggggattggtgaagggcctcctccctcttaattccgccgatcattgatcggcgataggaataaaaattccgacatccgcgatagttttctgggctttttattgacaataataactccaaataaattgtaattatagcattttatgactctttgtatgtataatgagagtaggaacattttattggtatgccttttttaatatccaaaaaagataaattctgcttttctgttaaacataccactaaaaattttggatatgtgtccaaacaatttaataaaaattcactaaattccgcgatagttttctgggctttttattgacaataataactccaaataaattgtaattatagcattttatgactctttgtatgtataatgagagtatgaacattttattggtatgccttttttaatatccaaaaaattctgcttttctgtttaacataccactaaaaattttggatatgtgtccaaacaatttaataaaaattcactaaattacgcgatagttttctgggctttttattgacaataataactccaaataaattgtaattatagcattttatgactctttgtataatgtatccaaagagtcagaaaatgggcagattacaatttatttggagttattattgcctttaaaaacccgcagaaattattttggaattttctggaattttattaaactgttttgaaatatacccgaatttttgtggatgcgatgttaatgagaaaaagcaattttgcttttttaaatattaaaaaaggcataacaataaaattttcctattccaataatgtatccaaagagtcagaaaatgggcagattacaatttatttggagttattattgccatttaaaacacgcagaaattattttggaattttctggaattttattaaactgttttgaaatatacccgaatttttgtggatgcgatgttaatgagaaaaagcaattttgcttttttaaatattaaaaaaggcataacaataaaattttcctattccaataatatatccaaagagtcagaaaatgggcagattacaatttatttggagttattattgcctttaaaaacccgcagaaattattttggaattttctggaattttattaaactgttttgaaatatacccgaatttttgtggatgcgatgttaatgagaaaaagcaattttgcttttttaaatattaaaaaaggcataacaataaaattttcctattccaataatgtatccaaagagtcagaaaatgggcagattacaatttatttggagttattattgcctttaaaacccgcagaaattattttggaattttctggaattttattaaactgttttgaaatatacccgaattattgtggatgcgatgttaatgagaaaaagc

SEQ ID NO: 9864 - DNA, 2231 bp, Heterodera glycines
  unsure (1)..(2231): unsure at all n locations
agcgatttctcgacaaaacatggcataactttacttaaatgcaaccaaattttacattcttggtatcattcgatagccaagctttttctctactagcttgcaaaattttaaataaaattatcaaattcaacataagttatggcagaaataatacttattttcatacaacttttaaagttgaccaaatttttttaaaattttgcaggcttatagagaaaaagcttggctaccgaatgaaactaagcacgcaaaatttggttgcttgtaagcaaagttatgccatgctcatgcttaatgaacaaaattactggcaacggaaaacggtaattatttcgggacaaatgccaaatttgtcgtttgtaattgtatatttttggaagttcagcctgtagaaatcttccgctgagctctcattcaccatacactcaatgccactaaaaatgaaaaaaatattttaaaattggtaagaaattcatgaaaaatgtatgcctctcaaaatttttttccatcttttacgatttgtttatttatattaaataatgttaatttcatttaaaatcaatattgaataaatattattctacgcaaatattctttctctgaacatttaggtatatgatcattttcccaactttaaaaaaatcttcttttttttcattttcttactacaatgatttctaggccctagattttttggcacttaaaaacgccaaagtgcgagaggtttaagcacaaaaaaaaattgccaaacaaggtcgaggctcagatttttaggcacttggagaagtttaagcccaaaaaaattgccaaaaaggccttgccccaaaaccgaaaaataggcactaaaaaggttaagtatttaaggggtgtaaatcaggggtagtcgctgaattcgattattattttttctattttttttatacgtttttctttcgaagctatttagggaagtgtattatgcgaaaaatttttagttaattctccgaactgctttggaatggtggttttacgacgcatctgcgaagtcaagcgggagtgcattcctgaatattctttttccagccttagcggagaggaattttaataattagaattattaacttaattgcattatttggggtgttatatatacgtcattttgccaaattatatattttttttttcttaaaagtgattggaatgactggcgatttcctgatctgatttgatacaattattatttcaactcaaatcaaacgtatcatatttttattcgaatgatgattctataactaggaatcactattttggtgcttcgccactaaaaaaaaactatttcggaagttggccactaaaataattttttgccaatattttggcatttttggaaaacttcccaaaattgcaataaaaaagaaaaatacacccctaagaatcgacctaaaaattttcaaaaatacacccctaagaatcgacctaaaaattttcaaaaatacacccctaagaattggaaaaatttcacaaaaattcttcccccaaatttttttttcttgttcaatatttgctaagaaaatattttgtaactgcaatcagtgaataaaatctttttccttaattttaaattattttcaaattaaaaatagttatttacatccctaaatttggaactttttcgccactatttttgccaatattttggcattttttggtcactatttagttaattattttgggattttttatcactaaaaatcccatccctattgatcaacctgaaattgggaattttttttgacaaaactctatttaaaaaatgggattaaaattcgctgacttaatgcaaaaaaaaaacattgaaaagttcaaacaaaaataagaggactaaaaacattcgttcttaatatttttccaaaattcaagttatgggcatataattcaaattttaaatatgaattgaaaattgtgggcaattttgtccgttttttatggatgttcaaaatggattatattttatatagtaaagaatgcctaattaaaaaaggttctttcaaaaaaaaaactgtaaagaaaaaagagaaaaatcaaatggcgacaaaatttttttcaaaaaaaaaattaaatattttttagggttttccatgttttgctaaaatcagcatattaattaattattgcttaattaattagttaattgatttcatgacccgaatncagagcaattttanattcataaggatatcatatcctaaaaa

SEQ ID NO: 9865 - DNA, 2578 bp, Heterodera glycines
  unsure (1)..(2578): unsure at all n locations
taattctggctgtttgtgtgtgtgtgtgtgtgtgctgtgcggggcatactgtaatgataaatgattggtgaagaagagaataataagcaaggaatgaaaataatggatggaatttgctgcggtggtgtgtgaggggagagaaaacaaaaatgattgctgtagcaatttctggcatacggttggttatagtaggacaaacaattcggtcaatcaaatatctatgggcaaaaatcaatgggagggaatgagggtcatagtatagtagtagcattactgtaagcatgggaaactgtgccctaaggggaaaataaaacaaaacatcattcggctctaaaccattaactttgtgatcaatcaataaatcaataatcggtgatcgttgagtgagtctgatcagccgcccggcccgacaatgtcccgattgatcattccgcaattgacggtatttgcagtgtcagcggtgtcggaccgccgacgccactgctgccggacagaatgttggtggatattgtgccattattgccagcgccggtggcgcccttttttgtgtgggcgccggccaacattggcattggcgttgtggtcggtgcgcaagtgttccggcgcgtgtgccaacgcccggcgccagcgccgccgctgcgcggcgacaatgacggacttcggctgcaactggcgccggacagtgatgacagtgacttggttgtgacggcacatccctcacgggcactggcaaccctgcaaagagcaattataaataattaattaattaatatccattagctttgtcgctatggaaaatttgagacctcaaattttcaaattttagtatgaaacctcacaatatttggtttgattttttaattctcttaaatacaatatttaattaatctaattataagggaaggatttttatgcctttacagatttttttcgaatatattatcgcatgaaaagcccaaaaataaagcatttgttccgtgagttttgagcacataatatgttggaattttggctgatttttgagatttttgtcacatattttagcgatttttttaaattcgattttttacaaaaataattttttgatgctaaaattcttggaaaatgattttaaatgcttctttttttgtctgcttatatcagaacccggttgcgtgttaaaattcaaaaataaatgcgcataaatttgatttacaaaatttaaacgaatggcttttttaaattatatttatattatgaaaaaatgcactaaatcaaacaataattttaacattttccagaagaaagttaaaattccgattaaaaaaagtaattaaaaactagagaccggacaagagggtcggtcggtcggtttcggtataaaaaccgaaaaaaaccgaaaccgaaaaataccgaaaaaaaccgaccggtccgatctctattaaaaacatacacatacatattatttacattttcccgttttatttttataccgtaccactaattaataattaattatatttaccgtaccttaacagtcccttaggctgttgcatgtgctctcccccatcattctcattattgttattgccgttgttattgttgttgttgttcagcaattccaggtactgctccgacttcagaaaccgtgngtacgaatccttggccatcagttggcaatttttttgtgtgccaacatgaacatgtcggcacgcaacggcacaaccgacaatgccgcttgggtggaaaggcgtgtttggctgtccaaattcacctggaaaatttctaaaattagtttaaaattttttaaattggttctaaaaattatataaattcaattttttgtaaaaaaacgtaaataaagagaaatttaaaaaaataaaaattttaaaattttaaaattaaattcagcaaataatttcagaaataaaaatttaaaaaatcatttactgtggtgccgtttgaaaatgctaattgctaataaaagccaaaaatttttttgttaaaatttttgtttggaaggatgacacatgatccttgaaaaaaattcattcgctttttgtttgcataataaaaaaaacaaatttaaattttttttttagtaaaatttattaagatttctttaaaaattttacttgacatgaataaatagcaataaatttaaaaattcaaattgcattaaaattgaaacaatgatttataaatttaaaatatttaaattgattaaatattaaattaaaattaaatatcaaattaaatttcattcattttggcatttgattggcatgcctcttttggtgccaattcccggatgaatgtgtcataaatttggttggccttttgcccggtggactttttggccggcttcatccgcttgaactgttcacactccaaccaaaactccaaattctcctcactgaactcggactgcaaaaattcacggaacaacagacaaccgtctgaaaaatacaaaattttttcgtaaaatttcaaaaatttttccaaaatttttacatttatgggccaacaaagcgtcaaacgattcttgccaatgtcggcagtcttcgcgcgacgngcacagcacagaggcggacatgct

SEQ ID NO: 9866 - DNA, 1202 bp, Heterodera glycines
  unsure (1)..(1202): unsure at all n locations
ctattattttagaattgttgaaccgataaatctaagttcattgttaaaaatcttaaaatatagccgttggaattttgctccaaaaaattatattctctaaaataacaataaacggatttaaatttaataaaattaaataagacgaaaaaaataaatcaaaaactaagaattctcaaaaaattccggtaaaagaattgccattttaggatttgtgttgtagcttttggaaagagatgatcctgattttttttatatatatatacatcatcaaaaattggctttttcctagccaaatttgtaaattattttgaaaaaatgtcaattttttattaagtgccaaatatcgtattttctctaattatccccagtctccattaatcccgcccgtctccaattatccccccccccccttctgaggaggttgaaaaatatccccccgaggggataattagagaaaatacggtaatcattttaaggctctggtgaaaatttgaaaataatttttgactgatttgttagcgtttgttaggcctcccattttaagctaccctcccccccccaccctcaccacatgccaaaaaacactactcacagtgccatgcgtcgctgcagcttgtcagtgccgccgccgccggttgcaaccgagttgcgcttgtccaaccgcaacgcgcccgccgcactgttgctgctgcagtgcttgtccagtgctgacaaaaaattttgctgctgcagctggtgctgaagctggttgtgttgcagcgagccggcccgtagcggcggtgaaaaagtgaacgacgcaacacggcgcaccatcgtgttgtctgtggttgcggccagcgcgctgcgcaggcgaccgccgccgcctcgtcgctttgttgtcggcgactgttgttgttgttgctgcagggcgttggtgttgttgtacgggtcgaccagctcggcggacgacgcctgctgctgcttgagcggtgatgtgggcccaactttttggggcgacgaacggttgccaccgttggtgccgccgccgcctccgcgatgcacacgcatcggcgagtagtgatgctgcagtgaggcctggaattttttggaaatttggattcatttttcatagatttttgaaaaaaatttttaaagacgcctctggtgggataaaatcaccatttattcaaatttaaaattttttgccctnaaagtcacaaaaa

SEQ ID NO: 9867 - DNA, 1724 bp, Heterodera glycines
  unsure (1)..(1724): unsure at all n locations
cggggggcaaccccctcatcggagaaattttcataaaaacgcatgaaaaaaatttatagtaatttttctaagtgaaaaaaaccttagaagtcgatgcttaaccctaaatttgtcctttgttgaatgaaaaatcagaaaaaaatctcaaggccagcatagaaatgaaaaactaattaaaatcaattagcctaattgacaaagcaattaataattattattccattccaccacacttttcggaactgttgttgttgtccatctgctgatgctgctgggactgcttggccaacaatatttgtggacaattcgaccacaaccggtgaggacgacgcggatgaggaagaggatgatgactcatccgacgacgacgaaccgccgccagcgtccgcgccgccggcaccgacctcggcacaaccgctgctgaaactgttggccaatgacgacgatgtttcgatggggcccggtgccattgttggaagctgttggtggtgctggtgtccgatgagcatttgaacagtgccacaatttgttggggacgaggaggtaaagccgcttgatgtgaaatcggaggtggtcgagtcagctgaaaattgcagttgttgttatagttgaatacaatatacggtatatttatcatttatccgtggtataaataggcaattcagaaatgttgacattatacttaatacacaaaatgagcatggctagtgatgctcgagagtaaccggcattgttagaccttttccgggatttggccatttttcggggttatctccgacccaggtgcccaaaaacggacttcggcgccactcgagaaaaatgtctaatttatgagggtctcggtctctagtctttggcatacaaaaaaatataaaataaaattgggatagttgaaaatatatttcataataaaaaaataaaataattaaatatgtatttatatggtcttttttgtagcaatgctttgaataaaactatgtatattgttgtcagtatttcttggtgaaacttttccatgcttatatataaactaattgtatatcggagataatcaattaattaaaagggccggatgttaacacggaagtccggatgatagcaaatatgcggatgttatgcaataaaaaacaaacataaatgaatttattggtgtatttaaaattatagtatcttggcggcggatattttgttaaaatttttgttttcgatttatactttattatttattaaataattgcatatccggatataatatggaatatctcatacatataaaatgtgcgcgtaacgcgtacaaaaaataattagtaattaaatgtgccgccggtagcggaaaacaatgcgccaatttggtttttgaaaaaccccaaaaaaaaactgtaaaattcaaatcattgaaaaataattcttttttttttaaaatttttgtttacagctaattttttaaaaattgcttccaaattaaaataacatttcgaacctattgaatgacattttggtagtttttgatacaaaaaaatgacgcatttttcgccaaaaaacatacccaaaatggcactaatttgtttttttttcatagcaaatgccatccactaatacaattttgtgtagctttagagaaaaagaatgcctactataatacattatgtaaataaatacctccccccccctataaataaatttatttatgggacaattttttgcgggggatgggtggngggggg

SEQ ID NO: 9868 - DNA, 4832 bp, Heterodera glycines
ataggacggaaaagcaaaaagagccgcctttttgtagggctcaccgcgcgaaaaagcgcagaattgaaatgaaaaaagtgataatacaaaagaaggaacggaaaacaacagaagaagcggcaaggggtggtggaaacggacaacaaaaacaagaagaatgccaaagagtgaattaccaatgaaaaacaatgggggagggcacgggggaaggggaaaggggtgccaatctcagcgaaggaaaagcagtcctaaggctttgtaaaaatttaaaagtgtcccttttttgaatatcccagccgagtccaatgatcagcagagcgctttttttaatttatattaaaaataaatttgttatatttgaaagttaattttgatagattgaagaagcagcagaagcatacgaaagttgggcacaagcagtgccaaatccattaactgctgatgattccgaggcatcggtcagctccaattcactgggagaaaaacaaatggccgtcggcccagggccaaatcccatcaaagaattgacggacaaattccaccaaaaagcattttataacactgaaagaagcgatgccggcgcaagtagcagcagagcactgataacgaacacggtggtaattagtgtaattatataaatttaattaactaatcatattttaaatagaacagaatttggaagaagcgaaatcggaaaagccatcgccacgaaggattgcggaagcactcaggaaagcacaagtgccaacgcgactaatgccggaatggttgtcaagcggaaaccaaaaagcagcgaaaaaggcgcaagaagcaaatcggggtaaaagtggcacatgccaattggcccagattagcagctgacattcccaacttttataatcggttcaattcctttgacgaattgcattttaatttccccttttgtctccctcctcattttgcggcttttccctatgctcaattcattaagcaaattacccgctgattgggtcgcgttgggcttccacaaattcatttgaaacctttcaaataattccctccccgtcggtccaccgcggcacaaacgacaaaaagcagcagacaaacaaccaattggactcacaaactcttcagttcatcaagctgataaagacagtaagcatttgctaatggcaacagaaaatggccaatgaatgattttggcaaaattaaaattcggggataaatgggagatgagtaaaagaagcgatttcggaatggagacgtgcaattttgttgcaattatttaaaaaatctcatcattacagaaacaacggtctccgtcgtcgcagtcgccctcagagaattttgtcgttggcactttgcccatggacagggatttttcgccaatactaaacccaaccattgggcaaagctcgctaatgcggaggcgtcaacatccgggaagagaggagaagcagctaaatcaatcgggagaagcatcgacagaaaaaaccggcgaaacaactgacgaattggtggtccgtgcgattgccacaagcattcgcgcagtcggaaagcccacgcgccaattgcgcttcggctttgtcgcctccggcagcggaccctttccctacgcgttggatgccgacgtgaaaagcatagtcaaattgattagtgatcgcaaaatggagtcagcattgaaagcggaacatttaatgggccaaatgaaagagatggcaaatgaacggattgacaaaatattagtgcaaattggggacgaaagcagcgaattccacgcgaaaattaggaggaaaagccaaaaacagagggaattgagcgttctgttcttttttgttagactttggcgcaaattgggcacacttttggtattggaaaatttggacattaattcgacagaatttcacgagcaaattttgggctgtctaaacgcactaagagcagagatttggaaggaattcgcttcttcatgtgaagcagcaaaaaatggaaaggttatgaaaaatagagttttctaacatataagtttcattaatttttgtttttttaatcgtaaaatacatttttatatttttatattttttaattttttgtttattgtaaaataaaaataatataagtttaggccgaaaaaattatttaattatttttttatgcattggtttttattagctttttaaataggcttttttaaatgcatttttctttagttcatttattattgataaaaagtattaaccaaaaaaagaaaacatggtcactttcgataaatgaaaaatattgtttaagtaattttgttttcatttcttttttaggcatttcaatgggttgaatcattaaatcgctttgacgatgcaattgaactgactaattttggtattttgttgctttttacaccgccaattgtccaagcggctgaaatggtaaatcggccaaccacacaaaacgaattcttcaacacacatagtccccaatttattgttcaagaaggaaccgatgacaattattcgacggaattggcagatcaaatgacatggaaacaattaagtaattagccaattgattaattaatcatgcaattatatcaattaattagctaattggttaattaatcaagtatttttttcaacatttgtatatattaaaattgcatagcataaagaattaaaaattggtttatttaaataaaattgtgttcaaaaaacagagagaatgggcggccaaggaaatgccattgaaaaattgaaagaaatttttgaccgattcgctgacaaagttaaacaatgcaaagcgtccatggctcatgtcaaaaaagtgccaaccaaagcaatgataatgcttggcgtaatgcgacgaatccgtgacgaattgaaccgtgccgaatttgaggcaattacggcacgacatttggccacggaaaggacaaatggactggccattttggacaaaagtttgacaattttgaacgccaaaattggagcattcaacaagcaactgaggaacgatttgggggaagtggacaaaatgtgcagaaaattaatgggcggcgacggaagcggccaaaagagtgaatgagcggaaaatggcaaagaaatgatggcaaagcaattaaagggtcattaatttgccaatttgacaattaggagtgatcaattattgatttgattgtgcttttactaatgtaaatgacattttgtgagttgccgtattatttgttttgctttgcccttttccatgtccatctttttcgcattttcttccatcgattcgccgtccaaggccatttgacactgtccgtctccacctctgctaaattattgcatttttcagcccgaatttgagggctacccaaagaaatattatttaaatcttcggtttttcggcatttttttgccaaatgcgtctccgtttgaatgcaatcgtttcgctgcgtctcatcaatacctttttgtttgtttggctgatgctcagaatgccgactttttatgagaaaattaaacaatggacggaatattttttgccaaaagaacggtttctatattttttaatccatttttaatttttttttttaaatttttttttagtcacaattttggcacttcgtctttttctttctctgctgtttccaattttcttttctttccgttgggctccgttcgtttggaggcaattcgaatgaatgaaatgttggcaaagcgttcggcgttcgcatgccaaaaaaagcgcaaaaaggcggtgatgaatgccgaaaaaggcgacgacgatggcactttcttcttttgcgcagaatccttcccggaaaagggagaaaataaaaagtgaaatgaaagtgccaaaaatccaattaaattttgatgtaataaatatattattattttaaattaaatgattatttttaggtttcaatataaaaatgaatcagaaaagattttattaattaattggcccaaaaagggcgatcatcagcagaacaatacaacgaaaaagcgggaaaatctggataaaattggaggttatattaaattattaatcctttcttataaaatgaaattaattttacccataaaattaaaaataattaaaagggaagagtttacttaaatttattttaattatacgatttgtttaaaattattaaaatatattccagaggaattggtttttgtggagtttcctgaaagtgataatattaatagcgctgcttggagacgattagaggcaaaaaagtggcaaattgaattaataaaattggaattaaatgcaacaaacaaagaaagtgagcacaaaattgcccaatttttagaacacattgaatggcaaattgaggtaaaaaacattatttttataatttaataattattttttgcccgaattcggagttttatgttgttttatttttgaatagcgactcaaatttcgtcatttgttcttaatgctaaggccaacggattacacagactcagagagtgaaaatgaacagaacagtgccaccattctgttcttttggtaccgctttatccacaaattgttcttcaaatggcattttgcaatcgttggtaaattttttaaatttcataaatcattttaatttgctttttcaattgaatttaaggcctccgcaccatcggaaagtgtggccaaatgctgcagaaatttgacatgaaacactgcgaatggagaataaattttgccaaatttgaacattttggccaagtggaggacattccctcttttggttcaggtgattaaattcagaaaaataaacaaagaaatcgaccaaaattcaatttatttcatttttaaggttcaccaaaggaggaaaagttgcgcttttttcatttgttgttgggcaa

SEQ ID NO: 9869 - DNA, 1184 bp, Heterodera glycines
  unsure (1)..(1184): unsure at all n locations
tccgaggaaaagttgcgcttttttcatttgtgttggggcaacagcaacaaaatttgtcgttttccatcaaattgggacaaattntcatcagaaaattggccttgtgcccccttcaacggagccaaatntaataaaattgtttttattcgctacagaaattttcgcttaaaaattgacgaaaggaataatgccttggcaacgttaggcaaatatgccgaaaaggtcgaaactgtcattttacatccaccgggaaattccaacgccgccgaaatgaagttggcattttttaagttccattagagcctttatggcatttgtattaatccttattttatatgttcaaaatgtcttagtgtatttaagctcatatttgcgtttttttccacaaaagttgattttattgaataattcttatttttttagtttgtgtgtcaccacgtcgcattgttttagacattgcaccggtaaatttcaaaaaacatttgccaccttcagccattttaatgatttttttagagtttagagaaacaaattacaatttaacattgtcttccaagaattttggcaccgttttggacgaatttgttcaaaatttgtctgaacggagcattggacttttgttggatttggatggatttgaatgggaaatgctcgagaggatcgacggaattcaaaaacattgtgtcaattggatgaaaaaggtggaacaactttcgctacggatacggtaatatgtgaaagggtactgtaacttaagggacggggccggcggatcaataaattttgcaattgaaacaaattagggcagcagagggggagggtcgtcctcccctcgatgtatttttggccatttttgtgcaaatccccgacaaattcgacaaactccgacagtttccctctccgacgtcattgggccctacccaaatttaaattttaaaatttataaataataaaataatcatttgaaggctatgggaaatagaggagagtgaaaattggcgacgcttttaccttcgcttattacagctcgaagaatgcggcggatttgaaagaattttcagcaaaaaaattggcaattggaacattcaaataatttatcgaaagaaagcgatgaaacgccaaccaaagtgatttggtcaataacaaaaaattaattatgtgccgacaaaatgccgattaactaa

SEQ ID NO: 9870 - DNA, 952 bp, Heterodera glycines
ctagtcgatcgcacatgatcgcatgcagacggatgaaccttctccacgggttggtaccgtagaacatcacataggcgagtctatgtgcgtcggtactcagtcggaccacacactgggaggagaacggagcagcggcagaaccgtcgcggattactctctcgccactctctttctaatgacggggacaaaatgttcagttttcactttaagaaagtaaatttgatgcttttcttggcccaccctttgagaggtgccacagctgtccactgattgacgtcgttgtcgccctcggcgttgtcgtgcgcttaaaattggttgcctttccccttcctccgctccttcgtcagtgccactcggcttttcgtcccctctgctggtcgtctcgctttcatccccacttttttctgcatttcgaaatgggataacacttatccttccgtgacccttcctcaccgctggtctcctccacctcctcgttgtctgaaaaggccatttcgatgtgcagcatgaacagtttggggatgatcgactgcagcacttcctttatcttcgccttctccctcttcgggatgttgggctgccgtttgatgtaatgcaaaagcaattcgttcgtctcgtgaaaaacttgcggatcgggtggatactcaatggcaacttgtggcccaaagtccgcctcactctcgcccgacgcgatggccttttgcaagttctgaaagagaagccaatgcgtcggcgtgaacatcgtttgctcatccatccactttcccctcgactccctccattcgttgcccacctctgtgtaaatggtctccaattgctgaatgaatcctttgctgcgtatgtccttcaggtcgttcgctttgaaggtcagcgcctgatggtcaaactcttcaggtagtctttctcactttggtccgcaaaatttcgtgtactccttgcgcacccgcgacac

SEQ ID NO: 9871 - DNA, 3249 bp, Heterodera glycines
caggtagttcttctccacttgggtcccgccaaatttcgttgtactccttgcgcaacccgcgacactccacgtccttctcccggagacgcctcagcaccatcggcacggccaccagcggattctccttcagggcgaacaaaattttgcctccgtgttcactgaaaagcatggccgacgacgaatttgaggctggaaatggccgaacccgtagagtttcttcaccgccctcgtcaaaaaggtgggggaacagcccaagtcctcctcgctcatgaacttcttcgcgtcttcgtgtcccatcgactcgattttgcgacgcgcgcattccaacgctgtgatggcggccgaattgacttcgatgaaaatgtcaacctggagaattttgaatttcagaaggttaattgtcagaacacctcaaagcgttcgtcctccgtccgatacattaaatcctcatagggagacctgaacaaaatgtgggaaatggtaaagggatttcatttgataggccagccatgcaaatcatttgtaatggatttgactcttgaaaagtgtgaaataaagggaacagcagatgattccatatctcacagcaattactttttcgaagagatcggagcagaatcttccgaggaccttaacaaatgatcgcatttaaacgcaaatatgaaggttgccaatcctacgagaatttttaatgtcataaataacatttttgttttgttttttccattagtgattttggtcatttttggacaaaatccgtcgctaaaatttctgtcgacccactcttttcatgtatgaaacttgagccaaaataacatgatcatttccgtaaaatgatagggcttaccatttgggaaatgagacgtacgaatcgttgagcacttggttgcagagagcactgcgtcccgaacaaacagaacgaatgccgtcctcgggtaggcaacggtagctgacgccgtgctgtttgcaagtgttgtagtctgaaacaaagacacttatttattaggattttgccacaatttatggcaataatagggatgaaaatggtaattgttagaccaatgtgttcggcaaggtcctgtgggagacgttcctccaatggtcgctgcttccgcgaatgcgccccaatcgccgtttgtcctcccaaaatgtctttgaactgcttgagcagttctggatgttctcttgaatggcatttttaggctaattgaatataaacaattggtattacgccaaaaaaggtgtgatcaaatcgacgagttccgaacgcgaaaccaaacttttgttgtacatcaccaaagtacgcatgaaattctcaaaaatcgtttcgctttgcaatgcccgatggatctaaaggcagtgccatgatgcaaaaagcaaaagcccaataaaataccttctcgaaaatcacaaagtctctcagcggaatttcctccaaaatttccgcaactcccacatcgtaagtgatcttgttaacagaagccttagccttctgtaaaaaataattatccgattgaaataatgtgtccctgtttctctccataatgttttttaccaacttttgcattcaaattcgcctgctcctttccgaattgccttttatgaacaatgtccgcactcttcgccgccgttggctttgcgttttgtgccgtttgcattggttgttgttgttctttctgctgcttctgtttctgctccatcacttccctttttccctcttcttccaactttggcttttgctgctcactttggtgctcaataaagtccaatttggcgtcaggcaaaaacgatttgaagtcgcgcatcaaatccaattcgttgtgaaagagccgagaaacgcgttggtaaacctccgcctcactccatttctgaacaaagtggcaattcgaaagaaaattcaccaaaaaaccacctgatcgccctcacactgttgatagtttcccaaaatgttaaggaattcacgataaacatccggtctgtccgcaaatctcccctaaaagcgaaatttccatcgaacgatcagccaaagcccccatttctcacctttattcggtttaggtagcccaatgcctcgctgaaatggatgagttgtcctgttttggtagtttgttgttgcgattgctgattttgaatattatgctccgattcgcaagataaaaccttttgctgggtttgagtgccctcttgacttatcctttgagaacctccatcaattgaagggcgaaccatttcattttcaacttccattggaattgtcgtaagaggctatattaaaaaaacaatgaatcgaaaaagtaaaaattaaatacattttctatttggtgatggacgtgtacatatcggacagattggccaattcctgtgggggactcgctgatggccgtattcggtttcgagactgaatgactttgaattgtaggaacagatgacgaggaaggcaaaggaatttgtggagaagcagcagcaacagcaagttccatcccatcttcgatcagatcgccaccgattgcaaaagctaaaaaaacaaataaaaaaatgaaagaacataacatagtcctaatttccaaacattaaatcaatttccttacaaattagtgtcggtgaataacgaaagataacggtgtgcaccccaaatttcgccgcagaaatttaaaagtttcaaaattagaaattttttcaaacaaatttttaaaattagacactttttataagaaaatttcaaaaaaaaacagtaatttatcataaaaattcaaaaaatcattgaaactaaaaaaaaaaattctcaaaaaatttgttggaaaaatttttaaaaatttctgaggctagattttgcctcggcaagatattgtccaatccccaagataatgctttctgtccgtttttctgaattggtcattctcccgatttgttaggtccgtctcccacaataactaacaattattgatcatactgctgcttccgttcggttcgaaaatgaatatgtggctgccatgaactcgcacttcgtagccatgagggagaaaagtgttgaagccgtcaatcaattcggggtatgcttgaaacagttgactgactcgtcgaattacgccattagtgtcaattctttgaaacaaaacaatcacaaaaaaaaaaaaaattaaaattaaattacgtatgcgatttaaactccttcataacttcgaggaaatcgttgtaaacttgcgggtcatttgaaaattgctgtcgcactttttctgcataattatatat

SEQ ID NO: 9872 - DNA, 1288 bp, Heterodera glycines
aggggtcgtggatggtcgaactactgccgggggagcggggggaggagagacagacaccccagtgcgggggcaccaaactcattaatttgaatttgtgttgtttgattttccttggctttatccccgcctcccatgccccataagaaatggtccgctcaatctgtgccgatgttgttttgattaaaatccgaaacgaaacatgacaaattttgaatttttgaaacccaatccggaggcaatgaacaaatttaatgtgtgccaaaagcaatgtttatcgaccgatcaacaaattgtatataagcattagcataaattcattttgtattgggcaaggattactcaaattatttaaaaatctctctcccagattaaaaatcccgttctccgaaaaaagcgggagtcgagagcgggactcccgtaaaatcccgcgggagtcccgatccggccggactctaataaaaatatatcaaaaatctgtaaaaaaaaaaaaaacaaaaaatgaaaacacaccgctaaacattaacattcttgccatttcttatagcattttcaaaatttcctttctttattttgtgtgatttcgaacccctaactcgaaatcgaacaaaagctcgaaaaattaatttttagaattttcaatttttgtttcgaattccgtttaggaacaatggaattgataaatatagaggtcagattcgtgatcagcgagcgacctacaaaacccccaggagcagacaacatcttacaaaaaacaaaaagggtctcctttaaaatatgtcacttttaacatagcgccaaatttttttagtttttgtaaggaaataaagaatcttaagggctattgaattggtacctaaaatatttaatctgattaattgacagttttttttttgaaaaacagtacgattcggggcactttagagagatcgggcgatagttttttcgctaccgaaaagaaaccaggcggtaattagatttttcacgggtttgtggattttagattatgatgtttaagccatttggtattgagtttcttggacatttggtggtcaggtcgtggatgtgcggtgggaactaatcattttgtgtgatagcgtttttcgtttagatagggaggtggtcgctgcagaacgcagaatattaacaagaagtcttaaggaaaacatttatttcaaatctttagtttttctgtttcgatacttacggattaacacatcataatttgaatcaaaaaagtcattaaaaagaaaaaatgtctcagacacgttgcgcagttgaggaatcagaa

SEQ ID NO: 9873 - DNA, 1950 bp, Heterodera glycines
ggtacaacagtgattagaagaggtacaacagcgattcattagtgattagaagaggttcaacagcgattagaagaggtactaccactgtcgaaaaggtacaataattgttggagaggtacaaaaattgttggaatggtacaataatggttaaaaagggtacaatcatgattttaaaattaaataattaaggaaatcgtttattaaaaagtaagattaaaaattgaatgtaattaataaatttttaaaaataaaataaatttccttttattaattaaaaagagagtttgaaatgtacagggattgaatatttatttaaattgaaattaagaaattaatattacaaattctaatttaaaaaatacaggagttctttaataaaagtaaataaattattattttaatttaaaacatttttcacagaaaaataatttaatttaaattaaaaatttttattttttatggattaaacaaaactatttaaagtgattagaagaggtacaactgtgattagaagtggtacaacattgttaggagaggtacaatattgtttaaaattaaataaataaggaaacgtttttattaaaggttaaaaatcgagtgcattttaatttaaaaattttttaataataaaatactcttttattaattaaaaacaaccttggaaattattaattgaatatttatttaatttgaaattaaatgaattttttttacaaattcaaaaataaataatgaaattctttaatttaaaaaaaataaatttaaataatttaaaagaaatcttcaaattaattaaaaacattgtaaaataagccaaaaatacaaagaaaaataatgttacaccgtccggattcgaacctgctgccccccccctcagaacatgtcccagaatccccaatcacacagggattctgaggtcttgacgatgtcaaaagtaaaatctgatcacgtattcgtgatcagcggcccaaataacgcctaaagacatgtttttggaagatttttggtgaaaattttttttcacttaaaaaccatgtgcacccccctttggtcccgaagcccaaaatcacttttatttttgtatctttttttaaaaaaatgataaaaagatgaaataaaatttatataatagagcaaaaaattgcagatttttgtagtattttactcttctctaatgacttttcagaaccgaattatgaatttttttctgaaaaatcgaaaatttccagaaattctggaataactttttttcttttgaacattataaaaccaaataaatctcataaaattctcccgattttttgctatttttaaagctttaattcacttaaattgaccagtcctccattgagttatgaattttcaaattttaacccaaatttccaaggaccaaaaaaattaaaaatattttcgaatttttaaaaaattctaaaaaatctgaaacttaaaataaacatcatatttgtgctcaggaccctaatttaccccagaaaaatttttttcaccctctttttcaacccaaaaaaaatttttgaaaatttctagggggcctagctcgaaaatttttgaaaattttcgaaaatgaagtacaccgttcgatagagcttaaaaagctctacaattttgctctaaggccatttttggctaaaaccaacccctgacgagttatgggcccgggactcaaatgtcccgctcaggccaaaaattttttctatttctggaaaaaaatcgaaaattttccaaaaaaattaccaatcgatagagctcgaaaaactatgttttggaagtggtcttcgtttttctgggaaaattcgttaaaaaatcataaaattaaaaaacccgaaaaccgttttttaggcctaactcgaaaaattttgaaaattttcgaattttttaaatttggaaaaatcgggctttcaaaactctacaataagtctgctggtaactccc

SEQ ID NO: 9874 - DNA, 3552 bp, Heterodera glycines
tcagtccgtggttctcagcaaaccacccaggagcccccaatttgtcccgacttggtctggggttgggccaaatgaattccacggtcgggaggtcaggggcaggcaggcaacgaggaccggccaaatcaaatgccgaggatgattaagcaaaaatttattccggggaaaagcctcaaactttgggtaattaaacaaaaaatttgaaatggtgaacaaattatcacaaattgatcacaaaaatgccatcaccggggaattatcacaaatggaattgggcaccgggatgggacaggaaatggagggcaccggggccacagaacaaaaatcaataaccgggggtcaaagaatgatcacaattggggcaaatcacagcgaaatgggacagaagtgaagagtcaatcactgatcattgaatgagggggaccgggtgaatgacagaaatggaacggacaattgggccgggggaaaaggacaatgaaatgagggggactgagagagggacggaagaggcattgcttgcctttgctggtgcttctgattgtgggaattggtggggatttgtcgcattaaatacgagcaaaattgaacaaaaaatggtgaaattgagcagaacggggacgggccaaaaattggggaaatgataaaaaacggggccacaaaatgagcgaggggacaaaattgacggaaaacaggaatttgggggttcatcgttctttggagtcgattcgccaagttggggacggcggcagaaaagttgcggttttgacaaattggtcattaattgtgcgcggggcatggaaggaacgcagaaaaacaataacaatttggagggaaatgggggcagaggagtggaacggggtgcgcggggcatgtgaaagggagggggaagggtcgccacttcctttcttcaattctgctgatcaattgatcggcagtcggaatcccagagttccgacattccggcgtgaaaaagatgggcccgtcagaattcttttcgtctgggcctcccaaagggcgagtcttctgtgaggtcgagatggctctgtgttcgtggttgttggtaccgagccgttctggcgatcatgtccaatttgattggtgacatggatcggtgctctgccctgcgcgctggtggtttgggggttcgtggcatttcacgcagcggcattccctcttcgataccgagtggtttggaaacggtgggtcggaatgtcggatgcgggcgtactccaacgaggctgagaagagtcactcggatgggattgagcaaatacggcagagtgcatgggagagcaatgtcgcgcagcatgaggaaggttgaataagttcagtaatcttgtgagcaccataggccggtttgcgccatcaggccgggcgcttcgcgcccgttttttattttttcgtgggaaatcggccgcatcgcggcctcaggacgggcgcttcgcgcccattttttaattgtgttgaggacattcggccgcttcgcggcctcaggtgcgggcgcttcgcgcccgtttttaattttgttgagaacattcggccgcttcgcggcctcaggacgggcgcttcgcgcccatcttttaattttgttgaggacatttggccgcttcgcggcctcaggacgggcgcttcgcgtcctttttttaattgtgtgggaaacattcggccgcttcgcggcctcaggacgggcgcttcgcgcccgtttttaattttgttgagaacattcggccgcttcgcggcctcaggacgggcgcttcgcgcccgttttttaattttgtggggaacattcggacgcttcgctgcctcaggacgggcgcttcgcgcccgttttttaattttgtggggaacattcggccgccgctcccacccctcagaatccccaataacacggggattctgaggtcttaaccatgtctaaagtaaaatctgattacatattcgtgatcagcggcccaaataacccctaaagacatgtttttggaggatttttggagaaaaaatttttccactcaaaaatcatggtcacacccctttggtcccgaatgcaaaaatcacttttatttctataacttttttcaaaaaagtgataaaaagctaaattaaaatttataaaatagagcaaaaaattgcggatttttgtattattttacttttccaatacaacttttcataaccgagttcagaatttttttctgaaaaatcgaatttttccagaaattttggaataacttttttattttggaagatagaaattccaaacaaatctcataaaattctcctatttttttgctatttttcaaaccgtattacactaaatttgatcaaaaacgaagagagttatgaattttcgaaatttcactggatttcccggggcccaaatagtgacgatttttcaaaaatttgtaaccaccttccaaaaagtctgaaacccaaaataatgtatatattcgagttcagcaccttaaattaggccataagaatgcattttggctaatttatgagcaaaaaaatttttcatgaaatgcaaaaccatggggtcccccctttggttttgcattttaaaatttatttttgttttataactttttttaaattcataataaaaacatgagataaagcacattagattgggcttaaaattctctacaaaaaagctcttagacgattttttgatagattcaactcctgacgagttattgcgccagaactgaaattgaggcctagcaaccaaaaattttctatttccaaaaaattttcgaaaattttttctgaaaatcacaccaatcgatagagcatgaaaaacggttgcttgaaagtggtctccgttttccccggaaaaatctgcaaaaaatactaaaattcaaaaacctcaaaagtgacgagggggcctagctcgaaaatttctgaaaatttcataaatacaaaaacatggttggatagagctcgtcgagctgtacaaaaaagccgcttacaccgacctcctccctcaaaaccccgacgagttattccgccggcgctgaaatggccaaaaaagtaagcaatttttccacgactgtacacggaatacagtaggccgtagagaaaaatgattggaagcgaagttgtagggcacacttcaacttaaaatcctcccagcaagcattttttgatcaaagcaaaagaaaaaaatttcgtaacagtgagactgaaacgaaaagccgtttcagcgccgccggcgctcagttggccaccggaccggaatgcccatagttttcctggatgcgcctcaaaaagttgcttaagcaatgtcaacatttcaggtccccccgattagccgttcccgagatttttgttttagcaatgagttgcactgttgttctaaggtatataaactagcgtgtcgcgcagtaattgctcggtgtagacagtatgctttgcacagtgattgcacggtgtagacagtatgctttgcacagtaattgctcggtgtagacagtatacttgtgagagatgaaaagaatatgcattacatgagcgcttcgcgcaaaggacttcgttgctagtgcatgcgcg

SEQ ID NO: 9875 - DNA, 7045 bp, Heterodera glycines
ttatctctcccttattttctgctttcttttctggctccttttcttcttttccctcttttttcacttcttttccttcctctctcttttcttctgctggcttttgttcctcttttctctcctcatttttactcttttcttcttctttctcctctgctttttcttttacctcttttttcacttcctttttgccatcgtttttcgttttttctgtaaatattatttttttttttgtataatttctcaatacttttttattacctgttaagcggttttcattaaactgtgttcgaaatgctctaaatttgttggttccattttgaccgtccaaatctgaaattaatttttttaaataaatgtttaacacccactaattttctaaatgtatttaaaaaaattttcactttacaaaatactatttttaacaattatcacaaataattttggacaaatatttttaatcaaaaattttattttatttttaaataattacaaaatgtccaaacttaaaatttttcgctgatttccaatttttaaacgttttaataactaatttaataaatgaaagataattaagaaaattaaaattaaattattaaaaattttaccgtccattctttgaacgccttccactgatgtgccaacagtgtctgttgaagcagcaatcagtgaatttggtgtattatctagcattaagcttttagcatggtccaccgggtgctaaaaaaataaataaaaatttctgtaaatattcaaaaatttttgaccgaccttttctcgaacaggctcaataacccgtgactcaatagagcttggcacaacaaaatttgtttccatggcatttttctcatttgtatcagagccattcatagactgtttgttaatgctggtatcacttttggcatttggcgcatcttttgaagttatgttctccattttggcattttgttgtgcattggcattttgttgctggattgcaggctctgatgctttggcattttgttgaacaggctctgaagctttggcattttgttctgcagcttcggatgctttggcattttgttgctggattgcaggctctgatgctttggcattttgttctgcagcttcggatgctttggcattttgttgtacatcttctgatgctttggcattttgttgctggattgcaggctctgatgctttggcattttgttctgcagcttcggatgctttggcattttgttgtacatcttctgatgctttggcattttgttgttggattgcaggctctgatgctttggcattttgttgtacatcttctgatgctttggcattttgttgcgcattggccttttgttgctggattgcagcttctgatgctttggcattttgttgaacaggctctgaagccttggcactttgttgagcaagctctgaagctttggcactttgttgttcaggctcagatgatttggcactttgttgcgcattggcattttgttgttgattttcaggctctgatgctttggcatttatctgcttctcagacctctcctgcagttcagcactatttcgcttcttgaaagcatcgcttttgcccaacactctgtcccaatagccttcctcctcaagtccgcttgtacgatttgtgtcgtcctgttgtgctccacgaatgccgaaaaagttgagaatgtcttccaactttttccataatgggttgttcagggattcatgctgagttaaaaattttaaaaatttgaattaaaatatttattttaaacaataaaaaagccgagattttaaagaaaattgttttttctaaaaataaaaatatttttcatgaattttatatatttttgacagaaattctgaatcatttctactaattttctgaattaaaaacattaaaatttgatttgaaactataatatataaattaacataaaagcatagaagaaagcgctttaattatttaaattataattattttcattaataaaaatttaaacatgattttatgcataaattgtgatcatttcaatctttccaaatttttttgttcttaccattgacaaatcaaaaatttcatctatataaaataagaattaattaccaaaaaaaaaatggttgttttttttgacaaaattttgtttttttaattatagaatttagctcccaagcttattccaaactaattttcggacatttcttccaactttgaacaaattagacaattaattaattaaaaataattatttataaaagtctaaaattttttagaactaattacctcaatatgcttttcatgagttcgttcgcacacgaatcggtaactgagttcggggccggcactcatgtcacagtcaatatcatcaatgttggcatccaatttgatgttcaacattgcgcaacgttctcgcccatttgcttcgtcgtacggttcaccaaaggcccaattccttgagcaaatattcattttaaatttatttctctaattactttaatttgtttggcattggcgcaattaacccaatgactatttttcctaaatttattaagcctaatttttgaaaaatgatatttaatttttcatttaattaaaaaattaacttggaaattaatttgaattcgcttaattttacagattgttagaacgcattaaatcccatagaattgcatatttattattattttattttttcaagaatttccttatataaattttattttgatcaaattttgtcggggaatttcttccccgacttttctctcccgaggattaggagggcttaaccctagtttaaattagagaccggacaagagggtcggtcgaacggtttcggttaaaaaccgaaaaaaaccgaaaactcataaatttctcggtcggtttttttcggtcaaaaaccgaaaccaaaaaataccgaaaaaaaccgaaaaaaaaaccgaccggtccgatctctagtttttatgtgcatatttcgcaatttttggtgcatattttatgcgcatattttgcgattttatgtgcatataattcccagccctagtcatcattgttgaaaccagcagcatttcgatcaattccgaaccccggacctgaattctgttcagattctaacataaagtgaatttaggtgaaaaatgaattttcgacttttgtttgaattcaggtccgggattcgaaatcggtcgaaatcgatgtcagattcgtgatcagtgatcccgagaaccacctagaaatgttttatatgtatgattgataaaaactatttttttatggtctgtaaacgggataagtaccggtgagcttactaatttggatgcctaaccgtcgaattatttaaaaaggtgcgcatgaagatgaagttgttagaaatattgtttatataattaatgggcttttactccacatacaatacatacaaataatataggaatcacaacaaagaatggctcacggctttgatggtgccatcgggggttcatgtgaaagaactccaccgattcctgattgtgaagcatcagctgcaacaaattgaagcatgttgatgattttgtcaaatgctttttgacaagccgatgtgcaatcccaaattttgtccttcttgagcagatcatccaagggttggcgaatgaaacggaaatttttgacaaattcctggtaataatttaccatcccaaggtatgaacgcagtttatttaaatttgaaggagccggcatttcagcaattgcagcgattttgttgtaatcgggatttctgccattttggttgatcgtgactcccaaatatttgatttccttttggaaaaatgagcatttttctatgtgaactttcaaaccccattcttgaagacgggcgaataatttgtcgagatgttcgcagtgttcttccatggatttgctgactgtgatgatatcatccaaatatgcgattgcaaatggataatcagaaagcatattatccattattgattgttgaaaagaattttccgccatttaaagttggaaaaatgtcggacggaagtggcaatggatgcttgttcagctggagacagtcgtttagaccatttgaaaaatcggcacacaacctcgttgatccattggcctttttcaccaccaaaattggggcggcccactcggtgtgttccactggtctgatgacattgattttctccaatcggtccaattcgttgtttacgattggaagagatgagtatggcactggacgggctcgtcggaacacaggtttagtgtccgacttaagcatcagagaggctttcattttggtgcaaagaccaaggccttctaagaagacttgctcaaattttgattgcaattctttgattgcttaccgaatttttgtctcattatttttggaagtgatctgattgatggaattgggatttacgcggattgcatttttgattccttcaaggaacccaaacttatccattgttgctgcgccatgcaaattaagtgctcccgctttggcaacataaaatggttgtttgactttgatcctttgaatttgaaggtagcacatcctttgccgatgaattggcagcggcgtccatcgaaaagaatgccctcttcgtcgctttcttccagcggcggggatccgatgcatttgtatgcgatttcatcaataatattgatgtctgacccactgtcggcaatgaatttgatcgttttgccgttcatgattatggaaatccgaattatttttgaagtaccatttttgttgatgcgagcgacagaaattactatcgtgttcaacttcggattcttggcctttcggttttattgtaggcctggattcggtcgcattacttctcgatgtgtctcttttggttgcactttttgcaaacataatttaatttaggacagttttgtgcccaattcatttcaccacaccgaaagcaattattaggaggggttttgcctttgtttccgatattttggcttggcttacccgaattttcctttttgcgaatcggtttattttggctgaaagcatttattttgggctttgcctgttcgagaattttgacttctgcctccgttttcagcattgtcatgatttcctctgaaatgttttgaaaaatttcggcgttggagttgcctttgtttcttcggtagtgagtcggctgaggatgtgctgtcgtagctttgcttcactcgatgacttcaatgaagtcaaaagcactaagcacttgaattggtcctcgtttagttccgagtaccgaaattttcggaaaagcgatttgagtcggttgacaaaaacgctgaattcctcgccttccttacgtgttgcctttaggcactcataccgatcgatagccaatgacggcggacgagcaaacaatttcataagacgggttttcgtctcattgaaattgaatgccgtaattccatccggcaagcatgagcgcttgtattcgccgcatttaagaatggcagaatgtccggcagtgtgatgttgctctgcactggttggtttgccgtgttttgttgctgcttgacgatgtttgtcaattgagtcaaaatgctttccaaatttttgttgtccattttgtcttgaattgtccacagaaatgataattgcccgacttgttactgacaaagtcgtctgtagcacctgctatcagttgggcttaaatcgatgagccaaacttgttgctgacaagttaatctgtagcacttggctaacagtgttggcttttgttgacacttaaccttcaatttatttcgacacaattggtgtacgaaataatggcggcgatgaagaatgatttcgacacaattttttttgttcgacatttcgcccgaatttatttcaccgctgactttgttcgaatttgcacaaatttgttgaatttgttcgaactaggacgggcgtcgccactgttgtgccgttgaacaatttattgtcagtggaaattggtgaaacaaattaaagaaacagcaaagggtcaaatcaatatttggggaacaacaacattttaagaggaggacaaaaagcggaggagaagatgagtgcaaaagacagaaagaatttactgggtcaatggggataaacaattgtgtgagggactgaagtggatataaataaaatgccaaaagaataacatttaaaatgtcgtcccaacaatttttaaggatttatccgagaaaattattttcagaaaaaattggtaaataattaaaacaacgaaatgatttcaaaataaatttatcgataggtaaaaagcgaaggaaaaaaagctaatctacggaaagaaaaagataaaatttatccacccaaagaaaatccgaaagttctgccgttctcccattttctgcattggttttcactctcctcgtcattccgcccaaatcgatcaacaacaagctcctcccttaaaaatgatcaccatcaattgttaattaacacttattctacttctccattgtcctgctggtcaacatgaacgcgtccattgttacggatcttcttgcttttgtccttgtcttttgacttatgatcaattgtgtttattgaagctgtcattcttcgcattttcattttcccagcagcaggagacaactgaaatttcaaagaattttttttcaaattgcaccacttataattcggaagactaaaatattttatacttcgattaatgagcaaatgattgaaaaattgaaatgagggtagagcccagagttttcaagcaatcatttcaagttccactaatatatttgtgccttctattcctcccctgggcatacgtaccattttgtcaaatttttgagctgctggtagttgcggtacccatgaatgaccagcaactgtcgctacatgaacttgttcaatcaggcgagcacaattggcccctggtaaacacgaggacaacgccagaccagtagtaagtttttaaggattttccgaaaaaatcgataaaataaatttatcgtttgcttctcattatcaaataattaaataattttgaaaaatttatcgataggaaaaagcgaaggattaagctaatctacggaaagaaacagataaaatttatccaccca

SEQ ID NO: 9876 - DNA, 2085 bp, Heterodera glycines
aatgcgctgatcatcatcaaaattctgaccgatcacatcaaaacatttcggcccgcctttctgcccgagctgatgaatccgttctttgcccagtcgaagagtgtgttcaacggaatgttcgcgcacagtgccaacgaagcgatgtttctgaagaggccgttcctcaccgccggcaaaaccattgaggagagtgttgccgaggttcaatttttattccaaaatttttccccaaattttattttattttttaaggctttgaagacatgttatgcctccgcaacgctcagttactcgcaaaaccaacaggcattctttacaatttgttttttgtatttattttattatggcacccccatatctccccctgaaaattttcctaaaaaattattagaaaaaattttcagaaaaaaatattagaaactttttataagaaatttcttgaaaattttttcgaataattcattctttttttaattttgaaaaacttaaaaaggcacacgctgtttggaagtgaaattcgccatttccccccgtttcagtacactttggtgccccgtgccagccaaagtgtcaaagtactggccgaaatgtccgtctttctgttcgtcctcatccaagcgcatcggcagcagctgatccgcgaagtgttggagctgatccccatctttgtgcgctttgtgaacatcgccgtgccgcggcacatccgcgggcacaagctgtacaacaaagagttggtggaggagttccactgggcacaagtgcgagcgctttccttcattgcctacatttcacgacaagctcaagtccattttttatttcatcatttttgtggtctttctatattttttcaattaaaaggtttttgttataatatgcaaattgttatttttatgggcctttttaaaaaggcatctaatttaaaaaatggctccaaatcttggtcattttttggacaaaattgttaaatttttcccgctgacacctatcggcaccccccccccccccctccggttccccaaagtttttttttggaaaaatcgcgctgcaaaactaacgataaacatcccccttttttaaatgtatgaaagttattttaatacaattatcacatacgcagtgatcagactaaaactctcccccccctgtagatggccccggtgatcagtgagaatgacaaggtgttgtcggatgtcattgtcagccttttcgacagtttccatgacgaagtgatcacccaacgccgtgaccttttggtggccatcaaatactttttttaatgcgaagcacgcgctctgttcattggcatcattcccaaaatgtgcgacgattgttcactgctgggccgctcgttcacttcacaggaccatctgaggtgggcaaaaatgtgccgaaataaatagccccgttaaaaacatacaattttccaggaaccaggcctattcatttttggccgacattttacaccatgttcggatgagcttggactacaaacttctcaagcagtatttgctttatcttcagttcttaaattttatttttccgggaatttaactaacgctttttgatttactatgtaattcaatttcttaccatttttaaaaaaattcagcatttttttcattgcgtcccgcaatttgcacgacgcccaactgctgccttatgtgcaaacgatgtacggcaaactgatgatgaacttgatcgaagccgttttggtgcagcccaaagagcacagcaaaatggttggtttttatagggaattgaaaaaattggatttttaaaaaactgattatttgttttggaatacccttcaaaatttacacttttttactgaaaatctgtttgcccaaagtaccaggaagtgctttgcgcatcggtcgattcgctggtgcgaaaggccaaatttgttgccgagtaccatttgccattgattgtggagaagcagcgcgcccaacaaacagaagccaaacaaccacagcaagtgccatcatcatcatcatcgacggcagcagcaacggctgaggaaaacaaaagcacgggacgaagtgatgaggcttcaaagtgagtaatatttaatatttgcatttg

SEQ ID NO: 9877 - DNA, 3400 bp, Heterodera glycines
  unsure (1)..(3400): unsure at all n locations
gtacgcgttgcgcaagacatagtacagtgccgggttgatgtagtccgtgagacgtttgatgctcgcgtgcatgtccactccacgctctttattgtggaaaaaggcgacgaagcgttgctgaaatgatgctttgaattggaggaaccaaaaaaaatttagaaatttagactaaaaattagggctgtgttttattcaccctccacggccattgcccccattttttttttaatttttggaattttttagttatttcatatcgagaaaaattccaccatcggtgatgtgaaaaaattaaattggatttttccattatcatcaaattgtgtcttcagaaagaaacttcggtacttgtgggttttgggcctacaccacaaaattttaaaaaagttagggcgcgctgaaggcattttagcgcgcgttactattttggcagcataaatgcaacaatctgaagcaaaatttgttcaaaggtatcaactttgcgtcttttacagtcctcatgcaaaaggaattcgcacaaataggagtcgagttttgcgctgtaggcccaaaaccacaagtaccaaaaaaattttttattataaaatattttctaggggttttcccaacaatttgtttggtttcacctttttaggctctcgaagcgtgtcattccttttggcaagattcaggccaacctttggcattgaacgactgcaaaaacatggtccgcttcagcatccaaccggtgaaaatgatggtcatcgcgttgaaggacatgggcgcttttggttgactaatttattttttcaatattttaattccgaaattccacgcagaaaacggtgatgaattggtgatgtaccgtttggcaactctgttgtccgaatacttctgtcatgggctcaaatgtctggacattttcatcgtttctgcaaattcaatgtcctcctacccgaaaattgggtgcatttttttatcttcttaaactcggtcttattttggtctccaatttgttataatagtgcaccaacaatagctttaaaattttcaatttttttttgtattttatacacattctacgaaaatatgaattcttacgacttccgaaaatgatcgaaaaataaaaaaaattcattgtcacagtttccattttggtgattttagggccggcgagggacgggacccagccacggcgttttgttggatccagtccgcaatcccgtattttttttggaaattttttttttataatttggacaagaaaagcgtttgggcccccgtttttgggccccnggggtcgtttggggccccaaccagggacgggcgaaacttcgagcttcgtgcttcgagcttcgaaacttcgcggtttttgggcttcgaacttcgtgcttcgaaaaaattgggcttcgccttcggcttcgagtgccgagccgagcttcgccgcccctgttttgcagaaccatctcgcaaatgccaaaagaacataacacatacaacaacaattcgaaggagccgaaatctccaagagtacaaatataattaattttcattcctcaatagaaaatttatattcaaaaaaatattcctaactcaacacaaaaatacaaaaaattaaaattaataatctaataaatatagcgcaaaagtcatattattcgttggctttcttgaacataattataggaaaaagaatcatagaattggcatccatcttaagtgaaagaattttatataaaattaaaaatggcttaattattaatctgatttgttatttggctaaaaagaattaaaatgcaatatattaaaatcttattttttcgaaaattggcgaccagcgaaaacttaggtttattttgaatttagaaccaaattaacaacaattttaaaaaatggaataccttcactgatttcacatttagacggcaataatcaataaaactctaaatcataaaaaaattcacaactacttaatattttatgttaatctttatggttttttattttaaaaaaccaaacaacaaatgttaaaaaattaaatattgtaatatctattcagcgaaaattcaaattaacgttttaatccaaaccaataagtgagaaaattcaaaattttatctaatgccttaatttaaactgaatttcatggaattaagtataattgattaatacgtggttggctaatgaatttcgatgtgattggatcagcttcataatagttgatggcttatcagcatacagcatacaaattaaaaaggttctctctatttaaataattaattatttgaaaaaattttattaaaaagtaaaaaaaacagagttgctataaattacccgaacgtaagagatcgataaattagtaaaaaaaagtacaataattaaaccttttaaacaagaaaatctgtgatttggataattaaaaatgtaatttaagatttctatttgaattaatttaatctaaatatataatagccaagtccatgaaaacttgctgacacattaaatcgtttggtagggtaagctatctttaaaatttaaaaataattggctgaaattggaatctcagtcgataagaattagtaaatataagaattaccgaaaattaaacaaaaactacgcactttaccaataaagaaatataaatcaattaattgaatataaataaatacggtggaaataaaacagttaacgaggataatttattgataattacatataatgcttaagtacgtacaaaagagcgcgaagacgtgaagttacacctgcgccctcctatcaaatagtttagtggaaaaaccgcgcctcaaatcagctttgtcttgattcataaagtttggaataaaataattttacaaaaaatgatttgtactttatgatttgactattaaaaagtagtagaaaaaatttcgctttcgcgtctcgcaatttcgcgagtttggaattaggcgtatcgcatttagtttcatttggcatttttgtcttgtgcaactacagtgtttcgcattcaacgtcgcgctctgctccatccgagcagtatatgcaggagtcgaaaggatccgctcggtacctataaaatggcgaaaagatggagtaggatgtgaagggaggggagggtgggcgcagcaacagccacaggaggctgaggaggaggacgaggtgggtgatcgggcgagactttgaaatatgtattaataatacaatttggttattaaatatctttcttggtccccgtaaagcccatcccgaggtcattggcgtttgccataataaaatttattaaaatttttcttggtcgcttatcacgaatatgacatccctttccccgtaattcccaacccgtcaagagtttatgtgttccctgatcatgaatctgacatatggtacaataatcttcanaaaaattttcttcttatttcttgaa

SEQ ID NO: 9878 - DNA, 1995 bp, Heterodera glycines
agattattggcgattatcagctcggtcattccgcaaacacggattcagtttatatttcgcgaagaatgagctgtaattttgcgaattagacaaaaatgagagaatttcacattctgctaattaggctttaaatataaactgtttaagtgttgcagacgaatcaggttgataagcgccaataacctcagatttactattttcgcgaccccactttttgaattctgacattttcagctcattacgctctaaatataaacagcatcactcactctctctatccgcctctccccccttctctatcgattcgctctcttccctcttcccactctctctctcttccttctttctattaattgtctctctctcctctctctccccactctctctaacccccccctttctcttatcaatcttctctttctctctctacacctctttcccctctcttcttctctctctcgcttctttctcctctttctctctctctcgctcccttcactctctcccttctctcttccccctctctctctctctccattctctctccgtctcccttttctctctctcccttctctcttccctcctcccctctctctctcgctctccccattctctctcttaacttctctctctctccccctcttcacactctctcccttctctctctcctctctctccgttgtctctctcaccctctccccccttctctatcgattcgctctcttccctcttcccctctctctccactctctctcttccttctttctcataattgtctctctctcctctctctccccactctctctaatctcccccccctttctcttatcaatcttctctttctctctctttcccctctttcccctctcttcttctctctctctcgcttctttctcctctttctctctctctctcgctcccttcactctctcccttctctcttccctctctctctctctcgctctctctcgctctctctctctctgtctccttctctctcattctttatctctctctctcgctctgtctcccctctcgctcttacttcactcttcttttacacattctctcctctctctccacactctctctaatctccccgcccctttctcttatcaatcttctctttctctctctgcacctctttcccctctcttcttctctctctctctcgctcccttcactctctccctttccctctctctctcgctctctctgtctccttctctctcattctttctctctctctctcgctctgtctcccatctcgctcttacttcactcttctttcacacattctctcttctctcccccactctctccggaacgggccaactccgtctgagccaactttgagtcaatataactcttgaagtttttgaccgaatcaaacaatcttgatatcattcgaaagctcttcacaggctctattagcctactaaaaactacaaaaaatttcgaactataaaaagatagaaataaaaaactttgaaaattctgccttttttgcggttttaaactgacaacttttttgagagctgattaatcactgagaaatagcttataaatatcttctaaacatctagggctttcgaacgataccatgattgtgaagtttggccaacaaagaaaaaagttatagctttttgaacattgctgagacggagttgacccctaccgactctctttgcttttttttatcatctcaactcttttgattctctcttttctcccattatctcgccttttctcttccctctcacccactcctctctctctctctcactctttctcccttctccgttctctttccccattctctctctctcatccaccccccccactctcccttcttttctcgttctttcccttgtctcctcctctcatccctcgcactctctcttatttttcctatctctcacttcttattccctcccgctcctacgctttcatcacacataagtaagcaaactgtctggtcttcccttttttctt

SEQ ID NO: 9879 - DNA, 3328 bp, Heterodera glycines
ttctctctctcccttctatcttccctcctcccctctctctctcgctctccccattttctctcttaacttctctctctccccctcttcacactctctcccttctctctcttctctctctccgttgtctctctccccctctccccccttctctatcgattcgctctcttcccgcttcccctctctctccactctctctcttccttctttctcttaattgtctctctctcctctctctccccactctctctaatctccccgcccctttctcttatcaatcttctctttctctctctgcacctctttcccctctcttcttctctctctctctctcgcttctttctcctctttctctctctctctcgctcccttcactctctcccttctctcttccctctctctctctctcgctctctctctctctctctgtctccttctctctcattctttctctctctctctcgctctgtctcccctctcgctcttacttcactcttctttcacacattctctcctctctctccacactctctctaatctccccgcccctttctcttatcaatcttctctttctctctctgcacctctttcccctctcttcttttctctctctctcgcttctttctcctctttctctctctctcgctcccttcactctctcccttctctctttcctctctctctctctcgctctctctctctctgtctccttctctctcattctttctctctctctctcgctctgtctcccctctcgctcttacttcactcttctttcacacattctctcttctctcccccactctctccggaacgggccaactccgtctggctaactccgtctgagccaactttgagtcaatataactcttgaagttattgaccgaatcaaacaatcttgatatcaatcgaaagctcttcacaggctctattagcctactaaaaattacagaaaatttcgaactataaaaaaagatagaaataaaaaactttgaaaattctgccttttttgcggttttaaactgacaacttttttgagagctgattaatcactgagaaatagcttataaatatcttctaacatctagggctttcgaacgataccatgattgtgaagtttggccaacaaagaaaaaagttatagctttttgaaccttgctgagacggagttggccagacggagttgacccctaccgactctctctgcttttttttatcatctcaactcttttgattctctcttttctcccattatctcgccttttctcttccctctcacccactcctctctctctctctcactctttctcccttctccgttctctttccccattctctctctctcatccacccccccactctcccttcttttctcgttcttccctttgtctcctcctctcatccctcgcactctctcttatttttcctatctctcacttcttattccctcccgctcctacgctttcatcacacataagtaagcaactgtctggtcttcccttttttctttgtatatgctatttcttttctttttctcttctttttttcatattaagtcaaaacgccaaatgccaatttaattgagggggcggggcttgctctcatttaatatacttaggggataagaacaatagcccgaaataaggacaaatcttataaataaggacagatccgaaccctgttttaacaccaagaaaaaaagttcacgaagtgaattaggattttctattaacagagataacgaaatagtacgccaaaatgagaggttttttatctgcactctatttattggttcatctctcgttttttgaaacggtgtgtttaattatcgcatgtattctttttcattttagcagcgtgtttcaatttgaatttgccattcatattcgtgccaaatgagccaccatcgcgatttacgacaagatgtcaaggcgaggacgatgcgctttgcggctttggacccagacattgcatcaaaatatgacgaattagatgaagaggaaagcaacagcaacagattactccgttttgaggtttattatctcagggctcaatttttcatgggatttttcatttgaagcagccaagagaattgcatagaggcggtagcaatttttcaaagaaggtggtaaatataatcgagaggcacataactcgaaaggatcagaatgcgatgcgaacgacaggggccgggacgagttccagcagacgcgacttcattaatttggtcacggtatttgacgaagattcatccaatcaagaagtttctagctcttttctttggtctaggtcaaaaatgcttctcgttccggaaaggaccatgttctgaagttgctgtccaattccgtggataattttattccaatagcgccaaaaatgctggagaacagggatttgagcttctacatttctgatgatgatgatgcgcaagcaatttgtctgatgtcacggagaattgctgacaaatacaacccgggccttaagtacaccattttcacaaaacgagttcctgccccgtttgagacgatcagtttctcaaatcgacagattatcgaggtttgtcctttatggacagacgttttcacgtattgttcttttgtttagcaagtcgtaaagggtcgcttcaagcagcagaccaactctctcgacttgagcagctttcagaacgacccgctcttcgaacggagtcaactttcttatggactttttcacaaccacgtggtggtcgccgttgccaatttaatcgcgcaaaattttccctcaattcgtggcattcgtttaaatgtaattaaattgttactttgatgggatgtttttctttgtcttctttagaacaacagtctacgcactttggacttcctgagttgtctcgtctacgccgcaccaaatgttgttgaattggatttggcaaacaatgcggtgagtgagtgagtgtgtccgttgcgagatagtcgtaattatgtattccatttaccacagatttcacgcgttaatgaattggacaaattgaaaagttggtccttggaaagtgtccactttgaaaacaacgaatttgtcgcgagttatcagggcaatttcgtcgcatattcacagttcgtcttcctgtgacattcatttaattgttaaacaatttttagagcaattcatcagtttttccctcgtgtcacatatttggtactttacaaataaataaataaaataacattttgacgttcttttcccctccccttcaacaggatggacggtcgatccaaccttcgcccgaaatgggtgccgaaatgtcttcggcagtcattccacgcttcagagtaaaattatcatgtcgtgctaa

SEQ ID NO: 9880 - DNA, 1182 bp, Heterodera glycines
  unsure (1)..(1182): unsure at all n locations
aaaattgttggaattatgtcaaaaaaacatcgttttgatcattaaaaaggcggtggatacaggcttaaattccttaaaatgatatgataaactacaagtttggaggtcaacggtataaccaataaaaacaaaacaaaacgacttcgacttgtgttaaattagttttttttctggggggggggggttcgctctcctttctcttcttcctccctttttcttcctctcttcttccttccctcctccttcttgctcctctctgtcccttctgtttcctcctccgccgtctcttttgctgctcccctccctctcctcaccaactttgccagtccgtccgtgtcccttcctcctcctttttgccccctcccgccgcactctcttcgcccttttgctgctcctttttctgttgctcattccttcgctgttgtgccatttgagtcgccacacttgcaaaattccctgtgctgctgctgttcgccgttctcttcaattcttttgcatcagtcacatttggcaaatgttttttgccaagtgaattttcctcgcccatatttaaatcgagcaaaaggtccagcaaattgtcattagcttaatggaaaaagccaattaaaaagacacgcatataaagtcaatttgaacctttcgctttgtcggagggctttttaactgctcccaattttagagtcgttcctttcgttggttttagagtgatcggtgaagaggacgtggaaatgtttggcattgttttcgttttggcattttgggttgtgattagctcggcattttgaacgaaagtctgtgaatggaagtatttcttttaaattaagtaattggtatcacttaaaagagacagtagggacggtgccgggttttgactcggggtcagggctgggcgcaactggattttcaattacggaaatttgccatccgcaattacggcgattttctcagttacggaaattcgcaattttcaaaaatcaatttttgtcagaatttttgaaatttttttaaaatagtgaattaatgaaaatcaactttatttttgatttcaattttacaaagaaattataattttgtgtctaaaaaattgattctttttgaatttttagggttcattttggaatttttttttgaaagtctgatcattataattggatttatatnntagtatttcaacatttataa

SEQ ID NO: 9881 - DNA, 1530 bp, Heterodera glycines
  unsure (1)..(1530): unsure at all n locations
ttgagggcgcgagtgaaagcagagattanaatgcgtgnncgatnggacggtcaaatgaaacagccgattttgccgagacactaaaaaagaaaggcgtagttggggatgaattattactactgaaaatgtacaatggttgtgtttgtccgaatgctgggctcgggatcggaacctgaaacccttggcaaagtctaattaanaagatttggcttcccccccccccctcccatttcgtttgccttggagtcgtgccaaatgcttcatcagatcagtgttcaaattgctgtggtttaatttgtcggcaaacgaaacgattgccttcacagtgctttcccgaacggcagaattggaatccatgaaacccgtaattaaattcctttaaaaattcaaataaaactatttttttaattttgtgcaatacccgtagattttttcattaaccacttgtggccttaaatggctggaaaattcatcgattctctccaacagtttgaccctttaataagaaaaatatttaaaaacccatgcaaatggtgcatcaccgtgtcgttcgatccgtcgaactgaacaatttgacaaggcatgggacgattctctgctggtactaaaccaaaaggttaaaacccagttgaaaagagtcattgtcacctcattctcgtcaagaagtctgcccaatttgaacattggcaccaaaatgtgggcacccgcgtctccgaattcgtacgtctaattggtaagtgatttgttaataaaacaaaaatgagccaaaaacggacatgaattagctttggcaaaattttgttgcaagaaatatcgtcggggaaaaggtctaaattcgaattcaactgcatgaaaaaggactgcctttctgcagcgtcccgaagttgaaattcgtcgaggaataaaagagtatcaacgaatttgttcttcataaaaccgccgacggaccgacactctgaaaaaagacaccaataaaaaggggagggacgaaagatggaaatcataattgagaacattttattgttagtgaatcaccgtttagaatgtccgcgactgccatgacggaccttccgcgagcattgaaacggcgaaacaacggttggactctcttcggaagttgcgtcgaatctgcggaagaatttggtcgaaaaattctgttgagagtatccgccaaatcagtgaggtcgcattgcggtgaactgaaggaaatgaaacagatttatgggggtgggcaatgatttgtttttgttggacctgaaagtgccgctgaggtggaaggaagccaacttccaatcgcccgactcagtgataaaaatggcatttcttaggttgttgtgcgaaatttttgcctcgttatgcaggaatttgagacaattctgtggtaaagggacaattggcactaaagtaaattgaggaaaaacttggaaatcggaccaacacttggtaaagcccccaggagacgaacagttcccgctgagtgctgttcaacgaggtttggccgaggtaataatccaagggcggcacggctcc

SEQ ID NO: 9882 - DNA, 1079 bp, Heterodera glycines
ttttctgcgcactagtttcgatatagtaagcataaatacctcctttgtcacttggtttgaggcttctccgttgacttttattatgcctttttttgcctttttcgggattttcgtgccttaactgccttttttgacattttgccgttttggtgcctttttggggtttttttttctgaaaaattccattaaaaatgcaataaaatcgggaaaatacaccccaaagaaatgaattgaaacaaaattacagaaaatacatccctaagaattgaaaattttttctcaaaaattgattaccaaaatttaattaaaaattttccttattctaaaaacattataaatatttaataatcatttaaatgactaaaattaagttatttcgttaagtttacgtgttttactccctgaaaatacttaataaaaaatttttaatgccttttttaatgcttttttcgcgatttttggtgcctttttagtcggtccctaaaaataacttaaaatattttacactttgttttagcttgcctttttatttgacgttaactttttattttttttacatataattttttgttttttatgttattttcataaggcaaaatttgtatttcagcgaaagaattgccgaaaaacaaacggtcgatcggtaaacaaattaagaaaacccgggaattgaaacaattgctgaaaaatattttgaaaagcaaaaaaaaatgcaaaatcttgactgaatttttggtaaaacaaaatttgacacatttctccttgaatttgaaaataaaaagatttaaattttaatttacttagataataaaaattttctttctcataaaaatggaaaccctaatgttaaatcacaaaaagattgtctctaataattagattgaggttataattttataatggcgccaaaaatagcccgcgccgagtggacggttcccctttttagccttaggcattttttatgactttttagcgactaaactaaactgtccaattttattgttaaaatgccatggcaccgcggacaatttttaagtgttaaaaagcaggttttaataagaattcttctttagctatgc

SEQ ID NO: 9883 - DNA, 1973 bp, Heterodera glycines
ttcatttttcatgcataatgaaattttatttatttattttttgcttacgctttcgcctttaattaagcagcattaaaattgccctttttgacataaatgtttttgaattttctaacctcggggggtcgctgctgttcaagaatatgtcatgataatcctacggtaatgatgtccaaaagataaaacatttttctagggtaaaaaatgcgctgatctcgaacccgagctcatgttttgcaaaatcattgactttgtctatgatttccatcaagtaaaggacatatttttgcatttattatgaaggggaggcatagatccctcccttggccatggctttgagcctctccttttggctaccacaattaagccatcattcccctcccctccccccccccttccttagttttattgtccaaaattttcatttcaaatactccgccccctcaacgtcctttccatttacaaatttttttttcatattttgcttgtttcccaggccaactccgctttttctcagtattaaattgtcgactgctgcaacttggaaggactgaacttggacaatcagtcgaaatgcacgtgactttgcttggattttctgagattaagcatgccaaacaacgaaatggagaaatatgccaaaagaagtgatttcggatgggtggacaaatggaaagggacaatatttgtgattaagaggagaaggacgaacgaacggacagaaggaaaagcgatcggatggaatttgagaaacggaaacgaaagaacgaagcagcgaaagcattgagagaatgaagccaaagtgaagtgaccaaacggaaaaagtctttcagccgcccttttcgcttgtctttcagattgtctaatttggcaattccgatttccccccccccctccttaaattgttcttacgcacaaagaaaaaccaaaaaaatgtcacggtcaaaaattgtacacggaggactgtgaccaaaacatgccaagaaagtgcgaataaattcagtaaacctatcagatgatttgatacaattttatctttgattgagttcgagtcgtctttgagatggttttctttactctttctctctctacctctctctcgccctctaactccctttccctcttccttctcctttctctccactctctctcctccctctctctctctccctttccccctccattctgtctctcctcctcgctctttcccctgctatttctctcccgctttccttccctctctctccccctttctttctttctctctccctccctctcttctctccctctctctcccctttcactccttcctttcccccttccttttcttttctctcctctctctctttctcctccctctctctccccctttctttatttctctctctctctcccctcacttttgcttcatttacctctttacttggggcgtcatttcccactgttctcgtaaacatctcctagaaggaaaagaagaggcaattccccgtagggctgaataccccgatgatggaatggaatagttacgtaactgtgccggccgattcgctgaggtcaggtcaatgggaggggcggcggacgacggccttcgggggaagttcaaatgaagcggggggggggggggagattggacaggtaattgggcgacgctgtgccgacccttcccaccgcttggctcgctcgactcggctcggcccgacctcactttggctgacgagtgacaacaatcgccgtcctaacccgtccccccccccgacagattgcgtctgcctccgacgatctccgcccccggcggatgaccccggcacattcgttgccctgaagggcatgtcctcacatcagcagagattgtgagattacgtacctctccaaaatgcacaagtaaatcccacatatttcttttaaaatttagattcctaattgctttccctcagatggattctagatggtgaccgatgggacctgtcactgcg

SEQ ID NO: 9884 - DNA, 1228 bp, Heterodera glycines
ttcaccttccgctgcgcttctcttgcttctccatcagcatcaacacacaacatctcaatgaatgtttcgttgttttcggtgaccgggcgagcgtacttcatttcggagtgaggaggcgggaagtggaatgggggggaagcggaaggagaggggcaagcggaagggaaggggtgaagcggaaggaaaggggcaagcgaaaggaaggggtgaagcggaaggggaggggcaagcggaagggaaggggtgaagcggaaggggaagaaaaccagaaaggggtggggggataagcggaaggggggaaagcggaagaggagcgggaagcggaagaagaggggcaagcggaagaggagcgggaagcggaaggagaggggctagcggaaggggggaaacggaagaggagggagaagcggaaggtgggaaagcggaagggaaggcgtgaagcggaaggagaggtgcaagcggaaggagaggtgcaagcggaaggagaggggctagcggaagggagaaaacggaagaggatgggggaggggaaggaaaaagatgacaaagagattttcaggtgcaaagctgcgaaggatgcaaagtaaacgaaaggcgtgtgctcaaaatggcaagttgcgtgcgtttcagggctttttccgccgcgccattcagaacggagtgcaattcgcatgttccaagaaagagaagtgtgttgttgacaaagtgtcgcggaaccgatgccaaaagtgccgattggcaaagtgagttacgcagtgggttaggtgattagcaggtgacggttgctcgacttaagatgcttacgggtgggaatgcagcaaacgcacgttcgactcgagaagaatcggaagaggaaaagcgactcggaacaaagggacgtgggcttggaaagcacgcgacaagccatcgaactgatcaacgctgttgtgatggcatttaaggtgggacaacacagacaaattgaagaagggccgagggggggggggggagacaggtgacggatgcactgaccgatcaaagatccagagtttcataactgcaaccgattcatgctaaagcatgccaaactcagagttcgttccttacgctcgtcgacaccaacagcgccacatccgctcagcttttaaacatgcccaatttgaagacagctcggcaccattgtcagctgttcgttgaagcgatccccacctttggtgccttaaactcggacactctttgagcagcgacg

SEQ ID NO: 9885 - DNA, 4031 bp, Heterodera glycines
tttaattgaaattttttcgaattttccaaaatcccgcacgggatcccgcaaattttaaatgcgggattaatcccgcgggatcccgtcccgcaaaaaattttgagttccagtcccgcagcgggatccgcaaatttgaaatttccggtctctacccggtactacccgacaaacgatgtaggggaaaaataaaaaatgtttgccttctattcctatttggcataatgttttttttaatttgaaaaattaattccaacgatttctgaatttttggcaaaaccgcaaaacacatcatacctacagtaagtcggaatggatttccatttcatccatagtttgctttttagattacttttattaatgtaaaactcccttcaccgagtgttcttctgtaggaaatttgaattcggatgcgaaggtcgtcaagcgtaattagcaaatcgttgactttgcgtttgcttgctttggctctttcttacttcgtctcggtgctcattttccagcgaggtttactcgtgaagcgtcacattcttccacatcgaagttcatgtgaagacatagtcgccagggaaccgcgtcaatgctggactgaggcccgattcagcaaagttattctgctcgttgtggacgctcttcggtaattatttcgacttttttgacgaccccttttccctttgttttctaagttttgattttattcttccttcaaatggtctgcaaaataactccactgcaaaatattacaccggaaaaatgccttttgtggccaagttgctcaattcctcaaacgctggtctttttgcgcttctctcggatgcgccaacaacaacattccagcgcattaaggcattggttaccggttcagtcccggcattcattgaagcgagtgataatttcggggggtccgaaattggcgaagataatctgattgaccaacttatatcatgcggtcggaatattacaatgttgggtgatgatacttggtttgttctttgccgccttttgttttgcataatattttaaaggctccaacttttgcctggtcgtttcaaccgtcactttgagggaccgagttttgacatcaaagacctggacacagttgacaacatcgtttttggtgtcataccaagccatttaacacttatgtgacctgactcataaaacagcgcgtatttatgatgaattgaatcggacggattggtcgttgctgatagcgcactgtcttggagtggaccacgccggacatcgctatgggccggtgcacccggaaatggcgcgtaaacttggccaaatggacgaacttgtgcggaatgtcacgagcaaaatgtcggatgatgctgtcttggtctgacaacaattggtatttaatgaacctttccttccacagtttgttcttggcgaccatggcatgactcagactggcgaccacggcggggacagtcccgccgaaataactacggcacttttggtctatgcaaaggggctgaatattttgacaaatttgtccgacattttgaccgttcaccaggtcatttccctttttcagttggtcatctctttttgaccccttttcaggtcgacatcgtcccgacattgtcccttttgttgggtgtgcccattcccttttcgagcattggacttgcaattgactcgcttttgccgcagaattcgctgcatgaacttcgcctgaactcttttcagctgattcgttatgctcagcaatactttcaccactacccgccaatgcaagtcagttaatgaataaatgcatcgattaccccccccctccttttttcgtttgattttacttttttaattctttaaattctccaggttaagcttcgttacatcattcgccaatacgaaactgctgcggatgatttccattccaatttgttcgtcataaaatccattcaaaagttgctccgtctctccctcgaccaattccatttctccgtttgcgtcgttggccttatttcgctgctcgagtcggtccttttcaatggttttttgttgttggacaatgccgacgaatggatttcgatccgtctttgggtcttccgttctgctctcttgtttttgcaggtggatttttgtttaaattaaaaaaactatgctcgatggatcatctcgttattccgttgcttttgagttacgttcaaatttatggctgtgtttattaagttggatatgatttatgggtcgactaaatattttaattcttgtttttttatttttttcatttaccgtcgctttgttttaaaatctgccaaaaataattcccgctttcagctcagtttggtttttgctgctgaaccgagtgttgacactgtctttttctctgtgacgagcctcgccgtgtctctgtgttcccagacggtggtcctttcctacaaaatatttgctgccgtcactaacaaatattcgccgtttccgtcctctccgtgcctaacccttttcgccaatttcgtcctttctctgctccctttgtctaacagtttcgtcatttacgaatccgacgtccttcgcttttcactccaaagtgtcatctgtgttcttttgctgtacagtttgaacaccaaaaggtcaatgaaacattttgttgctttttgtttcatgttttttttattttaggtcatttaatcttcgaaatgtcagtgctgaggtgagacttgctttgctgcttctattcattacgcgctttttaaaagcatttgagaattgccgtgaagaacaggttctctgtctttgccgttgtttctgtttggttattctacggtgtttccctaaggtcggatgtgttcctgtcaaattcgctagtcattcggcctttcttctgtccgttctgttcgtcatgggcgtcctttgggctctttttgagcgtttttctccccgcgcgcactctctgaccaaagcctttgtctggtcgatggccgtctttctcattttgcattgggccttcgagctcagcgcactcagttttgttgagtcaggtaatgtttatccgggtaatattttggtcctaattgcagcctaacgacctgctggttcactaatgctcttagacataatggtcggctcgctatgtctttgtccattaactttttcggctatccaaagcaaatatctattcgaaattatttattttttttgcatttaaggactcattgaaagtgcttcaactgattttgtcgtttcgctcgggaacattcggctcatcgaatcggtctctcttcgcttggctcaattcgtttacttcgctttcttcgtccacctcctcgccttccgttggctgtccgtttcggcctccgcttgggtttggccccatttccatgcgttggctgttccgctggtgatgttgtccggctattcgtacggacaaataatttcggtgattgtcttcgctttcgctgtctccgaccctttgacttcgtcaggtgggaggacaatgaccgtttgtttcaacttttcccctttcccagagagtgtttggaccggtgcctttctcctccatctcatcgcattgctttccttttatgccaccggccatcaccaaacgctcaattcgattccgtggcacgccgcctttgtcggtcttccgggcaatttccccttcaaatggttgtccgcacttctcatcttctttaacatgttctccgggaaaatgttggcttctttgttggcattcacaagggaaagagaggacacaatcaaagggccgctctgtttgttgtttttcggtggaatgcgtgtaaaatttttttttggagaaacggactatttgacatgaatagcctttttccccgcccaatttttaaatagaatgcttataaacacaaaaatacctaattcggggattggacacctaaatttagaatatttctgtaattgtcggaattttgttaagaaaaatgcaaaactcggtaatagtttagatggtagccccctttttcaaaaaataaaacttttgattttttttttgttcatctaaagaaagtttaggggtttcgagggccgaagaatccgaatccgac

SEQ ID NO: 9886 - DNA, 3009 bp, Heterodera glycines
  unsure (1)..(3009): unsure at all n locations
atttcataaaaattattgacactagtaaaaaaagaaaacaaataatgcgggaacagacacagattctccgaataacagaaatggctaaaaattgtgcttgatcactcaaaacgcaacaaatccgggcggccaccgttcagtcggcgttgccttccagcgtcaacaccatgatttggaaatgacctattcaaaatgagggaaattagagaaaatctataaattatggacaaatccgtaaaataaattttaggtgttaatgttcggcaaaggcccgtaaccaaaaaaatttcaacgggggatgggaacctggatttttttgtggtcgaaaattaattaaataaaattgtgggaaggggtcaattttttgcaagggctaatatcaaaatcgtgcttgaattccatacaaatacccctgaaaatgccgcggacgtggcggcgaagcaccgccaatgatgcgcattcttttctcctctgcgtcggaatcatattcggaatcgctgaaaaattggttctcttttccccacacatggcccaattctttaaaaaacggttatttttgattaacttgtaaagttcaatgaaatcaaaaaacaaaacaaagcatttttgcagaagttccgaatccctccaatttcataacagatgatgccaaaatgaatgcctattgttagcaccaacttgttcaaatcggcgtcaatgccatcgtccgttgtcgaggcgctgtcatcccaattgtctacttgccgaaaatcgtcagagtccgactccccgtctccgtccgagtcatttgccatgccataacgttgcgctgcggttcgttcaccccccaatccgtcgcacacctcggaaccgaacaaaaagtcaacatagccggcctacatacaattctattataaaatttgcattcgggatttggattacaaaaccaaatgcatttaaaaaacccacttgacagtacaatttgctgcgcaactgttccaccaactgattttgcaggttttgttgttgagcaacaacagattgttccggctgacttgtggtcaacatttgtggcggcggctcgtcatcctgcgcaataacgggaagatgtgattaatttacattagaattaaccgagacctgcataactaatgcccctccaccatttctatgagggatttcccgacctagaaccaaaatccctggggcttttttcatccaaaatttcaaaaccgaccaacttgacattttaagtaccaaaacattagtgacatcttcattttgcaaaagaattgcctatatacgtataaacatggtggcaaaaaatgctttatcaatataatttatggtgcttggtgcatttatcggcaataaaaatgaatttatctcatagattactgngaaaaagcagaaatcagcagcagagagataggtgagagaacttaacanaatattgagcagtaaaacaataaaataacatagttttaaaaaagtaagttgaaaaagaaatgagtaaaaatgggtaggaaaagcatagactcccattctttaaaagccgcttcaaatgtcatcggaagcaccaagacaacctaaaaatcggaaatgagtcataaaaagagagggatttcgaaataggttttgtaaaatgaaaaactactttgactattgaaacggcttttttaaacaagcattctttattatttttttaaatttttacacaaaacaacacctaaaatgtggataatatgaaaaatgagaatattaaagcaccgtttagtataaatatataacctggtggcatgggaaatattaatcaataaaaaccaaattttgcaaaaaaaagtttcgtccactttttgtccttgtcagtttataaatttcaaaaccgcaccagcagtgagccccacgagtcctgcacaatttcccagtgacagccttcagtttctttgacaaaagtcacccaaacattcgctgatttgtcgtacaagtctaaattaaaaagcaatgggacgaaaatgagttagatatttttattcgaccaaccattgtgagttagaaattccttgccgaatcgaacatttcccaagtctcaaaaagggtttaaattagcaaaaaataaaaattgcaaaaatacctgtcttaagaacataatgatcgccatgaagcttcgttattttttccttggtaaattcgcaattgacatgaacctgaaaaaggaagttatagcaattgacacgattaggtaccgggaaaatatcaatttgaacccaaaaaaaaaagttttttaaagggaagtataatttcttacatgcacaaatcggtccatgatcagccgcgttttcagcattggttcatgcaatttaaagtcacccttacacatccattcgtaggtcaaacgacgcgcctctcgctcggccacacgaataaatgcgcatgaatagaattcgccaagtgaaaatttttcatcgaattcgcacgcgctacaaaatatatatgtatatcaatatgaaataaaaagattaacgttcggacctctgcacattggcgtacttgggcaacagtatgcttagtccgtatttggggttgtacatgagcaaatattcgggccgtttgcgaacaaccagtccatttgcttgcttaaaaagcctagttaaaaaagtgaaaaaccgagaaaaccaaaataaaatatgaaacaaattcgtggtgggacttttagtttaaaatacccaaaaatgatatttatttttttgaaatatcttgaaaaatactaaaggcaattgtttgttcgcgcaatgtcaatactcacgattttcttatgcgccgtagacggctcataacgcaacagttccgcaagcacaacatcgtcactttcgccggcgtccacatatttaatggtatttgtcgtgattatcttctttaccggagctgtggccggtgctggcgttgcaccaactgccttcctattgaccgaaaagcatccaatgtgtcgtcgaaaggactgggcttcagttgcacgtgatggtgttgctg

SEQ ID NO: 9887 - DNA, 1941 bp, Heterodera glycines
  unsure (1)..(1941): unsure at all n locations
aatggccaagcctttttttctaatgcgcagaaaatttcgttttgaattaccctggaaaagaactttacaaacaaagggnctttttttgcccctcccgaaaaactcactggtgtcccatgtgttgtctcttgcatcaaaaacttggtcaattaaaatccggtgtgcatcgtcacaagtcttaccatcctctacggaataaattgacaacttaaatgggtaaaataaatggaattgagaaaatccaaaaacgaaaaatgtgatgacctggagtggaactttatgcacacttttcaccgatttgccatgagatttcagcacattccagaaacaattgcgtcgattctccggctgacgattgatgccaatttcgaccaaatagctttcaccaggttttgttctgatatgttgttttgtgtcctccactcgccccaaataatcgtttcgcaaacagttaacgacgcatttcacatcaccacataactaaaaaaaggagggggaggggtaatgaactgtcaaaaaaattttaaaaaaattgacggaatagatatcataattatgcattaaattggtaaacaaattggaggacgatcgccaatgaatcccaaaagattttcggatacacccccattgcggcaatattatgttccggcgacctttcatccgacgacgttacgggcaacgacgttttgttatgttcccaatatttttaactctcaagaaactgggcacaaatacggcaaaacaaatatgcgaatcccctcgacagacatgacccagttgaccgaagtccatctcaccagcaatttttcggccccacttttgttgaccacccgtgttgacatgggcggtgaaatcttctttgagtacagcacacggtacgtgtgctcgtgcatgaagctgtcgtaggcaagcgtgcgcaccgcttgctcgtcactctccacctgaatggtcgcctccacccaagtgcccagctccaagcgcttcggctgtcgcgcaatgccatacgaagtggcgatgactgacactttctcgtcctgctcgttgccaatggtcactccgagcacattgaccacctaaaataatgttgaatgacgatgagttggtgatgaaaatgtaaaaaaatttacagtgtttccacattctcttgggcccttccagtccagcggtggctaaattataaaacaatgagtttcggtgtttgtataaattattgccagtatttgtcttaaaattgtccgttccgtacaacctgaaaacgtgcaccaacattcaccaaatgcatctgttcgtctgcttgctgcattcttctgccgccgattcgattgaaaaacggctgaactttggcatcgatcactgcgggaagttcgtccaacttaaacacatgaatataaaaaaataatgaaacattaaaaataggtttaaatagacagattttgggaaaaactattaattgatccagtaaattactctttgtcaggcaacacgcctgtcggaaccgacaaaatgtcacctctcaacaaaaattttttttgaagcagcaaaaaattatacattttttgctgcaaaacatgtgaatcaaatacaaaccttttggtaaacatcgttttgcttctccatcgcaaatgccatccaacggcacttgtattcgtcggtgaaaatggacatcacctaaagaatgaagcaagtgaaatttagaaaaatgtgaaactgaaactagtcaacaacctgcacgcactgttctttttgcacttgctccttgagccagcggtcatgcggacaaatgactcggccaacaaaactgtcgatggcttggaacaactgcgggttgtgctccgtgggatttgtgagaaagcattgcatctaaaaatggtaaagattaaaagcagtaggggcagttgtgagattaaatagacttttttagagacaaaaactgaactcttt

SEQ ID NO: 9888 - DNA, 1893 bp, Heterodera glycines
ttttgtatacctatattttttttttgaaaaattccaattttgatggaacgatgcaggggtgggggaaatgacctggtccgatgcgttttatcccaattttgtatcgaagaggttgggaaagtaattaaaaaaagtttttttttaataaaatttagaaaagcgagcaaaaggcgagtaagaatcaaaacacttacgacaacttcagtgccgtaatcggtgctgcatgtgctgaccacacggtcatcacgggaagcgagcgcaacgtaataggcggtgtaactgcatcggactccgcggagcagctgagactgttcgtcaaaacagcggtaatggacccaagttgcaatgttgtactggtgagaaaaaatggcaatacgaacaaaaattttaaacaaaaacacacacaaaactaaacatgaattcgaaataagtatttttgtgcgtaattcctccatggacaaatttctggtttcggtacaaaatatgttaaaagtacctgttgttgttgctgctgaagttctgcaccggttggtagctgaatgcgcaccaaatcatgagtgggactccagatgacggcatattcgtccgtcacgcgtacaactagtcccaagaacggggtaccctcctcaaggtcttcaagacgagcagcgtaattggaggcgtcaatttctacaaatttttgtgctataccaagcattatgttaatgatagcttattgaccattgctggggaagtggtcctgcactttctgcactgattggctcctgatcgagttttggtcgctcctaactgagttttggtcagcgttgctttgagttaccggtgcccaaattgtactcgacgaatggtgtgctctctgaacggttgccgacttaaacacggaaaatagaatcacaaattcgtccaccgaaattggagtgactcaaattttgaaacgaaagttaaggaaattgacttggaaatttatatgcaaattgtttaaacaatagtataagtaatagttttgctccacttccactaaaccaaccaacatttgagggaagcccaatgtcgtcgctttcgttgcttgtaatttcgtcagcaaatggctaaaaatttggatttttcaacaaattctgctgccgatcgaacagtgccaaaaacgcacacagtgctcaatgagttcctcaatggctttgctgtccgtcacaattgtgttgaacggcgtcccttgccggtgcttcacacaaaacagggagcccatcttcttgccaagaacaatgaacggttcgggaagtctaaagccgtgatgaaaacaattgggaagatttggaaaaacctggttacataaccctcgtaaaccatgccggggacaacgtcgagtttaagaaagcagagcacctccataaaattgtccgtaaaagccaatccttgtaccttctaaaaacaacaaattataaatgcaataaatttagttggattaaacccttggcttcgggagagggggggggggggggggggggggggggggtgggaaaaaatttttttttttttttttttttttttttttttttttttttttttttttttttttatttaaaaaaaaaaaagggggaagaaagggggggggggggggggggggggggggggggggggggaaaaaaaaaaaaaaaataaaaaaaaaaaaaaaaaaaaaaagggtgggggggcggcgcccccccccccccccccccccccccgcccccccgccctccgcttttttcttctttttttctctttcttaaaaaaaaaaaaaaaaaaaaaaccccccccccccccccccccccctcccccccctccgtgtgggggggggagggggagaaaaaaaacaaaccccccccccccccccccccccccccgctttttctttttttt

SEQ ID NO: 9889 - DNA, 992 bp, Heterodera glycines
gagagaaaatatgaaactaaggaaatgcttagaaattctccataaatgtaggaattccgaaaatcgaacacctttctcccattcattcccttcgctgactttcactgaccaacaattgcccaaaatgccttgggttacgtcgcatgggctcgcgccctccacgaataattttgggtccgcaacaatttcctaaattggcttggtttctttattatcactcattagtggtgccactgtttgcttatcactccctccaccgtttctttaccgtaccccgggccttttccactcaatttccaattcggccgctctttcggcacttccgtctccattttcgtcagttatgaacagtgtcgtgttgtcgggtgggaattccgtgtcgatgaacaatttgcccgtgtttgcgcattgtctcttcagctgtctgtaccttttgcttattttggacggactgataactgtggcgggcactgacggcacattttgatcgacgacggcaccgtttggcattggccaactgattgtgctctttttattattcataatttgacacttatgaccatcaactgacgatgatgacgtagttgggctgtttagcagatcggaagcatttgctaatggtgggcgtttaattgcgtcagaattggaggacaaagcgaactcagccaaacggccgaaaagagacatcgaaacggggatttatgtgttcttatataaacaaattattattttaaattaaaaaaaactattgtttaaattcttataaaaaagaaaattacttttatttaactaaaaaatatattttggtaatagtaccgatggtagcccccctttttcgaaaaacaaaatttttgaattttttcgagaaaagattatattaggagttttaagggtcggagaatccgaatctgacagtaatttcgacctaggtcgatcccggaatcgagcaaaaaatcgaaaattcaaattttagaatttctcatttttggtct

SEQ ID NO: 9890 - DNA, 3839 bp, Heterodera glycines
tatgtcgagccccgaacccgaattcgagcaaaaagtcgaaaattattcaatttttatttttggtctaaaagtggcttacatatcgagaaacaaactaaaactggtcaattcattaaaaaaaaatagttcaactatttctagaccaaaaataaaaaattcgcaaatttgaattttcgactttttgctcgaattcggggttcgacataggtcgaaattaacgtcagattcggattctccgacccttaaaacccccaatataatcttctctcgaaaaagtttcaaaaatcttgttttcgaaaaaaggggggctaaccatcggtaatatatttacctaatttaatgaaaaatttgggggaaatgcatgtgaaaaatgaggcaaagaaccgtgatgaaatgaattttgtgaacaaaactaagtgtaaagtgacgaaggctgaaattcggacaaaagtctgacggacatcgaaaaaagagcgatgaatcatcggaagaaaaggcgaaaaattcaaacggaacaccaaaaaatatttggcgaaaagggagcgcaaagaacggggaaagaatggacgaaaggagaaaagcgatcggaaggatcaccggcggaaagatgggaaacgatcggagagtgatcggaacaccaaaccgcgccgaaacgaattgagtgatcggaggggaaggagtgaatggatggtggtgggttgttgtcgttgtcacacttaaaacatttttggagtttgattcgaatgaatgcgccacaccccaaaagatgggcgatcgattggactgtcgggggaaatgaggcaaaacgccaatgaaatgtcaaaatacgaatgaattcaagaggaatttacccacaaaataaaaataaagatctttgaatgagaaaaattacacagcagaacaaacaaacaaaaatggaagacaaaagcgaagggacaccgtacagtaagacgatttggaattacggtaatctacaatccatgatccatgattggaccaccccggtggaaatagacactaaaaaatgccattacagtctcacttttgccgcacgcttttttaaaaaaaaacttgaagaaaaattttttaattgatttaatgggacaaatgccgttttcaaagggcatcttcgaaaaaaggatgttcaattaattttcgaaggatcaaagaaagtacagatacaaacctgtttttacacatttcttgtttttccttttaaaattgtgttcatatttttatcatttgttcatttgtctgtccctcattaatttttcgtgtccaatcgatgctcaaaggaaacgattctcggcccaaccgattgtcatccatccaattaattaataatgattcatccattcattcatgcattattcaaactcatcacttcacgtatgctccgaattgtctttttcattttttgtggaaagtttttaattgataatttttccaagcgataatttgttaatttgtcaaactttgtgtcgttggcatttccgtgatcgatttaaaatgcacaaaatatgcactaaattattttaaagaatctcatggttcttatttatatctaatggtcccttcttctgctttgaaattgaaatgtccggggatttcaatttgacacgaaaataaaaagcaaagataacaattgagggacacgacacagctgttcaaaatcaaatcaaaaacgatccaatttattttattcagaggcgaataattcaattaaatttaggagacgacaattaaagatggacagcaacacaaaaatatcataaaattagaaagaatgtcaacaggaaaaatatttgattgtaaatgaatattcgtctgatttcgcacaaatcgaataaatttttaaactcaaaattgagtagtgagttaaattttcacttgaaccggtgccggtactgccaaaaccggggcggtgccgaaaccaacattttcaaccggcatcggtaaaaaatgctaattttccgatgttggattacattttataactcaacaattttttgttaaaatagttttttattttgaaaattctaaaagattcgttttgccgtgagatttcttttgaattttttgtgtttttccattctccgacaactttttcttttacttttataccactttttttcgcgacgcgctttttcaaaaaattaaatgtgctgtaagttcatcctcaaatgacccaagccatgcttcaaaatttttgcttattttttctgcggctttaattcgacgagaaatgcacgaaaaacacattttttgttcgaaaattttgtgttttaacgcacttattcgaacttagaaatgcttattttggcgtttcgtgcttaaaaatgcttattttagaggttcgcccttaaaataagtttttgtacttattttagcgttttatgcttattttcgttcttatttcgcgatttttgggaaacttattaacaaaaatgcaataaaaatgataaatacacccctaagaatcggccaaaaaaatttcggaaaaatacacccctgagaattgacctaaaaattttcaaaaaatacactcctaagaatccacccaaaaaatttcggaaaaatacgcccctgagaatcgacccttaaatcctgaaaatttctaaatgtacttcatttctaactgcaatcagtaaataaaattgtttgacttaattttaactaatttacatagagaaaacagcaattttaacaaatttcacctctacatttggaattttttcatgcttattttcgcacttatttcgcgcttttttcgcccttatttaagcacttattttggactttttcgcgcttaaaaatccgttccctaattatgatcatgatcagagtttgcttcaaatgattgtacatataaaaaaagcagattctgaagtgtcttaattcactttttggaagcattaaaaatataataaaacttgaagattaccaaattcataaaactaaagcatacttaatcatcagggcccggctttatatgttttacaccattttttttttgcgaatattctattgcagaaaagcttaaaaagagcattttatccgggtttcttatcaatcagcgcgattttttagtgcataaaaatattttggacttttggatcataaaaacttattatttttggcctttttgtggtttttaacaaatatttgtggattttttggcatgtataaatccgggcctgggcctgttcataatgcattttacggtcatattattatttttttggcccggcaataagcaataactttttacacacgctcatttaaataatttagtgactcacatcaattaacaattgcaattaggtcaatcaataaataataattgcaaaacgtaacacttaccaactttcttctctttcaaagttttttctccaacttttgttgtcctgttccgtcttctccgatacatccgatgcatttttgtttaatattataataatgttaaaatttttatgcgaatatatcgcatcgcacgagaaagccaaaattacattttcctcagaacaattttaaaattagggcgattttgtgtcaattccaaactacggaccgaatcctgacattggcttcgaagaataagtcgagaccgagacaagaaaaaaacatttggataacagacaaaataacaaacgattttcatttattgaggcatgcataattaattcacgagaaagaaatcatttcttaaaaacattcatatggcggataatttggtggatcggttgaagctgatgttgagcacgggcaacggggcggacattcactttttggttggccaaggagaagaaaaggaggcgagttggcccacaaaagaattt

SEQ ID NO: 9891 - DNA, 1474 bp, Heterodera glycines
  unsure (1)..(1474): unsure at all n locations
aaaaaatgctaatttcncgatgttggataccatttantaactcacaaattttttgttaaaatagttttttattttgaaaattctaaaagattcgttttgccgtgagatttcttttgaattttttgtgtttttccattctccgacaacgttttcttttacttttataccactttttttcgcgatgcgctttttcaaaaaattaaatgtgctgtaagttcatcctcaaatgacccaagccatgcttcaaaaattttctttgaaaaatttaaatgtgcaatttaattgacaagctacctttttaattatattagttatttttttaagttttgtttagtacttatgtcgtttattatttaatcaattctctttaatgcccacatttcttgtgccaaaacttcctccggcgaaaattaataacaaaataaaaagaaataatttaaattgaaaattgtgataaggacgaaaattcattttggttttaaatttatttgccgttttgttcttaatttaatgtttgtgaattgtttaattcctcctctgacttggggcgttttagcattcagttattattagggcttccatttttatgtaaatacatattttttcctggcttctccttgctctaaatagtaggaaaaacactttcttttttgtatttgcgaacaaaagttgggacttttatttacatatttttacatttttcgggattttatacatatttggtacatattttggactttttcttacatattttcattttttctacatattttgagaatttttgaaatttttttagaaattacttgtgaaaaaataaaaattcttttttttttgaaaatatacccctaaaaatagcaaaaaaaatttttaaatgttaaaatgtgattctaaacctatttaggtcatttttatatttaaggtttttatacatatttcttacatatttcgggatttttttttacatatatatgtacatattttgaccactttttgtacatatttttgacatccctagttattaattatattcttgttttattgtcgtctctcctcctgatttatttgtggtgtttgattttaattggaaataaatagtgagtgttatgtttggttttgtgtttaattgattgagcagcgaaatattagtgccccaacgatccaattttctctacaaaatatccatgcccattttccgaactttcataagtttagctcggatttccatttttgccaatgtaaattttaggttactaccagtaccgccggtactagaaaaatgggtaccgtacttcttattttgaaaaactggcttctactctacttaaacgctaattaaattaaatcaaatcaaatttattcggcattttcaattaaattaaaggaaagactcgttctcttctgttgatcaataaataaaattaaatttagaagcattacactttttgttgtttacgacttgtcaaggttaggcact

SEQ ID NO: 9892 - DNA, 4384 bp, Heterodera glycines
tgaaggtggtcctgccggcgtccaccttccaacgcttcgcgctgatgcagtgggggcgtcgtcggacggagctgaagaagagggctggttgggagcgtcttctggtcaggccatccctgacgaaggaggagctggaaattgaacgtgaacagcgccaaaagaagtggatggaatttggacagaagaaaacggatgaaaacatcacgacgcgacgcggaggcaatgaaaaaacttttgaggtcacctccttttttaaattgtttatatttcaatgcacgaagtttggcgaacaaattggacaagttaaggtttttgttattagaaaataggtttaaaatcattgctgtatctgatttggttgagtaacaaaatagaaaaccctcaaattttggaaaatctcccctattctataataagatcagatagacttaacaaaaaaggtggcggggttgctttcataatatcgaatttaattacttttgaaattatcaaaactacaaaaaacaaaaattccgatattctttgtgttgacctattttcacctcttaaccacacaaaaatacgttttattttggtctatagacccacctcccatgaaaaacaagaagatttcgaaaaattggtcgaacaactctctgttttagtctcggcttctgaaaaatgcattttgttgggtgattttaattttcctcttttaaaagcaaaagactttagcatccaacattttgaaaaaagaaacaatcaccttgaatcacttttcatttcatttttagagggatataaattaagactaatggtcaactcccctacacggggaaacaatttattagatttattatttacaaacaacgaaaatctattgaataatgttatagttgaacccccatttggtaatagtgaccataatgcaattcaattcagcataaatttacaggttaatagtaatgcttcaaaaaaattttataatttcaaaaaagcaaattatttgaaaataaatgccatactctcaatggttgattggaatttatttttttctgattgcccggacatagagcttatttaccaaaaatttatgtttttcctaaataatttgataaggaattatgttcccatacaaacaacgaaaaaagttgaaaaactaccagaacatattttgaaactaatcatctatcgtaaacagctttggaaggatattcacaaagaccatataaaaataaaattcttagaagtttcgaaaaaatcgatgtagaaataaataaattttataaaaatcgcgaaataagtttttgcggactttggactctaaaaaacgtttccaatttataaattctttccttaagactaaaaatactatgatacctgcatttactgataaaaatagtctgattctcttctcagataaggaaaagtcgaatgcattagcgcaacaatttttttccgtttttacagatcaaaatttagaacaatttcaatgcatagaaaatcctgaaaaaaatatcgaatattttaacataactccatatgaaatttatttttctctttccaagctttcaaattctaacaacactagtattgatggaattcccaatatttttttgaaaaattgtaaagaaaatttagtccgacctcttttccatatttttagtttctcatttatgactgctcaaattccagaaatatggaaaaagtcaattatttgccctgtcccaaaaattcaaaatccggtaaacccagtcgactttcgtccgatttccctgctatgttctgtttccaaaatttggaagaaaatatagcaggaaaaataaaaaattttgttgaaaaaaataatttgttaccaaattgtcaacatggttttcgtaaagcacattctgttactactcaacttcttgaagtggtggatgatttcagttttgctttagaaaataaaaaatcaattgatgtaatttattttgatttggctaaagcattcgacacggttccacataaccggctaatatctaagctaaaaagcattggtataaataattccttattaaaatggattcaaaattacttagaaaatcgaaagtttttcgtcaaaagcgggtctgatttctctgatgaatatccctgtctcagtggtgtgccgcaaggctcaatattgggaccacttttatttcttatttacatttacgatttaccaaaattctgcgaaactgaaaatgttaaaattaaactatttgccgatgatcttaaggcctatcatgttctttcaaatatttccttttctccactccaaaattttattaacaaatttaatcaatactgtaaatttaacggccttaaaatcgcttcaaataaatgtttaactttacatttaggacacaaaaatcaaaaaataaattattttattgatgactttcaaattcctaaaaatcccggaaacgaaccagtcagagaccttggcatttattttactaatgatttgaaatgggcacaacatattgacattatctcgaaaaaagcattacgatctgctttcgctatactaaagtcaatcaaaactcgtgatacgaaaatacttgtaaatttgtttaatatttattgcagaccaattttagaatttggatctccaattttcaatccttatttaaaaaaggatattgaaaaactggagaatgttcaaaaaacttttttgagagtaatatttagacgtaacaattatactgttgatttacctaattatgctgaattgttaaacatttatgatcaaaagtcgcttgagagtcgtaggttaaaaatagacttaaaactttttcatgaaataattttaggtaaaataaatttacaaaataacgaatccttttctttttccaaaaaccctgtaaaaaatgaattcattataagaacagcttattgctcaaccaatgctagatacaactcgttctttattcgaacctctcgtctctttagacttttacctaaagagacgagattactaaatccaaatgagtttgccaaacttcttgaaagatctgatcttaatttgttgatttctttgccaccccaactccaaaagtgaccaattgattgttttgacattattatttctttatttttcggcgtcacgcttctgcgtacttttcgccgccataattaaaaaatcccgaaaaatttttgcaattatagttaaaaaaccgctaaattatggtacgattgctgaatttgttttgagtcttcgtataactgattatttttgaagctgatgtcggccatacttgtgcatcttagattaataaaaattttgacttataaattttttttacgcccggaactcaacccttcctttatattcggtaacattttgacaaaatttttatttaaaccaatcagattcgcctttttcaatcgttccttcttttgtatccattgccagaatttactgatacatataatttgcataatacaaagagaaacctatctttaacttattttttcacttcgcatcacagtttcagctgtagctataacaaattattgaaaaataaaaaaaatttttaaatttttgaaaaataattatgggagcgaaaaggacattttcctacgggcggcgaaccggccgcggcgaaccgggcggttccctaggaaatgcagggcccagaactttcaatatggaatccaagtccaggtccaggttttttcaaaatgtcgaacttagctattcttcatcaaaaccgtttaggcttttacactgtttttcctcttatggaccaaagcatagaatcaaaactgaatgttttaacaatcggagaaggaattttgctgccacttcagaagttaaaatcagcaaatgccaacaacacttcactcaactgcgcttctttgaaaaattacagattggttgcaccgtaattaatcactgctgatcagtgattattcaataattactcaaaaacacctatgaaattcgatttcactccgttcgttcctttgtcccgtccccctcttttgctctttcggtgccttttccctttcggggattgttcaaagctaagtgtgtcccccccttcctttggcttttagcttctcaaaatgctctttcatccatcgccgtccgctcatttaatgggccttcccccgagggtaatcaaatttctttctttttccgactttcaatgagctttttccgcattttctgacaacatccatcaattgtttcactttcattgttctcatggtcctgcaacttttgaggaaacgaaacgatttgacattaattgaccattacaaaattatgtgaaaagcacatttattaacgcattgatatatgtaaaacttgttcgatttaataccttaaagctaaagtttttgtcaaatcccaccctcttctgccctccctttcccc

SEQ ID NO: 9893 - DNA, 1563 bp, Heterodera glycines
gaaagaagagagaatgtccgcggggcaaaagggagggagaagccgcggcaaaagcattttcatttcagagaggcgacttcgaacggcgaatgttacgcgccttttctggccaatcccttcgtgaacatgggcatgtatttggcctattactggaccacactcgtggccatgttaattctttacaaggcaaaactttttcatttattttggtccaagttgctttaagggcattcacaaagcggcaaaaaagttggagaagcgaagccgagcccgagagcatcggcacattgcacttctgttaacgcaacgattgggcacacaggtgatcagagaaaaacaaactgatgatcagaggaaaagagactgataaagggaaaggggcgactgataagggaaaagaaaaggggactgataaaactgatcagaggaaaaaagagaaacgggggaaaagagaggatgatcagactgacataacagaggtgaagggaccgacaaaagcattactgatcagcttttcagtgacaaaagttttggggaagaggcagtgacatgagaaggaaaaagcaatgagtgtgaaaatgaaaaacggaggcattccatgacgggaaaagtcagtgagtgagtgattttgcattggttgaggtcggagtcggtttgatgcttcacgcgaaacgataccaagaggaggcgaggcacgagcagagcaaacagcagaaactgacaatgcgatttgaagcgaaggacagcggatacataacagcgaatacggtgggagtgtcctctctctgtttctctcctccatctcactctctttctcccgctctttctctctctttcctttctttctctctctttctcccgctttctctctctctgtttctctcctccatctcactctctttctcccgctctttctctctctttcctttctttctctctctttctcccgctttctctctctctgtttctctcctccatctcactctctttctcccgctctctctctctctttcctttctttctctctctttctcccgctttctctctctctgtttctctcctccatctcactctctttctcccgctctttctctctctttcctttctttctctctctttctcccgctttctctctctctgtttctctcctccatctcactctctttctcccgctctctctctctctttcctttctttctctctctttctcccgctttctctctctctgtttctctcctccatctcactctctttctcccgctctttctctctctttctcccgctttctctctttctctgttattttttctccctcttttctttttaattgttcgtcgaccattttcagctttccaccaccgattccgctgaacggcggcgcagttccttctcaactttggccaaagccgttcaaagcactcagagattggcacgatttcgccgctatggcgcgacttttgcatttcgcagcaaatcagccgctttggaagaaaaaggcacgacggaaaagaaaatgaaacaataggaaaatggggcacagcaggtgacagaagagaacagaaa

SEQ ID NO: 9894 - DNA, 2409 bp, Heterodera glycines
tgttcgtcacataataagttaaatttatttaaaattaaataattttttgaaaaattttagatatgcataaaattagcgctgatcaagcagaaaatgcgatccaccaggaagaactgattctgatcgaatagatttataattagcaattgaatgaaaaatggatttagctaaaatgtttaattaattaatatttttttaaaatttccatagcaaaaaattggcaaatattgcattccgtttttaaattaaattatagttcattaaaaaattctatatataaatagaaacaataaaattgtaaaatataacttttaaatttattactgttaaaaagagccccaaaaaatgatgaaactgttgttattttttcttcttcctcttttttcttggcataacgttttgggaatttagtagccggaagaagtgatacaactaaaggatatcatttgcatttgccatgataattggccaacctatagatgatgtaaaagcgatagagaattggacatacaatcagatagattatttgcatattttaattacgtgtataaaattgaatacatataaacaggaagcgccaaaaaatattatacatacacataaaaatttattttaataggcattaataaatttattcgataaatatataaaaaatattaaattaataacatcaaaaaatattatacatgtatattatcttttataataggcactaataattttatgcaataattaaattggattaaattattcttgtttatcaatattttaattcaggcaaaaatatgacaaataaattctttattaaaaatttaatttattaattattatttattaataattattatattatttattattaaattaatatcaatcttcctaccatacataatattattattaaggaaggtaaaaaaattaatattcaacaaaacataaaaaatttcccctttaaaaaaatgcataaattaaaaatatttaaatataatgtatttagtatatataccattgccaatgttgctgctcagttttgggttgatcgttctgctgtttgcgtgtgccaattgttccacggaaggtggcacaaccgaacatccgtcgagttcaccgccgccggcgactgatcggaatggagacaaaccatcgccagtacatccggtactgaaaaagtttactaatgcgcgtgatgcagttaagaagcacgtggaggctgctcagtaattttatttaaaatttattttttaagtaatttggggttattttgcatatggacgaaactgtcccagagatttactttttcggcaataatcccaccaatggactatggcaccacctttctcggcacaagggcagtccataggtgtcgggttggcttagacggggaccacatccccagattgtcttacggtggccaaaatttttttttctagggcttagtatagatttcataaaaattacaatttaaaaaactacaaccgaattttgctgtttttgactatatgcttttattattaataaattattaatttttcaactgaattcattagttattaaattaatttttgatagaatttcttatttaccaaaatagaggaaaaattattgaattctgaaatatattaaaatttaattttaacagcaaagttgtagtgccagcagtgaacaaatactttgacaaatatttgctaccaaatgccaaaaaggttggcgaaacggcaacacgtggcttcagaaattttcgccgaaaatttttgcgtccaactgtcaacaatgttgttgaacggagccattcattgggagaacgattggcatcaatgaagaaatgggaatcgtcggacgatgaggagacggaaaagcagaaagataaaggaggggaaaaagaggatgaagagaaaaagaagatgaacggcaaaaatgataaaaaggaagagagaatgaaggagaacgaacatgcgaagagacatggtgagaaaaaagagcatcatgcagagaaagaggggaaggaagtgaagaagcacgaagagaaagaggagaaagaagagaagaagcacgaagcgaaaaaagagcatcatgcagagaaggatggaaaacctaagaatgaagttgggttgggagaagagaaaaagcatgaaactaaaaatgagtttgaggaggaaaaggtgcataaggagaaaagggagcacgaagagaaaaaggagcaagaagagagaaaggatgaagaaaagaagaaggagtgcgaagaaaatagggagcaggagcatgataaccatgaagcgaaaaaagagtcaaaaagcgacgagatcaactcaattgaggaaaagcttaatgtgagaacattaactgagaatgggatgagaaaaccggaagaactaaacgatgagatggagatatataaggagcaaaaagacg

SEQ ID NO: 9895 - DNA, 1642 bp, Heterodera glycines
  unsure (1)..(1642): unsure at all n locations
atcaattctatgacgcgctgctatcaaaattttttattactagaaaaaaaatgtatngcatagacttataattttttatgcattcatattaacacactatccttaaaaaatgagagataaacaaaatgaacagatagagaatacagagaaaaagatacacataatttttatctcaaaaatttctcttattttgacgaactatctaacaattttcatggaaaacaatattttagttcttctataaattttatttctccgacagatttttgttaaattttacgtacctatggagaaaattgttgcttttccgtttttttaaaaattcaaataaaaaaaatatatatttcaaccaaaggcgcgtggatgctaaaaaaaccgccaaacagttattttggaggcataaagcaacaattcatgtggggcgaggggagatcttaaactttccacccactaggatatccatttcctcagtttgaggacatattaaaagttttatgtttcttaattatggatcaaattagtccaaaaatttccgtatttttcgttttttgtttcgtacgaaaacagttcttttttcgtttccatgtttcgttttcgtccaacaaaaatttttcattatgttttagttttcgaaaattatttatttttcttttttttatcctcacaaaaaaaatcctcacaaaataggcaaaaaaaattatattaacgctttttctctgacaaacacataaaaatttaaaaaattataaatcttgtgaggttttttagtgcctattttctatttttagtgcctatttttgggttttttagagcctagagccgacctattttggcagtttttagagcctataaatcgaagccctaatttattacatttttcatcgtatttatttatttatttattttttttcaagttttcgtgtcaataaaaatctcattcaaaaacgttatgtacagcatcgactaagtatatttagattatatttaatatataaagcaaattggtttctcattaatagaatgctcattttgcagcatatgctttttttttgctaacttggggcgtgataataagcatgaaaagcgcatttctaacttggtttgaggcttctaagtccacttttttcatgctgattttgctgatttctcgattttttaatttttgtgctgatttggaatgttgtgcttttttttgctgattggcattgagcaattttttaaatattttcagcaattttcaaaaaatttattaacaaaaatgcaataaaaatgaaaaatacacccctaagaatcgatccgaaattttctgaaaaatacacccctaagaaatgaaaaattttatcaaataattcatctgcaaaatttattttttgacaagattttgattttttaaaattatgtatctcattaccatttttagcacctattttggaggttttttataatcagggagcaaataaatgttttttttgacgacttttttcaattttttggtgcctttaatctcttaatttttatgcttttttccaattttttgtgctgattttgcctttttggtgcttttttcatgcttattttgtaaaatgtggtgctgtttacagtgcttaatcggtgattttttgtgctaaaaactaaacactct

SEQ ID NO: 9896 - DNA, 918 bp, Heterodera glycines
tatattgaaagataggaattctaaataaatcccataaaattctcctaattttttgctatttttcaaactttattccactaaatttgaccaaaagcgaagagagttataaattttcgaaatttcactggattttccagggcccaaattgtgacgatttttcaaaaaattttaaacactttccaaaaaatctgaaacgcaaaataaagcgtatatacgtattcagcacctcaaattatgccataaaaatgcattttggctaatttaggagcaaaaaaatttttcatgaaatgcaaaaccatggggtcccccctatggttttgagtttcaaaatcacaattaatttaataactttttttaaactcatggtaaaaacatgagataaagcacattatattgggcttaaaattctctacaaaaaagctcttggacgatttttcgttaaaatcaacccctgacgagttattgcgccagaactgaaattgaggcctagcaaccaaaaattttctatttccaaaaaaatttttaaaaatttttctgaaaatgacaccaatcgatagagcatgaaaagggtgcacagttggctatggtgtgcatgcgtggtttggtaatatatggccctcatttgttattttaaaacatacaaaacattatcaattgagttctgttgctgtggggaaagcgcttcgcgctcagggacgcggcttcgccgcgtcgctagaaattgatgtaatttagcaattcatcgcagcctcaggacgggcgcttcgcgcccgtttttaattttttgggggatattcggccgcttcgcggcctcaggacgggcgcttcgcgcccgtttttaattttttgggggatattcggccgcttcgcggcctcaggacgggcgcttcgcgcccgttttttaattttttgggggac

SEQ ID NO: 9897 - DNA, 3245 bp, Heterodera glycines
tcggccgcttcgcggcctcaggaccgggcgcttcgcgcccgttaaaaaaaaattttttgcttgctttaaaaaagtttcaaaaaggcattttccgtatcaaatacccatattttttttagtcttaagatatattttgcaaattttgttacattaaattagcatccctaattattacttattttctttttcaatttaaatttaatgaaaaagtattaatcatatttatgaattgaaatcgaaatcttgttgcagaatccctgtcaaataaaatcagcgattcattgtcttttaaacagaaactgaaaccatcaaaattttgttctgttcaattaatagttttttcgagatacagtgaaaatgcaattatatttattaattcaaaataattttttttgaacttcaatttttgatggctaaattctcataattttcctatgtgatcaggacagatcaaaaagtgtttgattaatataatttcatatttatttttaaaacaaacaaaaatggcggttaagattacaaaatttagtttttattctttttttgttaatttacacaaaatattaagcaaaaatttgtatttttttaacaaatattaacagaaagcaattaaatgatcaagatcataaatcttttgttctgctgaaatggccttaaaatgagatttaaataatatttttacttgcttttaacatatatttttaaacgaacggagtgtaatgatcgattttttttttgcatttttatgactttttttgtgtttttatggcttgttacttcctgatgatttaaatttattactttcaatcctactaatgagttactgttttttttgctaaaatattatttaataacaattaattagtgcgattgtgagcagagcttcaaccacaaaaatcttgaaaatattaaaaattgaccaaaaacgaagagagttatgaattttcgaaattccgcttgatttttggaggcctaaaaattgacgatttttcaaaaatttttaaccaccttccaaaaagtctgaaacgcaaaataaagcgtatatacgtattcagcacctcaaattatgccataaaaatgcattttgttctgagctcttaaccatgtctaaagtaaaatatgtttgcatattcgtgatcagtggcccaaataacccctaaaatcatatttttggaagatttttggtgaaaaaaattttccactcaaaaatcatggtcacacccctgtggtcccaaattccaaaatcacttttatttctataacttttttcaaaaaagtgataaaaagctaaaataaaatttataaaatagagcaaaaaattgcggattttttgagtttattatttttataaaatactttttcagaagggagttaggaatttttttctgaaaaatcgaaaatttccagaatttctggaataacttttattgtttgcaagatagaaattccaaataaatctcataaaattctcccgatttttctatatttttaaagctttattacactaaaattgaccaaaaacgaagagagttatgaattttcgaaattccgcttgatttttggaggcctaaaaattgacgatttttcaaaaatttttaaccaccttccaaaaagtctgaaacgcaaaataaagcgtatatacgtattcagcacctcaaattatgccataaaaatgcattttggctaatttaggaacaaaaaaattttcatgaaatgcaaaaccatggggtcccccctatggttttgagtttcaaaatcacaattaattttataactttttttaaactcatggtaaaaacatgagattaagcacattagattgggcttaaaattctctacaaaaaagctcttagacgattttttgataaaatcaactcctgacaagttatagccacagaactgaaattgaggcctaccaaccaaaaattttctatttccaaaaaaattttgaaaattttttttgaaaatgccaccaatcgatagagcatgaaaaacggttgcttgaaagtggtctccgttttccccggaaaaatctgtaaaaaataataaaattaaaaaacggaaaattttcgagggggcctagctcgaaaatttctgacaatttctgaaatccaaaaacatggttggatagagctcgtcgagctgtacaaaaaagccgcttacaccgacctcctccggtcaaaccccggcgagttattcggccggcgctgaaatggccaaaaaagtatgcaatttttgcgcagtttttcggaaaaactggtaggccctacgaggtcggtgaagagcaaaaagttgtgccaaacctcccaacttgatttcctatcgaggccgatttttcatttaggactttaaaaaatttttgaatcccaaaaacagcaaaaaaaaatttaaaaaagccgtttcagcgccgctggcgctcagttggccctcggaccggaatgcctatagttttcctggatgcgccgtcaaaagttgcccccaaggtcgaaatcccgagtccctcccgccagcggttcccgagatttttgttttagcaatgagttcatctgtttctttagtagtatataaactagggtgcccagttggctatggtgtgcatgcgtggcttggtaatatatggccctcatttgttattttaaaacatacaaaacattatcaattgagttctgttgctgtggggaaagcgcttcgcgctcagggacgcggcttcgccgcgtcgctagaaattgatgtaatttagcaattcatcgcagcctcaggacgggcggggcgagttcgattgtgaaaattttggaaaaatgcctatctctttttctgctcaacactctagacaattccaaccccatttacggaatgatagcgccaaccctaatttttccggaatttctttctgggcgagtttgattttgaaaattttggaaaaacgcctatctctttttctgctcaacactctaaacaattccaaccccatttacggaatgatagcgccaaccctaatttttccggaatttctttctggtggagtttgattgtgaaaattttggaaaaacgcctatctctttttctgctcaacactctagacaattccaaccccatttacggagtaatagcgccaaccctaatttttccggaatttctttctgtgcgagcttgattgtgaaaattttggaaaaaacgcctatctctttttctgctcaacactctagaccattccaaccccatttacgcaaaaatagcgccaaccc

SEQ ID NO: 9898 - DNA, 2750 bp, Heterodera glycines
ctttctctctctctctctctcccttcctcttccccatttctctctctctctctttctctctctcactttttcctatttctctctcccctctttctctcctccctctctctctctctcttttctctcttctctctctcctctctttctttctctctctctctcttttctctctatctctctcctctctttctttctctctctctctctcctctctttctttctctctctctctctctcccttcctcttccccatttctctctctctctctttctctctctcactttttcctatttctctctccccctctgtctctcctccctctctctctctctttctctctctcactttttcccatttctctctcctccctctctctctctctctttctctctctcactttttcccatttctctctccccctctgtctctcctctgtctctcctccctctctctctctctcgctttctctctcacctccttccgtcgtttgatgtgttccttagaattaaaaggattttattctccattttattttatttccaatttttcttacttttcccagcactttcatcgcataaattttaccgtctccatggtaccgtaccatgtacactttcccaaaacttccctggccaaccgttttcaaataatcaaaattcgccggcttcactctaaaaaagccaaatttggttattcgtgatcattcgcacgttttcttttccgatggtcccaaaatcacgtggtcctcgtccgattgggtcaacaaaggaccgaaaagcgattggacatcacaactgaaatgtgaattgaagatttccccctcctttcctgatcaatcctaaatttcccctccttttctgatcggtcccttttctttccctcctcctttttcccacttttccgaatgattcgccaccaaatgcgtgaccaatgcttcggcccaattctttcgtttttccatcaatttttgttctggcacaaggaatttcttcttcggcatcttttcggttccctgaggcaacaaattgcgaaagtgttcaaagagttgttccaattccgtcaatgttttaagtaccgtacacccttctttcgtacggaactcgaaaatctgaaatgggttacgataatgaactaataatactgtaaggccattttcgccttaccgctgcgtttttctcggctccccccgaattcgtcggaccgatcacagcgcattcgatcagcggacgttcttcaatcatttttaaaagtttcgaattatttttcactgattttcttgggaatgttttcttatcaaaacaatttcaaataatttattaataaatgttaatccaaaataaaatattttattttctgaattctcttttccccttaaatttggggtcggggtcattttggcgcagacaagtttaaagattcataacttttttttaattcgaccaaataaaataatgttgatattaatcaataggtctaaatatgctttattagcctgcaaaatttcaaaaaattatattaggttttaaaaaaaatatggcgcgctgcgccaaaatggccaggaaaatgcaattttttgagattttttggccataacttttttgtttctcatctaaattttttgaaactttgcaggttaataggcactatcaagccacttaaaatcataccaagattatttaatgttgctgtgaaatcaaaatgatatagagtcttgcgccaaagtggccggttcccttaaatttggcctttgtccgcccagcgaaatgcaaaaattatttaatgtcataaacaaaatggcaaaatcataggataaaaaactgataaaaagtttttgttccttttttgttttgccggaagaattaattcaataaaataataatttattctcactaataaaaaattttcttatttttaaaatataatttcattttttattgggaattcgtttattttctcattgaaattagagaagaacaccattcattgatctgactgatgctttaattttattgtcaatttttgtttcgatggtcccattttggccttatcagttgccaattcgattctttgcattgctcggcactcactgcaaattcaaaaaacacggggaaatctttaggattttcaaaaatttagcattttttaattttgatcgatgaaaggaaattcgaaaatgaagaacaatcagttggacaaaacgtttattatgagaagcaagtagaacatctgatgagaaaatgttaaatgtgtgcacttttctctcttttttttggcactttccgttatttcttttgccttttcctttcgtttctccgccgcagcgaatgatcagccgaacagcgaattcagtgaagtgttttggtcgttcatgaagagcggacagtacgggtcattctcctcaaaaggggggtccaacgaaaggaaagaatcgcccgggggcgggaagaaaacgccgccggggcccacggaatttgaggagacggcgtcggggtgctgagaaaatgggaaattatgggaaaagcgaagcgaaggaaagcaccggctgagaattggcgaagagcaatttcaacggcgaaagcattctctgctgtttggagggcgaccgaagctcattcgacggaattttgggcccgcaaaagcctaaataaatgctcataaattgacatttcaagcaattaaaattgctttgtgtccccaaagagtcaatcgctttggtctcctccgtttccgcctaaaaacaatttttaaa

SEQ ID NO: 9899 - DNA, 1549 bp, Heterodera glycines
ctagtcccggtcaaaccaggaccttggtactcagttgtccgcttccaggtcccggtcccgtggcactctaccttaaacatttctctctataattgtcaattatttttatttttcgatacagtcgaaaattgaaaataaatgcaatttgacttttccgtctgccaactgaccaataaacggcgtccgtcgggtcctccttggaaagtttcagtgctgctgagagtgcgttggttagtgcgtccaattcgctttcgcttttcgcgagttcggcgttttctttgctcagcgattgaaaatcggaggagcacaaaaattcgtcatagtttctaccaattaaaataataagtgaaagcccggttggtttcgcatttcaatttttagtcaattaaagggcggctaaaatttcgtgtatttctacaaaaaattagccatttttgcaaaatggcgacaatgccatcattgctcacaattagtgttggctccaagaaaggtgcccaatctttgtttattaaataactaatttggaagacacgataaaaattgaagccgccaaaatggccaaaactttgtccccccccccccccgaaatttacttccatcgaatgctgtttttgccgaccttctcaatcaactcaattcctaaaaagagaaactttttggtatctctttccctttttaccttccaatacattcgttatgtcatataatcttcgcttttgaacccccagcaattgggcggcttcgttcaaattcaaaatctgaatgaatttgagggaacggagaaacgaagaaaattcgcaaattacccctccttttgtgtgcaattcgagaaaacgttgcgtcaaacgcaaaagcgaactgtcctggcgagaaggatcttctgaaattccttttttcgagtctttgattcggtgatttcgagtcgaaattgcgcccctccgttaccatccgacactctcccgcctctcatcggcgtgtcggcgtatcttttgctgctcgctgctccttccgatttgcttaaatgttccaacaccaatttccggcgacactaaaagcatttgcagttaaaaaccacaaaaaattaactttgaattgtggcgtttgaaagtttttctggtcggtctgaaggtgaacaaaagacggactgccgctttcattggccgcattttgtgaagggattggggaggaaaatgaatcgaacgaagcgaaggatgggtttggagggacggaagaggacgaagacggggaagaaaaggcaaattcagtgggacgaaagtccattcgcaatgatgaaaaatttaataacgaataagaattaaaaatgtaaaattatgtcaggtaattaacatgaagatcatgcacaaactttaggctcgattgcactttagactttttgattttttggacaaaaaaattaattaaattatccatgatgcgcaacgaagtcgaacctccgccgccctttgtccttttactatcttacaaaaaccacttcgccacaagtgcaaaagcttttttcttaaaggagctcatttttattgtaatttat

SEQ ID NO: 9900 - DNA, 4290 bp, Heterodera glycines
cctatcgcttccccgcgagcgctcgtctctccaattccttccttcctttcttttttgtcttcctctccgattcacccactaaattcccctcttttctcctctccttgctttcccattgtcaaactatttccctcccatttctctcccattctttcgttctttcccacatctctccgattgtcccactctttttcgctcgtctcatgcgctcccgttggctttccgctgttgtgttagcacgcgctcttccttcctcgtcctccttcctccactgctttcccggtgcacttactcattcctcctctcccctccctttctctctctcatttgtcccctctttcgtcatttgcttttgccccctcctcctccgctcctctcaccctccgtccccaatttccctaaccttttctccatcccatccattccccctcttacttagtgttgttggaggaggaagaggaggtttgctgctgcttctgctgctgctgctctccctccggggctggtggcttctttctttcttttctttcctctcccttttcgttcgcattcccccgacgccgccaagcggtggagagttttattccattcatttacatggcatgggcagcagcagcagcagcagtcaccgacctaccgcaccggtggtgttggtttatcaataaatagcatatatttcactcgtgtaaagtaatcattttcggcggggcttgcgacggcgacacaaacactttttggaggagtttagtcggtcggtcggccggcgaaccgtcgttgtcaatgctcagcgaatgcgtgttgtgaaatttgcgtgtgtttgttgcgccattgtttattatttgtttgcacaccgtaacaaaaaataataaatgaatgaaaagtgtatcgcacagcagcagcagcacacctatcactcactcttttctcatcactcaccgactgatttttttgtgatttttgcccattacgatgaaataaaatatatttggggacgacgacaaatcgatcaactgtaataatgcacacaatttaacatttggtccaacaaattggccattaatttgcttccaaattaatttatcatatttaaaatatttattaattacctacttattattgtttgtttttttaattacctaatttgctttatggctctctctctaatgagtgttgcatcgcctgctaattattgcataaattttaaaattcgaaagcgaatgggacgggtcgctttttaaattttttttagtgaattttactgtccttttgttttacgttaatattctcccccccctcccaatttttgatcctttcactatttcacacttcctcaattatgtattttatcaacaaaaaaggaggccgtcctcgtccctcgtacgcctcgcccttcccttcctttcgtcccctcccacacgccattttcatataaatttatctccctcatttgttaattttgtcgtccgttcgctgccttcctccgttcactgatcactgatcacccaccgccccatctatcgcttttatcctttttatcccccgcccaaaatatttatcaacatcattacttacttacttacttaagtatcattaaacacacacaacttttcatcatcataattcgctttttcctcttcttcttcttcttccatttccccattgattttctctctttttttgcttttcgctccgcaaaaattcgattaatttccctccaatccctccgcaggcgctgttttgtgtttgtgtaaatttctcagccagccaacaacgcacatcaccacacaaccaccaccaccacgagcagcatcatcatcacaacattttagtggaatttgtaactaaactaagagttcatcatcatcattatcctcccctttttttgctgtggctttttgtcaaacggagcaacaaattgaatttaattgcctctcattagcacagtgtgcccgaggggaaattgttgtgccatatcagtgaatgaatggccaatgaaaacaacaaaaataacaaagcccaaaaaacgactccgacccaacatttgtaagcttttcgccaatattagcaacaacggcagtccgtcgtctggtggtcaacggtgtcgtcgttaatgagcagtagcggcgggtcagcaacggccggcggcggtggggcggccaacgacggcggagtcgcgtcgctggaggattgctacacaaacatttttcacattgtcgggtttttaaattaaataattttaacgttttcaaaaaactcaatagtgctcatgagaatggttatttctaccataagttttcttcctatttattttttccacattttcccgtcagtgcttatcgctactggcggccaaaactggtaaacaacatggtacagtaatttccgaccagttttctcatattttcaccacataatttgcttcatggtccaataaagttttatttttagaacccaaaatgctaaaaaaaaattttaaaaaacttattttaacctatttggcgttctgcctattatactgatttggcttaattttgttgctttttggaatttttagcacctaaaatagcatccctactgataaatcagaaaacttaaaaatgataattctttacttgtaaatttacacgaattattttttaaataataataaaataattcttttttgcatttaagactgagttgaccggcttgaaatggtgctgtttggccaattcgtccgaccaaccgccgcatcaatcgcggcccgtttccgccgcggacagtgccgccggcgccgcttcgtctgccgccggtgcgccacggtccgacgcaaacgccgccgacggtgggaaatgggcaaaatcaaattcagaagcaaattagggttcgcaagtgcctttattttcaaaagtgcccttgtaaaattgacaaattttgtacaaaaatcggtgcaataaattcgaccaaaagttctccggcgctgaaatcctcaatccagaaaaaggtaagttatgctgtcacaccccaaaatttaaaaaaatgagaaaaatgcgcgtaaatttcatataattgttgagcgttaaaactttcgattttaaaaagtatattatacccagaggatttttaaaattttatttgttcctctctaattcacaaatttggatccttttgtttctattttgtaaaaaaacaggtgctgaattcataattattctaatccatttcatatactttttaggctccgttgatgaccccgttttgcgtgcgtacgcccaatgcgttgcggacggcgttctgtgcgcatggcggcgtcggcagcctccgagcgccgccgcggcgtacgaaagtccggtgccgaaggcaaacgcggccaaagaattatggctgttttggtactccgtcgacgagcccaaacacatcgagcagttcaaggcggaaggacttgcaggtttcattactttttttaaattggataaatgttttaccttttccattattttcccccaatttttccacaattcgtttgttcccttttcagtgctcgtccacagtgaaattgtcgacatggattcgccgcgtgttgagttcgaatacgaaacgcggactttgtttttcaaggcgttgaacaccgccattgaacgccgtcttttggccgaggtattttagtagaaaacaagatgtgtcgccgaatcgttgcagcaatttttttaattagaaaaaaaatcaagcaaataaatacaaaatctttaattaaaatcaagaaaataaatacaaaatctttacttaccaagtcttgaaaaaaaaatagtttttaaatttttttctagaaattcagcaaattttgttttcagtaacacctaagtttttttaaaaaacttaaaaaaaatttctaggattttttttttaattttttttctgcgacgttttgggggtgcccattacagtaatgcaaattacaacacttataaataggagcaacaataatttagttggcgtcacaaaaaattcaaaaatatctattaaaaaacccaccaaaattgctaaatccataaaaatgtcgaaaaatctgctctttcccccgcagggcttcgtccgtttcggccattggctgtgccgtccgttggagccgcgcggcggcgcactgtcgcgcgacgaccgacgcgccctcccgcgctttgtcaacgccgtccgtttccatttcttcctccaccgcgactcgctcgtctgcgcgtcgctgtgcgtgcagcgacagccgaccattctcagactgggcaatgcacagctgggtgaacagagccgggcacagcccgt

SEQ ID NO: 9901 - DNA, 2784 bp, Heterodera glycines
aagtttggaatttttttaattttcggggcggggtcattcatttcgctgtgcccatgtgcatttggtggggtgcacttcgttccccccgcccactcccgtcgttttacaactattcaaaatcatttctcaaccattttagccccttggtccatccgagccaagctggtcccgggccaacatgacctcctccgcctcgtcgcttcctctcgccccacttccaccggtgacgaattgggcggtggcccttccacttcttcacagccggaagaagtgccgtcgtcctcgtcgttttccgtcttcgctgatggcgcccagcagtcctccccattgaagaaggacaacacgggtcagtttagccttgcaattttaaattcaaattagatcattttataaatttgacaaaaatggaatatagcccccccccatcgaaaatttaagattactttaccttttttgtcctgaattttcatattttcaattttagctgacccggtgccgagcagttcaccatccgtaaaagagacggcggcggcatcgaaaaatggcgaaaatagctcaaggatggcaaaaatttcagccattttcgaccgccaatggacggaatggaagcgtctgtaccacagcctggccgacccaccgccgtccggccaagcccaaacgaccgactcagtgccacattcggcggcaccgtcgccacaaacgaacgcacaggcgacaacagcaaggagtacagcaacaacgacaaacgcatccgggctaacaggttcatcccagaaaagtgtggatttttaaggcattccctaaaaatgggactgtcccagccaaatcgtctttcatggctaattagtgcgcttaatgtttttgcatttaaggccggaacagcggcgggggggacggcgcatgggacgccgcgggtcaacaccaaaagcaacagcaagcgttgccacgacttgtgatggtcgaagtgaacgggcaccgaatgctgtacccgagccaattcgttgctgtgttggcggacgaattgttgccaatcgtacggcgggaaagggcaccgtcggaacaaacgacgaaagaggaggaggaacaggcggatggggaaacggaagcagcagctggtgggtggcaaaagccaggaaacagaacataatttcgccgacgaaattttaaaaaatttaaaacttagaaatttaaaaaaatcatagataattttttcatataaaatttcaaaaaaaaatcatagaaatttttcaagaacccttcaaattttttataaatttcaaaaacgttagatttttaaattttttccctaggcttacttttgaaaaaaaaattacggcggcgaaattttcgggtgcacctcaaaagccaagcggaaaacggttaaaaaaattggattgaattttaaatttttaggtttttgggctcacaatcagtcccccgaaagcaattgtatgggattgaaaatatacaattttaggcatgtccaattctgcttcaacatctacggattcctgtggccaaaccgtgccgaaaagtggccacaacaatgctttgccatcctcctcctccgtaacgcaacgaccgttgtttctgcaccgaatgcgtcgccgttcggccgcagcgattggccaatgcgcggcacggtgcagctttgaggacgcgcttttacgcgcgaggggcagcggcgtggcgacagctgtgaaaagagagctgcaacagcagcaacaacaacaatttcaaaatgtacaacaacaacaacacattacggggacaacaacagtacggacgctggacgagttcaactacgactacgcgaggcgcgagttttgctactgtcgcatttgtcatggtgggagacggaatggaggaggattgggttggggtgcaccccgaaatttcgccgaggcataatttcgtcgccgaattttttttaaatttttggctgctaaattatgtcctgttccttgttttgtgtcatcgggagcaacaaccaagcaaagcgggatatgaatgaatgctcagtccccgctttttcagccccgtcctcaaccgccactactccattagccaccacaaccgccgttgggttgaattcgccttcgtccaccgcttcgacaaccgttgtagcggccggcggcccgctgacaccaacggcagcaaccactgcaattgcggcgcctgccacagccgctacggtgttacactcgccatgcagctgtgctgctcaccctgcggcaccgttccatcatcggcacggcaacgatggcaattatgacccttattcgtccccagctacgcaacaatatattcaagccgttcatgacgaaccccaacatgcgcataaaacttcgtcctcctcactgaaaaaggctgtgccttcattggccactggaaaaagagcatcctccaaattcaatggcacaacaaaaagcggaactgacgatgccgcacataacacccatcagcagcactcttccagccaacagcagcagcagcagaacagatgggcacgtggttgcgcaacaaacgcggcaacttcgagcagttcaacaacgagtgccaccgaatggccaactgtgccggagtgggacctgctcaagacgggctccgtgttggcaaatcgaagaaaaacgcagcagcaattgcttgccctaagcaagacaaaagaggggggacaacaacatgaaattgctgcaacgacggggtaaggggaagagaaaacatggtacagaggccatctcaacccaaaaattatcaaaattcgaaattgagttaaattcaaac

SEQ ID NO: 9902 - DNA, 1464 bp, Heterodera glycines
tcattattattttcttatttgtgcctgctgaggtcctttttaaatcaaaagataaaaaattcatgtaaaatccatgccgggcgatcgtttaaaagtttctgtcccattacccctctcccccccccccacccgttaatccccccaattcaaccggatgtccattttgcccactctcaacgacggggaattgctaaagtaagtgaatccaaactctgtctctctgtacgatacacaacttgctcaaatgcattccaattattatgttttgctttcgtttctcttcataaaatgtctccgttttcaattaaaaattattttacgaaacggcgaaagaaaaaaaagagagaaggaaatgaggggggagcagctgtcaatgcaaattcctcgaatgattaactcttccgacgaacaaaaggaaaagcaacgaaaatcagtgacatttccttttttctcaagcaaaattaaaagaggatggatattcaaagctgtaaaacatttgtgaattttcaatcaaccgatcaaaaaattctctttctctcttcgcctcttccctcttccctcctcctcccttcctttttctcttcctcctcctaactttctttttctcttcatcttccttccttgctttttctcttcctcctcctaactttctttttctcttcatcttccttccttgctttttctcttcctcctcctcccttgctttttctcttcctcccctaccttcctttttctcttcctcttccttccttcttcctctcttgctcttcttcctcctccccccttcatcctctattcctttttctctctcttcctcttcctccttctcccttcttcctctctctctttctttctctcttcctcctcctcccttcttcctcccttcccttttctcttcctcctccccccttcatcctctcttcctttttctctctctttcttttctatattaattttccttctcaatcgtatcaattttctacgctttctttgtagccatgacaagacttgatcctaagcaaagaaagggaggtaagctgacggcggcggggggacgcattgacaaggataacacggggagggggtgggggagttgggggatatgtaaaattccctcttttatccgtcgcttttccatcaccgactcatctttccatccactgcttctctttgcccattttccatcagttaggccagtaaataagcatagcttcgtcaacagctgcctcacaatcacatttcttaaagccatttctgatcactttctttccctctctctccctctctgtccccttctctctctctctctctgtcattattgtcttttctctcgcatcgaccttttttatttcagatcaaaaattttccatgatcatgtaggctcgtccttcgtacatatgaatatttctgctcaatagcccccccccactcaaaattagcccaaataactttgggttctgcttg

SEQ ID NO: 9903 - DNA, 748 bp, Heterodera glycines
tccctccgtcacttcttcctcctctcccctccccttgtcccttcctcttcccccacttcttacccactctatccttctcttcctcctctcccctccccttgtcccttcctcttccccctcttcttacccactctctccttcctcctttctctctcgcagcttccttctctcctcgattgttttacgtatgaaatgtgcgcaagtttgaactgccttttccccgaattttcctctttttattcgtctgtctgtcctttagttgtccccacttccattggaatgattgaatgtatgaaaaaaatggaggggagaaggggaaaggagtaaaaatgggtagagaaaaggtaagaatgaggaaaagtaggaagaggaaaagaaagagaggaaaaagagagaaggggaagggagggaggaaaaggaaaaagagagaaggggaagggagggaggaaaaggaaaaagagagaaggggaagggagggaggaaaaggaaaaagagagaaggggaagggagggaggaaaaggaaaaagagagaaggggaagggagggaggaaaaggaaaaagagagaaggggaagggagggaggaaaaggaaaaagagagaaggggaagggagggaggggaagagaaagaaagaaaggaagagaagaagagcaacaaataaaaggaggatgatggatgataaagaaagaaagaaaaaggggtgaaacaggttgttgaggttgtgctgtgctgggaaaggggtgggactg

SEQ ID NO: 9904 - DNA, 1091 bp, Heterodera glycines
gatagttccacccctcccccttccccccccccacccccgagaattgcctgccaattccgctgtccctcccttacgctagtaataatcacccaaatatagtaaatcatttgaatagtgttttatttgtatctgaccaaaaaaggccattcgtcagcgaatgtttccatttgcgcttggttttgtcctctttttgggttgggcagcagtgaccgaacataaatatgggcaaaagcagaaatggctaataatactaattgccactgctgcccttggccattctctcctttcagaattcccttggccattctccgccgattgttctcccaaatcgaatcaacggaaaatttggtccgcaactgaaaaagtgacgcccatcagaataaaagagtgccagcggcagaggaggccgagcaaaaagcagcgacccaatcaaaaacaccagcaaagggtgggacagatcgaatggcaaacattaaaaaaaaaagccgggattcggaatggaattaggctaaataggtttactgagattcaggtcccgatcgatttgtcaggatttgaatcccaacgggattcaaatccaaatttgtcgggtctctccgatctcggatgtaattttaaggtcgggatttaggattttgccagtaactgaaaattcaagcaaaattttctaaaatggctaactgaaactgaatctctagtacgattgcaggaaaaaagtctttatgccaaaaaaaccgcaataaatgcactaataaatacccaaaaactgcctcgataaatttcgccatttttttcattccagccaaaatgtcggggtctcgatcccggccccctttttaaaaaaaagtcgggatcgggatcccggaaaaatcccaacgggatttcgatcccggccccctttttaaaaaaaagtcgggatcgggatcccggaaaaatcccaacgggatttcgatcccggccccctttttaaaaaaaagtcgggatcgggatcccggaaaaatcccaacgggatttcgatcccggccgggctctagttatttgttcttccccggctgaacccggttaatgaatgtgattagttagtgtttctg

SEQ ID NO: 9905 - DNA, 1129 bp, Heterodera glycines
agaagtgggaactaacccagctcaatttaaaatgatgatttaattttaaattaatataagtttcatcttgccatgaattatttaaatataatatttctattccatttccaatgatcttatgtcgctttgggccttgaaaaagctctcccttttgtctgcattttatattttggtttcttatatttagcaaatgtccattaaaaattatgaattgcgattaagcaaaaatgcagatgagcagtcggaagcattttattgttatttgaagtcagtgattgaagaacggagcaaatgtaggcaaactgtcattatcggattttcaggtgtttgaattcattaccatttgagtgtcttttcgaatttgtcctcatttttccaaaggtggttcgatgcctgcctttttggctcaacagctcgtccgtctctccgaccaaaccatcgcaggtcttcgcctttttccggtagacgaacggcacgtctcagtgaacagcgaggaaagcaacgcgggaacactgcttcgcctgttaccggacaaattccgagaaaatgtgctctcgattcaaccagatgacagtggtaatcaggatggattctattttattttgtaaaaattttggtaatactggagaatctgggctccaccccaaaattttttttgtctgttatgaaaagttcaaccctggggttttcggggcttctgatcacgaatctgatatcagatttgcaaaaatcatagattttgaaaatcatagattttcgaaattgatcaattttttaaattaattattgactgggtaataaagatgatgaatttcttcggttccaaattagaattttggaggaacgagccatgacgtaaagcgcgcttggtgttgcaccttcccccaggcgggcggcgccgttggcagcgccaaacaatgccatcgccagtgctttgcctgcgactttcattcatttgttggttgcaagatgggcaaaacggctgcattgagcgtaaaattccgcgatggtggagaaattcgatggcagattcgttggagcgggtcaattcaaggatttcaaaaatatccatttttaattcagcgtgctctttttcgagtgagactatatacatatgagcagcacaatt

SEQ ID NO: 9906 - DNA, 2772 bp, Heterodera glycines
acctaaaccatacatatattaaaccgatggaattggaatacaggaagagtcccgttttgggtcgcgctcattgacgactcaccaaaacctccgcctcgacgcatcacaattacaattcccctgttaaacgccgccgcaaatttagccttcatcgccaacggggcatcaaaggctgctgttttaaaggtatctctggacagaaaataaatgaattttaaaaatattagaaaattcttgtggataatgataaaacatatccgccatgcctcatccgcccaaatcgaccaattcaatggtttttggatgaagaagcggtcaaagaaatggcagctgcaatgaacgtggcatgaaacagcggaccaattaaatagaacatccatttgtgactttaaaataataaatgttcaacggtagtttaaatataactctttggttttatgaagaacaaattcaagttctggcttttgttgtttctcattttgttccttaaaatttatcatatctaagagagaagaaacgatgagtgagatgaatatcaattcttcgtctctaaggtgaaaatctttttaacatttggtggggacaatgttcgatttaaaattatgacttttactttcattaagttcttctatgctcgtccgcgacctcactctcaaaccggacgtatcaaaaccacgctgggatcagtcgacttatcaaggccgggcgcgacactttttcggtaatttggtctttaaacttggattctttctttcccacagtattttctgcaaattattctccctttagctgtgttgaatcctcttaatttgtttacctccaatcaaggattggaagaaagtcgcaacattgtcttagattatcggtgttttatcattttgcattctatatccctatactattttagaaaaggcattttttccccagaattaacagttgagcgtctatggaaggccaaacatctgtatggtaatttatttatgtattttctttataggactttaggattactgaagattatcatgcattctttcagaatcagcttatcatccgatgtctgaccaaaaaatgttgccttttggtcgaatgtgcgcccaagtgccatgcaatatggttttgatcggtggcatgctcagtttttataagtaaatctacaaaaaacaaaaaaaaattaaattaatttttcaggtctccgttggccgtcgttttttggcaatggaccaaccaatcattcaacgccgtcgtcaattacaccaatcggtctggtgactctgtgagcactgaccaattgctgaaggcatacgcatgcgcaacgggtaagtctgaattttaaagtggatataaatttaaaatttacctgcttttaaggcggggcattaaccgcggctttgggattgaatgccgcggccaaagtgtgaccttttcagtgcaccacaattgccaatttcacaacaatcgcttagaaaatgccgccacttttcggtcgtctcgttccttttgctgctgttagtgttgcgaacacaataaatgttccgatgatgcgacgaaagttggtcttgacagttgcaccatttttttaattcttttaagggaatttactgacggaatccaattagttgatgagcgcggcgttcccctcgcaaagagtcaaacggtggcatggcacgcggttgcgcaagtggtggtcagccgagtgctcatggcaactccgtacatgggtgtgtaagggcaagttgatgagggcgcggggacgcccctccaaaatgacatttcgaattggcatttattttctattggtgccccacttggctgttcagtgctcactcccctcgccgtcaatcagttaacaaaaaagaaatggttcaccatacgcccgtgggtttccccagccttccaaatgcttttttgtggtctcatcattttcttctcgacgccgctttgttgtgcgattttcccacagcttagccatataaaagtaatgcctaactggtgatttattcttgatattcctctctctcttcttcactttagacatcggacttggaacctgaagtgcgcgaaaagatcctcaaagaatacgatccccgtgaatatgtgtattataacaaagggctttaggtagttagttatacagaaaacatatcaattatttaatttttctgcttaagcttttcacttcttacaatttttgaagtttgttagtcatggatttctaataaatttattcttcgtatcgagtccgaccctccaagtttgagatacaaaacttattttttattaatcagtgttcttcgtctctttattttaatgggagaaatggcaagaaaatatggcaagtaacgacgatggcaaacagctaaagatggaggaaaactaaggaaatcaagaggatggtgaaaataagaatttatggcagcgagacggcaaaaatggcaatactaagaataggaggcaagaaataaaaatgtgaaccgaaaatgaataaatgagccttgtcaatttgcagattgtcggtacgttctcttaatattttacgccgcttaatacgctattggtttttcgtagggcttcgaatccgatcttttgagctgaactttcagccgtttggcgccaatttggaaaccattcattcctaaaatttgggaactgtattatctgaaaagcaggtgtacatttaccagaaattgcattttgagcggaagattcatcggaaaaactaacaaaacctaaacggactcatagcaaatactcaaaatattttaaagttaccaa

SEQ ID NO: 9907 - DNA, 1823 bp, Heterodera glycines
atttccagcaaagtccactccaaatctgacaatgagcacaccccccccccctccgccttccctgcttacaaatctgtgtcggcaaagtcttgtggcaaatggtagatgaacaaattgcacccgtccggtccccggttgtatttgtcgatgggatatgaaggatttgccggcgtcatccttgaaacaattgagcaagaaggcgaaataattggcaaattcggtggagtcgttggcagcacagaatgaattgcactgggcacagagagattcagcgcagagtgaccgagtggtgaggctgaatttaattaacccaaccgtagacaattttagggggggggggaaacgaaacttgggaaaaacaaaaagaattggcaaaaacattcccaaatcagacatggccaacccttttatcgggttcattgtgtgggaagctcatccccctaagttttggatgtcattttcgttacctccgaccgcggactgttggaggagcaatccctgtgacaggccgagcagtgcgccctgattcaaattcggtgggagcagcgtgggcattttgaaaagattctgttgacgattttggtccattttgagtagtaaatctaagaaaatggaagacaaaaagacggacggaccaatatttaattgagaattaccagcggacgaagtcacattctgtgccgattgtatgacacgtgctgaaaatggaaatcaaaatattttcttttttgcgattatgtttttttttgttccgtaccggcctcaagcagagaaatgacatttggctgctgaagtaaagtgaccaaattggccaatgtttcggtgcctgaggcagtgagcaattgcgaattctgcaaaatgttttagaatccttcataatgaaatcaaagccaggcgagcacctgattattactggtcggtttcccaccgttcggcttcggaccctcttcatttttgacatctggagctttttttgcgtttttttctcgacaggaatcggcgaatttgacgaccaacggtttggaacagccctaaggaattgaacaaaggaatcatttctaaaacaagcccagcaaaacttaaataattgcaaaaattataaattgaaaaagtgcagaaaacggacaaagaaaaattgaaaggccaacagaaaagggaggggacgaaaatacctcgaaaatctgcgaatggtgcatttttcgaatcgcttgttgggcacaggaacgagaaaccaaagtcaaaaaagcacagcctgaacgagacgagcacaaattattacgaaccgaacagaaaaagcggaaaagtcctccaccaaccacagaaatataagccatttacaatgataaaaataaaatgggaaaagcgcgacagatttcgcttcatttagcgtttttgggtaagccgtgaaaagtaaaacataaatccgcgaggcacaaatgggctaaaaagaggcacaaatgacagtgacgacggataaggaaaagtcaatgcgaatttgggccgttaccattcgccacctttgcttttgccgtcctctcgcagaatgctgcagtcctccacctgcccaaactctttgaacagcgcccggacgctctcttcgtccattgacttgggaagcattccaatgaaaagtttgcgctctaaacttttgcatggactccgtcaaggccaataaatagaattttcaagaaaaaagagtaaatttaaaaaaaaattactgtttcattaacaaatcacatccaaaaaaaactgctataaataatgcttttatctccctggagaaggaagttttgaaaaatgacaaaaaaatttggttcgaagaa

SEQ ID NO: 9908 - DNA, 2785 bp, Heterodera glycines
  unsure (1)..(2785): unsure at all n locations
tttctatttatattaaaaatgcacttttgtcattttgataaataattagccatacaaaaataattaagcctaatacaccttataaaagccctcccccctcctccttgcgtctcgggccaacatttgttcccattaagtgacgagaataggccacgccccgtgccctcctcctcttcccctccttctgttgggcggcaaatccctttaaaagccgtcgcttttcacagtcttacaaatacattccattctaagtgcacacattcatccaccccatttaaaagcaatttcaaacctaagctttcttttaaagcattgttaaaattccttaaatacctcaactgcacgcagtacagcagcgacatcaaacagaacaagcagtacaagcaccatggcatatctcagctggacgacgacgacgttgaagacaacgacaatgctgctcaacctgacacttttttgccagtgcgttcattcgttggtcatccatccgcgactctgttcaacttcggctgcggttgctgcacgacaaattggagcagggccagaaagaactgctgttgaagacgaacaactgcaacatttgcttgacatcagcaatagccgaaatagtaacaccaaaaggatgcgctggtacggagcagaagccaagcaaatgctcaggtgagggcagcttttaggggaaggcaatgtgccattcatgagggcaccgaatatgccgatattgaggacggagattgtgccgttcattctttggggcagacaagatggccgtgccgtactcacatttggcataataccaaaataaacatttttaaacggccactgaaccaacctccccccgcccttcctcccacttgcttgaacaaagattttattattttttcaatttttttagacaccttgacgagatccggcttcgaacggagacggcacaacagcggaaggcggtggccaaggttggcaaagtgtcgttgctggataaactgttcgcgctgttcacggacaagccggacgacgaggggcccaagcatgactgcttcttctccgccttcaactgtccagtgaatccggcacggaacatcccgggcgttcgccgggtgcgcatcacggcggatgagcgtcagaaactgttggcggcaaaacaacgtgccgctacaatcggcagcagtggtggtggcatcaccgaacggcactggagaaggccacggcatcaccaccaccagtaaggttttgaaacagtgccattgaagccgaacggcacggcataaccatcgattctttgttcactcactcatcaatgctttctctgcttttgcttgccattaattttgttcaaatgtcaaacttttgctgatgacccaaagtctccccaatattttgtacaaaatgaaatgaaattttattgtttgctttgcatttgtatgttattatattatatatttttcgtttctcaaaaaataaaaatatttaaatttaattttttttaataattaaaatgtgaatattaaacttatttgaagattttccttcactaacatattagtgtgattgcactcggagttaaagccagacactcttatttcatacttgatttcaaaatgtaaattcacatattagaattcattagctatgaaacaaaaatgcttaaaggccatcctaattagtgtcaacatttaaaaagccctggtttaattcagtcagtgtaaggggagtgaatttctttttccaatttggccattgtaagtagggaagtgcgaaagtctcggttctcgattccggctcgagaatctcgggattttcgcttcttggtctcgatctcgtttctcggggtcatttcttggtctcggttctcggtaacaatcacttattgcagacacattttttcaatttggccattgtcagctaaaaatggttttaattttaattacttacatttaggtttaagaacaaaaattaagtttaaaattgctccgtttttcttttttactataagccaaagacttcacaacgacaccagcctaatttaaacgattcttcataaattgataatttgcaggtttatttttttatttaattttaaatttattgaatcaaaaaactctcgcttttatgttttaacacgtctaaaagtttgggaaaacttgaaaagacaaaaaaatgccaccattttgtcttgtttataaagagcacgaccccaataaaacgccaatttaaaaacaaatttcaatttcaactttacaaatttggtttcccattttttgtagtcttacgataccactttgttgtgttttgttaggcttgcttggccttttgcacacttccgccgggggcgcacctttactcatcttccggcgccgccatttccttacactttggtggattatggcagcaatttgcttcaccaaatgcacccctctcctccccattaataaatagcaaaatgttttgctaatgccatttcttcttgctaagtgtttacattttgggcatccctcaaaaagttttgcagcaattttgtgacaaatccgcttaaaactgggtaaagttttttattttgtataattaaagaaacctaattgcagcataaataaaacactgaaatagcgccaatgtggcaaatccaattttttggacagcaattatagattttgccgtcatttccgtgccaataaaaatattagaatcaaaagcctgaaactcgtacaagatcttggtctcttggctcggtcagtcactatttttgatttataatatttgttttccatatcccttacagnnacctgca

SEQ ID NO: 9909 - DNA, 1658 bp, Heterodera glycines
  unsure (1)..(1658): unsure at all n locations
aattcagaaacaaactgcagaaacgtcataatccgcagagagcagacaaagaatgtgcncactcttacggtaggcaattntagttgtacgatatttattggcatgtcaagcggctcgaagaatatttgagaaaactaaaaactgttaaaaaattattgtaaaatgcttgtgggccaatttattagattaaaaaaagttttaaatccgttaccgtaatgaactttttgtttggatcgtaatcgggactactactataataaaaataattattattatggcaatcaacagtttgttgaacaaagtgtcagcctattttttgactttaaaatggcctaattcaggaaaattgccaactctttaaaaaacagttccttttacaaaaatggcacattaagaataaaataataaaaaggtcggcggtcggtgcccgccccaactttaagcttaaatctttctaatttatgataaaaatatttttattttaaataaaaattactgccgtacttaaatagacaaaaaaaaaatttaattttaaattccatagctttgcctcaattccatcagtttaagaaaataaatacggaagaaaagtcattcatttgtcagacataatttaacattatgaaaaaaataaggaatctcgacaatttgtatatttgtaatacaggataagtcctttatggcaaaacattcatcaattattacgagaagcaaaatgaattgaaaaagaagaaaacgaaagtggatattgagtaatggtgataaatgtgattggattaacaagataacaccgctttgactgttagcagaaggctcccagccgattgaaatcctgaaaaaaatatcgaatattttaacataactccatatgaaatttatttttctctttccaaactttcaaattctaacaacactagtattgatggaattcccaatatttttttgaaaaattgtaaagaaaatttagtccgacctcttttccatatttttagtttctcattgatgactgccaaaattccagaaatatggaaaaagtcaattatttgccctgtcccaaaaattcaaaatccggtaaacccagtcgactttcgtccgatttccctgctatgttctgtttccaaaattttggaagaaaatatagcaggaaaaataaaaaattttgttgaaaaaaataatttgttaccaaattgtcaacatggttttcgtaaagcacattctgttaccactcaacttcttgaagtggtggatgatttcagttttgctttagaaaatagaaaatcaattgatgtaatttattttgatttagctaaagcattcgacacggttccacataaccggctaatatctaagctccaaaacattggtataaataattccttattaaaatggattcagaattacttagaaaaccgaaagtttttcgtcaaaatcgggtcttatttctctgacgaatatccctgtctcagtggtgttccgcaaggctcaatattgggaccactgttatttcttatttacatttacgatttaccaaaattctgcgaaactgaaaatgttaaaattaaacggtgctgggacgttagtcaaaaaccatcaaatgaataatttttgacagaaaattattcataattttgtctaaaatggatcaaattttataatat

SEQ ID NO: 9910 - DNA, 1331 bp, Heterodera glycines
  unsure (1)..(1331): unsure at all n locations
taaaggaaagcgcgctctccctcgcctcaaatccctgcagcaccagtgccatccgagccaaaccgcagcaaatccggggacaaacagaagtccaaaacgaagccacagcaaagccacaaaggacatttccagccgaataattcaacggcaattaaaaaggaagtggacctgcctgatcagccctgccattcatgcggaggcaaaaatcattggcaaaaagtgttggataagggaccacaccgattattgattatattttccctttcactccctctcttattgtctctctcccgccccttgaccagccccataaatatgtctccctttccctcactcgaggcattctcccattcattccaccatttcattattttatttatttattccctgctgtcctccatatttattgtttaataaattatttatttatttattggacaacatttgctttggttaaaaaccaaacatttttattgttgtagtaaatacacaacagcaatgaagaaaggggcttaaaaatagcatttctatgttaaaattttttgatttggtgaaagtttttagtccatataaatccatatttttggggtttttgtgaataaatccttcggcattttgccgttttgagtccatatttcgggtatttttgacaaattttcataagaaaaactcaaaaaagtgaaaatacatccccaaagatgggctttttggaaatttttaaaaatacacctgccaaaaaagggaattttcgaacttttggtaaattatttaagtattttgttagcttccgaaaatattcgctgacaacagaatgagattattaccaaaatcgattttttggtagtcttttagttttaagtttctttaagaattattgaacatacacacattttttgcaattttgagtgttaaaccttttttggcattttttgtccgtttttatgtccatatttggtgttcttaatccatataatttacctagtaatgagctttcttatttaaaaataagcccttttttaactcaaatttagtgaattcacgacaagtcagaaatgccgcaacattaataattttggtccaaaatttttgataatcagcgatattggcaatggttcactgcagaacggttccgaatcattggcgcaaattattttgtggaaatggtctcatggaacacagatcattcgaaaagtagtaaattgatttattttttactaattgattatagtgtttttttttggagttcggaatttggaattggtcggagccgggattaacgggttcaaatcccgattctgctgggaaatatntttctgaagtcccagactcaa

SEQ ID NO: 9911 - DNA, 2357 bp, Heterodera glycines
ccgccccctttggcgccggccttttcggcgcggttattaacacttttttttatatcaaccaaatttaaaatatttttgttaatattcgatagctcttgagattctctattagattgcaaaatttcaaaaaatttagtcagtttacaaaaaagttatggccaaaaaacctcaaaaattgactttttcttggctttttcggcgccacgtggcataacttttttatttttgaatcattcatttctatttttacatgtaaatatagagcgcacatagagctttcaaatgatgccagattggctaaagctaactgacaaataaaaaagttatagcatttcaaaatttgcggcgccgaaatggtccgcgccgaagtgaccccgacccatatcatgcaaattgaatttggtttttaaattcattaaaatttaatttcgccaattattaaaaccttattaaatggtaaaaccagggtcaacatttcgggatcaggattacgacctcaattttccggggtcttgattcgggatttaggaatcggacagcgacggggttacctgaacataaattctggtgaattaaaatctcgaattttacgggatcagaatccccggaaatcccttcctatcacatcaattcttttctaaattattcaccatagacctttatgctgaggaaaggaggaaaaattggggcagaaggtgaaacaaatttgccagtttctcttgtaatcagatttctcaaaaaacgcggagtaatcgaaaagtaagacagggttacccttgaaaatttcccgaaataagaacatcgctggtcaaaaataagattttagggtcaaaaataagacattttttaaaacacgcttccaaaactttaaatgcatttttattcaacaaaaccaagcattagcaacatatttctcgccgccaacttttttttctgagcaattccgacttagaaatgagaaatttatacatttccgaaaatcgattttaacaagtttgtggaaaacatacctaagcaatttgtaaatttcagtgcattcagagtcaaaaaatcagatttttaacaatttttttcggcgcatttttccgtaaaattttttgggtatgggtgagggaagagagtccggcggtgccgataggcgccgccggaaattttttaaacttgatctgtttcttagcaaactgtacccaaaaaatgaccaaatttctatatgaaaacaatatgcaagtctgaaattttcaattatccagtgtaaattattcacgcacacctctaataggcgccgccggaaaattttttgtaatttttaatacgatttctcaactagtttgttcaaaaaatgacaaaattttacgattttgagccaattttttaagagaataagaatttttaaggggcggcgaaaatccaggtccaggccgagctctagatggaagtgtaccgccgagagaaaaatttgaatatttaactgaatcttgttaagattttgcatattaattctcttcaaaagacatttctttcaaaaattatcattccctatataacagggctgggaccgcgccgcgatgtgcgaaccgcgattcgcggcgttttttttttgcacgatccgcggtcgcggcaatttgaatgcgcgatgcgtggccgcggtttttttctgtgcgcgcccccccccccccccctgctatataagggaaatctagggtctgagtgtgagtttttttaataactcttcagggtttgctcggatcggctccaaacaaacgagcacaactattttttaaggattctctatcgattggtgatgagtagggtcgcaacttttagtgatttaattattttttgctcgattgttttgaagaaaggagctcataaaacgcatttctgtgttgaaatttttcgattctgatgtcactttcggtcactagaaaacactattttggcgcttcgtcactaaaatagtgaaaattcactattttggcgttttgtcactattttttcactatttcgacattttttgaaaaattccttaacaaaaatgcaataaaacccaaaaatacacccctaagaatagactcaaaaatattaaaaaatacaaccaaaaaatgaaaaaaatttttcgaaaattcatcctcaaaatttttttcttgacaaaattttttgatttaaaaaatgccaatatttgctaagaaattattagaaagtaaatgcacctcatttgcaacagcaatcagtgaataattttttttttttgctcaatttttggctaaaattatgtcactattcgtcactatttcggacttttttcgttattttgtcactattttggcaattttactcactattttagttaactattt

SEQ ID NO: 9912 - DNA, 3966 bp, Heterodera glycines
  unsure (1)..(3966): unsure at all n locations
aaaattagtgatgaaaattggagttaaaggaaaanaanttagaaattatcataaatatattctttcaaagtaacactgccaagtgtgcgaatggcctaattgctactctccttgacatttccttcttctttcccctggttcaatccctctacagaaattaaaatattttgaaaattttcttttttttttaaatttccccgctaggtccgggaccaacaagaatagggtcagggtcaaattgttaaccaaatgcatgagtgggttcaattcccacccgaggcttaacattttgcctatttcttattgtatttttagtacagtaaaagcatttttataaaattattttgaaagaaaaaatataaaaatttttcagtaccgggttttaccgggtacccagagccggtttaaaatttggcccgttttcagaacccggcgacaaagggtactgtaggggctaccagaaaaaaaagatgggtgcctattgtaaacattttccactgacgatcaaattcaatggcggggagttggaagctttttgcgccacaactgatcaaagtaaaaatttcatggctgatgcatacgccttagggctcagacgcgtacgctcactcccttaaaacagcttgtgtaacaatttaatcaattaatgtaatatcaaatttcgttttttttgcctcctatgatcatttaaaatagagttgagcgggaccgggacctggacacggacaactgagtaccaaggtcccggttttgaccagttttgaccgggaccgggaaattcccggcttttttcccggttttcctagccaaaaagtcccggtcccgttcttgcccaaatttcccggtcccgctcaactctaattttaaacaattttggtgaggaaataagcaaatcgtacatttaaattagagaccggacgggatcgggatcccgcgggatttcttcgggatcccgcgggatttcttcgggatcccgacctcgggatccgtcccgagcgattttttaaattcatcgggattgattgggatcgggatttcatcgggatcccgaacctggatccctcccgaccattttaccaatcccgcgggatcccgcgggattgaagtcacgataatttttcaaaaaatctccattttttaaattaagatcttgaattttaaattaaaaaatattgtcatttgctaatttttcttaaaaaatcccttaaaaatcccaaaaaattttacaggtctccaaaattccactaaaattttcaaaatttgacgcaaaagttggccattttgtgacttttatttcttcataaaaagaattattttttttaatttctaaaacattagtctaaatcttattaggtagttttatggcacaacgatttctaagaattttgtccaataatcagaataaaaattgttgtctacgcatttttccttcggtgccaatcggacatcaccagacccaagaacccattattttcttataaattagttcaaaatcacaaaatatggacagtttttgtataaattctgttaacaaattacatttcaaattttcaaaattttcccggcggcgcctatcggcaccgccgacctcccccccggttcccctaaagtttttgaaaaaatttgcagcaaaaaaaaatcttaaaaatctgattttttgattccgtttctcaaaattattaaaaatgatcatttgaggcgaaaatacaaaaattgatattaatttattaaaggctatgttgttaaatgttctcatttttgaaaatctgattttttaggcatgatattccaattttgaaaaacttctataaaaatctgatataattcacatcccttttttttcttcaatcgaattgatcaattataaatattagataaacatttgaacaaaacttggcacaaaatgtaaaaaaaaattgcgttagagcaaatcccgataagcccgcgggatcccgaaaaaaaatcttcggggttgatcgggattcggtcgggatcccgacccgggatccgtcccgatcgtttttccaaaatgttcgagattgatcgggatcgggattcagtcgggattcagtcgggatccagactcgggatccctccgaccccagttgtccggtctctaatttgccctatgcccaaaaattcattaatcatttttttgagtatcaacaactcattaaagattaggtaagtaccgggtgtaatcacttcctgtcacttatttaatgctgattatgctaaacatgaatttgaaccaatttttggtataggcgcaaatgtctgcacacggaaagatggcatcggacaattaggaaattgtaattatacacgaccattagagttagcagttttttagccttagtcattttttttattcattttcgtatataatctaaaaatttttcttcggtttggtttcttcaaattccacttcgatttaaattttggaatttattttcggcttttcaatttcagcaaatttttgcgcctcttctcgacatttgcactttgtcctcatcatcaaacacaacgacccaacaacaacaattctctgagaatgctttgcgtcgtaagcttcaactttgtgccaattgtcttgccgatttgctgcacacttggcctggctttttcgttgggttttcggtggacaattttcggcacagcacgtgccaaaggtgagaagtgaaagaggaggattttatgaatttttatttgcccaaattttggaattattttagttttttaattaaaaatcttatattttttagtgttattgctttcctcaaaaacccttcttatttggcgcagcagcacgagaagaaattgctgggggttgagctgttcagccgaatgctttgccttccgtacgcaaacaaagaattggccacatgggacgaagcgatgcgattttatggtcgaacgcaatttggaaaattaattgctaatttaattactattttgatagaaagagctcatggccccgaccctttccaaatttcgctcagtgaacattttgttttggccgaactcccattcattcgcccattaataaaagtaaagaactcgtgaaaaacaattaaatctgtataaataaataaattatttcacaaaaccttcatttccgtttttaacgacatgatttatgggataattaggaaaaactcggaattcagcaaatatcaggaaaaccctcaaaacccggatttgaggacccagaaaaacctggccggagtccgctgaggcgaaaacggccaagagacaaatattacaaatgcctttaattgtttcactttcacaattaagaccgaaaaggcggacctgttcatcatttgccaatctgtccatgtctttgcgctttttcattcgggtcttcccgaggcaaagttttttttttctaattttttctttaattagagacccgtaaaaaatatgcgcaagccgggacgggagtccaaaacttttccgcgagcattgccgggattcccgaaaaatccggtcaattttgaacggaagtcctggtgtgagcaggaataattcaaaaattaatgaaactaaaaacaaaaatatgaaatagaactgagattaaaaaattttaatccgaaataatttctagctttttaggtccaattttaatctaaaaattagagatttgtgaacatccaccgttttgcgccaaaaatatgcaatttataaattttaaggctaaaaattaccatttcttgtaattttgtaccaaatcaaaaataagcacaaatcacagctcgatggtcaataatttaatggaagaaaaaatataaaaatataagccgaaatttagtggtatttctaaaatatttttgtggaaggaatcgaaaattttgtcagattttcacttaaaaataattaacataaaaattcgattcaacccagtgcatttttacttctacatttgatgagaaaatttgacgcagcgggattgcgaaactttcc

SEQ ID NO: 9913 - DNA, 1853 bp, Heterodera glycines
  unsure (1)..(1853): unsure at all n locations
aaaaaaacaattaaaacgacgcaaataacnnaaatggcaaagccatgagatcaattatgatgtttatgtttgtgtaatctgtgagttcttatttttgttcctgtaatcatcaaatgttgaacactttattcaaaatatttttttgagttttttattttagtttttcaaatttttttactgcccaaaaagaagagtttttgcgagagtctcgaatggattcggaattcgaccctaaatgatcttggggcaattctcattaccacccctccccccactttcgagaaaagattaacatttgacggaatttagggtgttgtcgttaaccccctcgacggatttccattaattttttttaattatcgcaatataaaattatttttggttttcaccgcttcttcttcccatttgctgtccatagcaatgtcaacgaattgcgtaggttggcaatatgtctttttttagcaaaaactttttttttgatcagcggaaagttcatcgtcgtcacaaaatgtccaatcaatcaatcaatcaaattttggcaaacgaacattacgccaaccatcctttttccacacaaaagtttctttccctttattttcttccttttgatcactttcacagtgtccttttgatcggcgtcaacagttgttatgatcatattatattacctttcctctaagagggccaaaagtcatttatttgtacaacgtcacactgacacggcggaaagcctaataaatccccagtaatcctgatcaaacaaatggattttctggtcttaaaactcgaactttataggtggcttaaatgctttaaatttttctggttggatttgcgatttccgattcccaaatttttttgtgcgtgcctcccacgcctatcaacgaaaagtataataacaaaacaaacaacaacaataataaatagttggacaaggaccattcccaaatctgtattttgtttatctttttcttttcatcaaaatgttaaagtaaaactcctaatttggtcttaaataggtcttaaatataacaaatttaaactttaaaaatatatttaaattaaattaacaaattcaaaatataactatttatatttgtttttttggcaattaagattttaaacactaatttcttagttttctaaatgtctaaatttaattatccaaattgattaaactttcgtttttttcaaaaaatttattttttacacaaattggcaattagggctttaattttgcataaatttaattttttttttccgccaacaatttgtctttctctatatttttgtatacaaactccttaattaacaaatgatgatggtgattgtcaatctgatcacacattgcgctgatgaacacatgtgcctataaaaagtcacattttgggcccaaattattccgtccgttttttcttccctttctgttagacaattttcttatcttttttattttttatattttattcattcattttcatataatccgatttaaatattttcacttcaacaattcttttttacccggaaccaaaatttgtacaaatttttgtttttattacgaatttctcaaccggtttttttgatatattgtctacgattaaattttccgattttcccaaatccttacacgacgagattggcattttgtttttaaagggcttatccgaattacgacgtcaaagaatcgccagactagcatctaatcactctttgtgctcttccgattatgtaatgttgatgatataaattgaatcattaaggaggagggcactatttcgaaacccttcccctggcctaattacccccccccccccctcacaatagggccaattacttaatacgaattacta

SEQ ID NO: 9914 - DNA, 2218 bp, Heterodera glycines
ctcacactctctctctctctcgctcgctctctctctctctcgctctctctctctctcgctctctctctctctctcgctttctttctctctctccctcctttcctttctctccctctttcgcactacttcctccctctcccttttccccaatgtttctcttttcgcttttctctcgccactcctcacttcctttactctctctcttcccagaaattttcccactcccccgaggcgcttttccatttttatcattggctttttgcctcctcattatacataaaatattataaattataatagttcgttttttttgcttgataagagtatcatctctcgatttttcgcagacaattcaaataaaaaatattaataattaaaaataatagataaaaatctttaagaaaattttatcgcaataattttctccaaaaacccaacggtcccaaaaagctttacaaaaatctcgacaaataaatctcgtttcctacaacaacacttaaaatacagaatcaaaatgagacttagcttatcacgttttgcctccaccgtggcaatgttcgccggagggcccatcgagcggccgttggcctattacaggtacataccacaattctcggcacattgaccaagaatggcatcgcgggaaatgaggcccatccatttttgtagactgacgggaccaaattctctaaggatccgtctaaaattcacaataaataaaaaagggctcacgaatgtcttcaatcaattttaataaatacatctgttgtgtccccgggtttaaggcttaagccatttcaaattaccttttttagagagaggaatttattgaaggaaaagcattaacaaaatatttatgtattctaaaccgggaataagtttgatcaacaacaacctcagagcattttgggtaggtcagtgcaattggttatttgggaaaggatcgatgcccaaaggcaaagaacagcactgaacagactgacccactgcatacatctcgcagcccccgagggggaaattgggaggacttatatactggcacaatgggggtggactctggatagaatgaggagtatgacggcataaacacaaagggaataagagaaatggatggcatatgcaacagaggtgaataggaagaaatggcacgataacattggaaatgagagggataggattggtttgggtgggatgaacggatggataagtttatgacggggtcggatcggggaaagtagggcaatttacattatgcacaaatatgaaatttaacagcggacacagcaacatctctggccattaattaattggtgcttttcagccagtttcggcccgcttcgctgaccatgcagcaatacttggactttggccgcaagggcagtgcgtttacctcctaccactttctgaagacggaactgctggtccgcatggcgaacattatgcaggagttcgacctgctgcccgccaaactgttgcagacgcccagcgcacgccatgtgggctcgtggtacaaacaaagtgagtgaatcattaccatttggcatggtacagtaatccctaatccagcgggtaaacctgttggtcaatctaatccacaatccgtgccaaatgtccgttggggcctgatcagaaattgtttgggcttagtaaccctaaacagcttttggtcgaagaaatataatctgatttacatgaacttcatattatcgaaaatgcctggtccgacgataattgtctgggctaataatagctaatcaatgctgattaaggaagattgacaataattatgttcggataagctaagcaaaatcgttttaaaatcgacttctgatcacttcatttttaaatatattattgacattgcaccgttcgttttcaaattgatcagcattttttattatccaaaaaactaattctgatcaaatccaccgaggatccatttcagaaaaaaacaaacattaccaagaaaagagttgtttgcatgatcttgtgattgtttggatcctgatctgctgatcagttctcccagccttgatcaaattgattaaattaacttcacccacatttcattcaggcttctctgaactgctccatttcgagggcctcgagcccagcgacatggtgttggacaagttcacaaccaattgcgcaccaattttgcatcgtccccacaccgtcgtggaaaacatggctgaggaactgctccaaatgaaagaaa

SEQ ID NO: 9915 - DNA, 2646 bp, Heterodera glycines
  unsure (1)..(2646): unsure at all n locations
tttaaaatttaaattttgttntgtctattcgcttttcccgcccttttcacgtttctctccgagcaacacttttgcgtgtcgccaatgctcgacttgcgctgcttcaacacccgaattcccgaccagcaaattagcgtcccgctggttccgctccatttgtactacattgtattcgaattgttgaaggtgtgcagtcaatgcctgtactgaaatggcagggatgggaagggaccggcgggtgctgagaccttataaaataccatcatatccataacttttctcaaatccccattaacttttaatttttggtatctttcgatgccctagctgttctctattagtctgcaaaattttaaaaaattccgtcaattttgagcaatttatagccgaaagtacacaagaaacaggttttcaaacttttttgaccataactttttgaaacaacgaaattttttgaattttcaggctaataaaaaagacctagggctgtcaaatgataaatagaaaataaaaaataaaaataatttaataaaataaaatgaatctttttgtttagaattcgatgcgtgccaccattgagcatcaccatcgggtcaaaggctttgatgccgactcttccgatgatttggcagaagtgcgtgcctgcattgtgctcggcgcggaaaacctttcaattaaggcatgtgctttcgattttttggcactttatttttgtccgtttttattttcactctgaccactcacatttctcatctttctcagatcagtgatcgcggtggtggcgtgccgagtgccaagctggccaatctgttccattatctgtattcaactgcgccaaagccgtcacgcgatgactccaacacgccatttgtaggcaccaaccaatgaataaaaactctgatcacgctttcccgtcaataaatatctgatcatttttttttgccataggctggttacgggtacggtctgcccatttcacgcctttactcgcgctattttcttggcgatctgtcactgacttccatggacggttatgggacggatgcggtcatttcattgaaggtagataattcgatcaattagagttgtttaactgggaaattcgctcctctcttcctctcgagaatggcacgggaaattcgagtaaactcactttacaaacgacggcctttagtctcttttcgggatgcgccccaaaaaccttgaagttttcttatgaaaatatctgtttgaaaattttttttaacatacacggcgagattttttcccgtgccttcttttcgtcttttcggcactcatttaccagtgcaacaatcatttttggcacatcttttaaggccgtgccgtcccaggcctgtgagctgttgccggtgtacggcgcttcgtcacgtcgcttcatcacaatggcacgcgaggcgcccgactattgtttccagaagccgaccgcaatcacagcaccggcattggactctacgaccagtgccgacatttcagcagtgccagtgaaagcagtgaagccgaaattggtaccggaaacaacgacgactaagacgaaaagcataagcagcagcagcagtggaaaagccgaacgggtggccatatgagcgccagtctttcaccgcgaagacggggaccgactatgcactgacacttcagtacatactgcaacacaatgcactaacaaacaaacacattttccggatttccggaactatttacgatatttctaactcttttttgtgtatttaatatgcctatgtatggtaattagataaaaattacaaactttattctatgcgtttcaaaattagccgaaattatatgtgaattctaaaatgaaattttataacatcaaatccacgagggttttttggtaaataaattgttttcaaacatttatttaaaaaaaaacttttgttggtgagaaaaatgaaaattgagaagctcatgtacaacgctttttcctttcataattttcacacgccaacattttgttatttggcacgaatagaataaatacaattataaaacaatgcgctatgctggctgacgtcaccacttgcttttagttgggggtggcacggggtgtgggtgtttatttgctttacgtcgagaattaatgggacggcgcaagggacgccggggctctctctctctctctctctctctctcgctctctctctctctcctgctctctctcactctgtgactacggctatctcgctctcaatctgatcatggttctctcgctctttctctatctcgctctcactctaatcaccgctttctcgctctcactctgatcacggctctctcgctctttctctctctctctctgatcacgggactttgtctatcccgtgagttttatgaagctgatgaaaagcggggcagctgtttcttatgtcaacaacgaaaatgatgttatgaaaatttttcgacgacgatccgatcatttgcttttcgcgtcgtctcgagaaaaaaattgagggacaaaatggtcgacgattgagtgatcagaaagaagcagagcactgatcaccacacacctcccagtagcagctgcacgggcagcttttcatcgttattaaactttacaaatccaacaccaccacatcaaagcaaatagcgaacaaaacaaaagaa

SEQ ID NO: 9916 - DNA, 4823 bp, Heterodera glycines
  unsure (1)..(4823): unsure at all n locations
tttttttttaaaccacccccccccccccccccctcccccaacgtcccaattttcnccgttcatcgcagtgggagggattccattcttccgccatcataaaatcgaaaagccccattcccccctccccccgtttttcgcctcctttttctttctctgccgttttgccgcgctaaattttaaacctttggcgtcagaagagcggcacaaaaaaatatatttgttgccaatttttgataaaccgaatttctaaccctgcaattgccaattgtttcttttaaaataatgccattatttcgacccgtcttaaaataagaaaaaaaacacaattcaatcaaagaattacatatgaaggcactttttaacttaaggtggcccaaattcttataaaaggaaaagaaaataaaaatgggcatcattctgacaagctttttttctttccaaacattgttctgtttggcactcctttttcgaaaaaaaacattttaaaaaggaggcaaaaagatatttccggtcgctgaacaaattgtgactttttaaaacaaaaatattttaaaaaggcgagaactacattaaaaaattctatgtgaagtgcgaatttcccattatttttgattttgattattttcttcaaaaacctttcattaatcaatttggtgacctttacagagatttttaaccacatattctattgaaatgcacgagttccatgcttacaacccggaccttccacaaattatcacttcttttaaaggtgttcaaatttattgccaatgatttaaaattttatcgtaattaatccctctttgtgctttcaggcaatcagaagctgatacttggcggctttcgctacaatatccaccacatcaaagagggcgtgaaaacgtggcgttgcgtttgtgccaaaaaattgaccggcacgcgcagttggtgcaaaggtgggacggataattagtttagttattactggggaccagcagcagtcagtagaacaggaccggaggctcctgcaaaaaattaatagtatacagtacccgtccatgatttcataaaaacaaagtcttactatacttttcaggattggaaatgtaaattttgtccatttgaatttgggaatgttaaagcattagttattccgaaaaatgaattagtcccagcgaattgtttcgtttatttgtaattttgatcaatttgaaggccgtgccgaaacatgggacaacgacagcaaaggcattccgaagggcgaacacaatcactcgacggagcacgaattggccgagttggaattctttaaggtgctgctgctaatcttttaccaattttggcgaattttcaatttaaattgttttcttttttcagagtcaaatgattttggcggcaatttctgaaccaaccgccgatttgagcacactaattgatgaggcggccaaatttctgagcgaaggcctcaactttgggaatagggaatcgatgaaaaagtgagtgccatggcatttgctaagaaacgaatttgaacttggctaaaagaattgcattgcttttctggcgttttctctattcttttttccggattttatctttttggcgttctgtattctgtttttattcaaaatgttcaccttcatccatccatccccaggtctttgcttgtggcgcgcaaatcggtggagagcggcgagttcaatttgggcaaacaccggacaatttcatcgggcggtcagcagcggagtttgagcagttcgactggcaaaaagaaaggggcgggcggcggaggaacgacggcacaccaaagcggcaaatcggcagcagcgatttcagcccctaagggtacagtggcgagcaaaagtgtgagtggtttgtccattgttttgtgggattatttttgtggcggtgaaaccatggcttatctgactgtgactttgtccaaatgcgtgttaaatgttttgtttctcgtccattgtttgttggtcccccttttaattgcttttaaatttgcttttatcttttaattggctccgttattaatcccattttgccattgtcaggtgcccgtttcgtcccttctctccgtttccgctgtgccaatgccttcctcgtccaaatttccctctccgtcatcgtttaaacgtagtgccgcctcttccgccgatggcatcgcaacttccttcgacacgtcgggtgctgcgagttgtagcaacaccagcggttacggcacattgtccacttccggcctcgcagacgaagactccgccacccatggcatcggatggatggatttgtctggcgaaagtggcaactttctcacttcgacggaacaccacagccatgcaaacaacgcgccgatgggaatgaacggcgggagtgccaatgccaatcttctcggagttgaaggtgggatcagatcacttgctgatcattgaactcagggtctaatcagtcagtcacgtttgttcaggtaatccgtcctcctcaaccgatcaacaacagttgttggctgcagcattgtttgctgctgccttgctgggcaatccgtccccaacgccgtcgaccacaatcgctgagacattctccaggacgttggcgaacagtaacagcaacacaactggcagtttccagcagcaccagcacacggtcggcgaaatgatgatgtcaatgatgatgccatcgagcaacaacaacaaaagcaccaaacgggggttggcacggtcttcggcaacggcaccagcggtggctggggttggagcagttcaagcaaaacaacagagggaatcatcacaaacgagaacagcaaatggcactttggataacagccgaaatgcggcgattaatgcgcgaaaaaagacggcacgcgtcaattgcattttgaataagtgagtcccaaaagggaaagtgccattgaaattttgaaaaaaatgcaatcacttttccgactctcgacaaaagctgcggagaagagtgtgtcgccatctccgtcctccaataactccgagtcaagttcagtcgccaaagtcgcggactcagttgacagcgaacagaaggacactgaaacccaacgtgagaagcaattggttacggtagcgacacagacggaccgggatacggtagtcaatgaagacgaagagctgaaagggacgcgaaagcgaaaatctgacgaaaacgcgccgtttggtcgagcgaagcaacagaacaggaacgaaaaagaggggacagagaagcgaaaggttcgcatgaagtcaaatgagaaagagaaaacgaagatagagagagagagagagaggaaaatattattgacaaaagagaaaaaagtaattaactaattaattaccctgagaatgatagaggggaaaagcattgaagaaaacgatttattatggcaattttaggtggtgtgttgctgctgttgcgaggagagtgaattgaacggatgggaaatgccgttgggatgcaaacggagggtgctgaagaccgaacaaaacggcacaacgacgaaacagcaacaaatgccgaaacaggaggaggaggaaatggcggagcaagagagcgatttggaggaggaatttttcgagaatgaccacgagatcaaattggaaattgcggaagaggaggaagagcatccgcaaaagaaggaggggagcaaaggcgaggacctttgagaagttgaagcaaaaacagatgaaagtgtggcagaaagaataaaactcaattgatcattccggtatcgaacatgtgcgaaaagaattggaaaaaacaattcgaaatcgaatggaattgaacaacaacaattttgatcgaatgcacgggtgttttgccaatgcttttccttttcttttttgctgctgaaagcctatttttgtcattttcagccaacgtttttctagtctcgggaagcccttctctctctgataaaattgttttttaattgcattcatttgattgattgtcccttcttttttcaattgtttctttcggacttgatttggctatttctcttcttcattaaccatttgattacttaaattgtttccatttcattcacttaactcctgtccttccaaagtgccttcctttttttttacttaaattattttcaaaattcgaaaataaaactattttctgactggttatttatagttaattatgatctctatttttttttaacaaattcgaaattcagatttcttacgcatttgaaactccaaatgttttttactaaaaataattttattgtcttttttctgaacaaatttgaatgataattagtagggatggtatttttagggtttagccttttttcctgagttaaatggaaaaaacccaaaatatggattataatatgggaaaaaaatcctaaaatgaacaaaagatttctcaaaacttgaggttaaattttcgaaattttaaatcattgaatttttatactaaaactgaaaaatcaatttaattcaagaaaaataaaaaatataaaaaattcatcgatgtcataaatttgttaatttgcgaaaaataattttttcattgagaaaaaataatttacattttttttagttaggaattttgatcatgtaataatcttttatggtaaacgaaaaattttttatattttttaggagtgaattttcgaatgttcttatgacgatgaagaaaatatggatgaaaaataaagaaatattaacaaaaaaaaacatgaaataagggaaaattgaaaaatgcatcttaaaatcagtaggttaaaattatattactttatttttagttcggaataaatgtgcaaaaaaataatatggaaatcaagacaaatcgggccttaataataataacaataaatg

SEQ ID NO: 9917 - DNA, 3470 bp, Heterodera glycines
  unsure (1)..(3470): unsure at all n locations
agggcacaaatggaggagggacataaagcctaatgggggagggaggaaaagcagataagccagcgaatgggtaataaagccagatgggtggaaaaaagggagtgaaggagtggataaagcataaagaaaaattgaggaaaagccaaacagagggaggaaacgcggataattcaaggaatgggtaataaagccaaatgaggaaagaaaatagtggcgaagaagtggataaagcataaaaccaaacgagaaaggaaaagcggataaagcaaaaaaaaaaaagggagaaatgaggaaaaacggacaacaccaaaagaggacgaaaagtagaaaaatggaaaaagaaaaaatgggctgccaaaacaaattcttccgcttccaggcacttcacatgcgattggcacggttacgccaaagtcagctggcagcaaagcgcgaatttgaacggaacatgcaaatgaaaggtcagtgttgtaaattcgagaccaatgattttaaaaggaatatggttggacttgaggaatatatttttggtttttcttcggctaaatacactgtgtcttgaatttttaaccaattaaaatttttcctattagggttgtgcattgtcggtgattaactggggagggtactggtttcggttaggccttgttcccgaaccccggctctcgtttttggcccaaaaagccgggtttcggttcggttaaacgattttacacaattctattagacaaacatacaaaaatgcccaacattattggtcaatttaatcacgactatgtgtgctaagttaacattttcagcaaataatgccgcccaatcaccggcatcgaattgcttcgacagagctccatggtaaacaacgccccaaatagagggcattatgccatgccaatttgtgccaattcaacccctcgccccccaaaggtgttccggatggatccaatcctcgccgttgatctgtcgtacatcgtccatttacatgcgccaagactgtgccaagtcgtgcgggttctgcaccagcagcagctgaagcgggcacagctcgccggcggacttcaaaaatcagcagccaagcgaaaagaaagatctcatcgttacagaatgaaatcttagaacggaaagaaaagatttttattgtcgtttttttacatattttttttttgtttcatacataatgccaattgctaaaataatttgtctgtcaataattaataattaaggctcgaaattatatgactaaaaaacctcaaatatggacataaaatatggactaaaaatgcccgaaatatgaactaaaaagctcaaaaatagccaaatatggactaaaaactgacaaaaattaaattttaaccaccaaaaatttcgagaatattcaatagttgcttaaacaaacttaaaaatacacaaaactaacaaaaatggatttaaaccagggctcccagatcaaaaatttcnaaagcctcatttcgcaggcgaaaaagcctcatttttataaagtttgcagataggcgccaccgggaaaaattttgtgattttcaatacgatttgttaacagatttgtcgacaaatatggccaaaaacattatgccattttatcaaaattaatcaaaatttaaaaaatctgacgaattttccccaaaaatcttcaaaatttctcaaaaaaccacaaaaagcctcaaaatttctcaaaaaccacaaaaagcctcaaagcctcattttgaaaatttagcctcattgacctatcaaaaaaccacaaaatgaggctaaagcctcacatctgggagccctggcattgaccaggccagaactaagaaccttccccaccgaatctctggcttagagaattggacaattttacatggacacgagagagggttgaaattggattttttggcataatgccattgggccgaaggtgcgaggttttaaattggaggattttaggtaagaatttcttggcacggtgccagggttcaagttccgccgatccgaattgccgatttaatattttttgccgtttgcctaaatatccatggggaccgaacggtgtggcacagattttctgctttgtccttccttacttggccctcaactagttttgccgggatttgagtcccgacaccgaaattcgagtcccagttttgtcgggatctcgatcctcccgttttccaataaaaaaaaacggatcggcgtctcgggaaatcctaatgggatcccgatcccttcccgtttatagtctcgaattttcggaggtcaatctcggtccgagtcttgccgagtctcaaattttccatgcctaattttctgggcctcaatgcgcggctggccagcagcagcctttttccaaaacagtggtgccaaatcttagcattcatcagaggtgccaggtcgtttcataaatccgccaattttaacgaatttttcgacaaaacatgggataactttgcttaaatgcaatcaactttacaaaacacaaaaaaaatcttattattttaattatattcgtacaattagtacaaatattaacacaaataaaattagttttcgcttttttttttgctcattataaaaaactcattagcaattcattttcattttctgttggtcgtttagcgccaccgccaccgaccgaccgaccaccaacgatggaattgtacaaccaaaaatgaatcatcccctggggggcttttatcgctattagcgatcggtttaccccccccccccccatcccatcccatcctccgtcctgcttatctggtggctttggcctgtgggctgtgtgcggtgcggccgtgcgctgccgcccattggccgcgtcgcttcggtccgcagggaccgcccatttttgtacggccgaccaacgcatttaagcgctgatcggccagcgaaaaatcattcactttcataaaaattttttagctccaatcaaaaagcattcaattaaaatagggggagaaataggaaaagccaaaaaagaaaaaactttttttaaatgggacagcaattaaaaatattaaatgatttatacaattttagtgcatttattaaatttcatttgaattaattccttcgctttaacataattttttgttttagggattttatttatttttttttcaatttataatcccgacaaaactcttcaaatcaaccaaccgccttctcattcaacatgaacaagtgtttagcacttgtgtaagtgttaattggggacaaattcataattaaatgaggcaatttaaagtctcccataaattttgatcaatcaccatcagatttctaaatgctttcaattggtccaaatattataaataaactaattaattaaacgttattaatcgggaaatcctgatcaaatttgactttctcccctctatttagtgtgttgatcgctctgatcagcgcgctggacagcgctgttctgcgacaacggcgcttcgtcaaagcggaaaacgcactgaaagctgagc

SEQ ID NO: 9918 - DNA, 1679 bp, Heterodera glycines
cttgggtattgtatttaaaaagaaatgcctattttaattacatttgccaattttaatttaaggagaaaccaacacgcgcaaaaaacggcaaagcggcggattggcacggggagataatgtggtgccgaacaaattcgatctgacactgccaggccagtataaaacactgaaattgttttagccaatcttagaaaatatttaaaaaaatattcagcgttgttaaaaaaattttgagcatattttttagcaatttttacccaaaaatatgccacaaatctttgagaatttgtgtcattgttgtgtttctattgtgaacaaaacaatcccaagttttgtgtcttattgtccaactttgtccaagaaatatttggcattctttcccccccaaattaacatttaaaacaattaattaataattattttgaagagcatgatccatcgaagtcagcagctaaagcaccgaaatatgagcccaaaattgaccggaataatacgcccgtcgattatgacggaaaggagaaaaagtgtaaagtggaggtgggcaaaaacaaacaaattaaatttattgaattgaaattgtacaggctaaaataaaatttgaaaaattaatgaaactatttttcgatgttcatttaaaaaagaatcaaaagaataaagtgttagtaaaatttaaacaggcaaatttgatcaaattatgacaatttacacattttattcaatattaatttaattttctgtttttttttatattttaaaaatatttttgaatgcttgcaggctaacattgatgttatgtctgaggaattgaagaacatattaaaagagaaaggagcagacaaacgtgacatcaatgccgctgaagatggatgcggactgaaggaatatgcgtacgtttttatttttatggcaccaaattttccaggccaaaaaattgggggatttagcattgaaaaatgataaataaatccaaatttgtcaatggattcaatttgttttaaatcgttgatttgtgagttaagtcttccctaaggcgaaatgtccaatagacgcaatgtccgatttgttttcttaattaatatttgcatttaaattgtgccccattttcagtgaatggtcccgctgcgcgaaggttaaattgcttcttctttatacatatgactttcttgttgatttgatcactttttgttcaggtggcattctacggtcgtggtggctataatgcttccaaaaagtacggcatcgaaaaagcgaagccaaccaaaaacttcaacgacatggacgagttcgacaagtatggcttcatgcacggtgagttttgttggcatttgaaaatagcttttaaatcatgaatttattatagaaaagcataaaatgaaatttttagcacaatgtggaaaaaacggggattgttggccattttcgccaacttttggccattttcagaccaaattttggcaacgttttaagacaatagggacccggcggtgccatgaaaatttagcaaattaaaggtcaattttgttaagaaaataaagtaaatttttaaaaaatgcccattttttctgcaatatttttgaaattttacgggcatggaatcaattttatgctaataatttttttattttacaaaaaaaaaatttaataaaaaatttaaaattttctttccttctcagaccatg

SEQ ID NO: 9919 - DNA, 2234 bp, Heterodera glycines
  unsure (1)..(2234): unsure at all n locations
tattcatggaattgtgttgtcatattcngtgtgnttgttcatttattgttttttttaaaataatttctaaatgattaaaaaggatgaattgaatgagaggacaaaaaattactattactaatttaattttttggttatttattaatttttaaccaaaataataaaacaaaaaatagttgcaaatttaatgaatcgcttttattactgaggaacaacagcagaacttcttttgcagaatattttcaatacaaatgcaaattctttgtgaaatgccttacgatattccaaactaaaaaacaaaaaataaaaaaaatttaaatatatttttcaatttacttcctccaataaagaatggggccatttgatgaggcactgatgtgcatcaaaatgccaccaatttgagttgcgtgccatgccaataaattgttgccaaagataggtacaattaccaaattatttaaaaatacaattagataaccgccaatattcacaacaacgatcgtaaaaagcgatcggaaaattctttgattggttaattgggttgagttagagatggacggaactaattataaaacatttttcagttgccataaaatcgaatttgaatgaataaatacctttttggcattgcaatgcgactgcaattagtgcgtaaacagacacagaaattatcactgtgattaaaccggagagactgagaatgaaactttgctcctaaaaaacaaaaatattcgattgaaaatgaaaaaaaacgcaccaatttacaaattaagctgccaatttcgtaataattggcaaaaacttcaagtgaatttgttttttggtcaaaatattttgttgaggaggcaatcacaaaaatagcaattaaattaaatgtaagtgcaattcccaagaacaatttttgattaaattttcttcaaataaataaaatggtaaaatttacaatgttaattattaattattgctctataatattaattattgtttgtctaattgttcctactttagcgggaaaagcacaataaaaagtcgctcaacccccgtgaaaaacatcaaaatcattgcgcaactggcgccaataaaagggataagtgacagacgataaagcatttgaaagggcataaagtaatggccagaaaaaacggtgtaaaccgagatgaaattgccactcaaattaagcatttcgctgagggaataaaatgccaacaaaatattcacggagccacgaaatgatctgatgggaaaaggaagaacagcttgcttttccaattttaaaaatgatttttgaaaatcagtgaattgacctgcaaattaaacaaaaatttcatttaaaataaaaagctaattatgtgaataaaaattacttccggcgctaaaacactgctgctgcttgaaaatttgtcaaacatttttaaatattttaaaaatttacaaatgatagagaaaaaatgccactttgaattgcgtgacattcaaaacgaaactgttctcttttaatgtaccgaacattgatatggccatgattagttttcgaaaagcacaaataatgtgaatatatctgcaattagataactttttgcgcttctctccctttgattggtgccgacaatcccatcgaattattttccttctcggcattaccattttctcattaagattagcgacatttgcgccgtatttctgtacgcctttaactaaatgggagaaccctttgctttttgcccttttatgacttaaacggcgtaaatatcaaaatcgttatgcaccgcaaattccggcataaaagtcggaaatgatgaaaatttccaactttcccccggcagagcctatcggcaccgccagcccccaaaacttacttttttcttaaaattaactcaaaatccaaaaactgtttcaaaaagtttttttggaaaaacacgccgcaaaaaacatttttattggcttttttcatttggaatataattttctaaaagcagcttttttaccttaagtgctgattttgaaaattttcagttgaaaacccttgggtaaatccttccttctgataattggcttagatttttttttataacaatttagcctcatttttaaattaataaattatttttatgtaaaagatgttttttatcactgctcttcaacaataaatgagagagagaagaggtgtttttagtctctacgaattcactttgctaaatgcttttcattaaaagtgagtcatcggtaccattctt

SEQ ID NO: 9920 - DNA, 935 bp, Heterodera glycines
atattcactcccttttatacccccccccccttccttaattcatttcgcagtgccacaatttccgttaattaacaaatttaataaaaaaaaatcaaatgcaaatactggaccagtcagctcttgttgaccaaaacaatttgctttcaattttcaaaaagcttacttccgattaaatttccgccggatttattttttgcaaaaaataaattaaaacctataattggccaaaactcaaatgaacggcaaaactctttcacatttcattcgtggcactaatttattatattacgctcggtaatttaatttatgtactacaacccacgcaattttgctaaaatattttgcatttatttgtcagctaccctaaacaggtgttcaaaaaataggaagtaaatcaaaaagaataatttaaaatacatttaaaatctggaaattattctaaactttaattgtttttaaatttatccgtctttgtcagaacaaacaaaaaaatctttaaaatattagggcccggaattttgaaaaaagatttatggactcccctttctgttaagtaatgaatagagctgggatttttagctaaaaacccccaaaaaggccaaaataagtgcgaaaataggtgttaaaaattggaaaaatccagtgtctttatgtacaaaaattccataagtgactaattttttatcaatttcgcccacacaattgcaattggtcaagaaaataaataataaatattgtggacgaatttttgggaaaatttttgtttcttaggggaatattttctgaaattttgatcaatctttaggggtatatttaaaaaaaaattttggacaggttcttagggggtgtgtttttcaattttattgcatttttgctatgaaatttctggaaaaaggccaaaataggtgctattgacagaaaggtactcattcagt

SEQ ID NO: 9921 - DNA, 1216 bp, Heterodera glycines
ctcaattttaaaacgaattttttacttatccgaaatgatatttttgaccgattttcgagagacttgcccggaagccggttgcctctgaaaatttcaactctgacctgaaccggcgattttagaacggtattgacaggtttacggtttatgttctctagccaatcctttcctttgaattggcataatgttgattatttttttaattcttaggtttcctactttatcgaatttgaaaatccggtttgaccggtttttgatagacgggctcggaaaccaattgcttctgaatgtcagccctgccggctaacttagaaatctccttctctaaaaatttcttacggtttttctctgccgttatacataaatcattggaagcaagtgctcaatattaattcaaattgtctacctgaaaatcattttcgaatttcattagccgccgatgaccaatccgtacccattttatttctgtccaaatacaaacgatggcgcagtaaacagcggcactttggttggtaatgtgcaacagtcttcggcacagtcactgtctcatcacccggaaaactttctgaggcattttcattgaatatttaccatatgcattttcattaaacgtttaaggcttcagcaatatgtcgagaatctccagagagaacagcagagaaactttgagatgtttgtgcaattggaacaggttttctaatggatcgcccttttttaaattttaatttacgattcattaaccaaaggaaaaaaggaccattttggcatggaattcgcacctcgagagggaaaacgcggcactaaaagccgaaattgtgcaactgaaaaatgccaatgcgacgaggggaaacggacagcaaacgaaaaggcaatcggaaggagcgaaggaaaggccgggcccagaaatgaacagcgaggaacttattgtaagcagagaacgcggttttgaaatgtgcaaaaaaataaaaataataatctcccattaattgggaaaaattctcacagaatgaatttgtttaaccaggcaaaaaattcgggggataaaatcggcggtatttttttctcttcgcatctccaaaattttttgttcgatttcaaaaaaattgagccgtatattgagaaaaagaaataaataaaacttgaggacgcgttaattggcgacgggcagcacgaccatcgaatgcaaatggcacagcgaattgtccaccgtggccat

SEQ ID NO: 9922 - DNA, 1821 bp, Heterodera glycines
aaggagcagtcgaagtcgaacaacttggcccatgttggtcgatcacaacatggttagatgggatggaaagcaaaatggcaatatttcgtgggattgatggacaaataaataataattcgcgggttgaaaatgcaaatttttcaggctctgtgggacagatatcgagcaatgtttgcgcttagaaatttgaacaacgaccgagcaacaaaggcattggcggacggtaaatttggcactcaaaaaggggggggggtgaaatattaaagtaatttaggttttacattttcctttcggtaattaccattgaaaattgaattgtgtgcccatgaaaaaacgcattgtattgtaagaaaacttaaagaaaatttttttttgaaaactatattattataaaattttgaaaaatcgcggaaaatttttcaatttttttttgttaaattttattaaaaaggtttctatgcttttttgagaaatttttaattttgtttacaattactcgcctctttcccaaggtttgctttgtgatgacagcagtgcgctgttccgtcatgaggttgcctatgtgcttggccaaattcaatcgcccgtcgccatcccggcattgtccgctcgactgcaaatgcacggagagaatggcatggttaggcacgaatgtgccgaggcactcggctcaattgcaaccgacgaatgccaacggttgctgaggcaattcgttggggatgaagaggtaatttgccgggaaagatggagatgaacaagggattttgattaatgcagtgggtagaattctccataaatttgccttccagagagttgtgcgcgaaagttgtgaggtggcgttggacatcgccgagcttaatcggacggacgaatgataagcaaaaaagaggaaagaacaaaaaggtgtataaactaatcaatttgttgcttccgcccggaaagaccaatttattatttaattgttaatttttgtttgaatctgattaatatattttatatgaatggtctatctcttaattcttttgctcattataaagatccgctattttatttatttttctcaaattaaattttcgaaatattttccagtgtctttctcgtcaaattgcgcctcctttcgatgctttgtttgcgaagggttctttcaaatggacattcgttcgtcttttctggtgacattttgcttttaaaatttttgagctatatgaacagggctcccaacttaaaattatcaaaatcagcatttggccggcaaaaaatcgcagattttcaccaaaaagtgaccaattttttgcgttctgagtcctttttataaaatatttttgggcccggcggtgccgatagactacttttgaggtttttttccaaaatcagcaaatattgaaaatttagctctttacagtcataaataggtacttgtctagtttacgggacaaatttcacatacatttttagatgcctataaaggtactcattttacattttttaagcaatggatgatatatcctcattagcatcttgccaatgagggtaaccttggtacagcaagcataaaattcgaaatttgtatggatggtacctcatgggcatcttgcccatgagggtaccattgatacaggaagcctgtcaattttttgtccctgtacagctcttgtagtgaattatagcgctgatctgagtccggattcgtgatcagcgacctcaaaaaccccttaaaacttattttcaaatgtacaaatccccaaatatgtactaaaatatgtaaaagaaatttttttaaatggtctaattttcagccaaaaattagccaaaaatattttt

SEQ ID NO: 9923 - DNA, 1879 bp, Heterodera glycines
  unsure (1)..(1879): unsure at all n locations
aatcccgaacctttaatttcatcaaaaaaaccgaaactctgaactattattgccttcattttgtttacgtgtgtatacntaagttggttttgaaaaaacgctcgtaattcgggactgggctcgaattggttggaattctcggaaaacctgttttcacgattttctaaaataaataattagtcgtaagcattgccattaaaacaatgcatgccatttttttttatcttttgtttcagtccgaatttacggcggacgatgtcggaaaattgtacaaagtgcccagcaatctgatgaacgtattgaatgtcagaaggaaaatgccggagttcttcgtaagacaattggacacgttgcgcgaatgcgtttggctttaccgtcagcaaacgcaagaagtgagaaaatggacatttgggagaaaatgccattggcattttcaaaaaatatcaaattaaaagtccattcgctagtgtttaggctttccattgtcttcacgaggtcgacttggctcatcggcccgcccttcgcctcgtcctttggggccattttggcaccggaaagacaatcactttgagtcaactgaaccacttggcaattaacaaaggatacatcattttcggcgtaaaagatggtaatcaattatctcatatattaatatttctttttttatggatgggttttcccgtcttttaaaatttcgaataaaattcttttagcgttgcgttggtctcgtgacaattaccgtcctgtacaattgtccacgtataaacccggtcggttggacagtccatggtgggccgtccgtttgctgaccgccttcaaagttgagaatggccacgcgtggaaaaaactcgcggttaaacacaacaaattttccgtttttcactaaaattttttgtaggaattgaaaacaacgaaagattacgaatggacaaaggtggaaaagacgccgaagagaaagcctttgacggacattgtcgaaatggtaaacaaacgaacgacggaattcacttctaaaatttagcgatggattttattttttaattacttaagtaaacttttcaaaaaagcggagttcgcattggttattcgtcgattggtgagaccgtttagcactcgttcatttttgatttgttaactcagaaacattcgcaacaaaaattaagacaatccgctgattgactcgctttttcagggtctgaccgcccccgctttgtccaccgattgtgtgggcgcactttgtcgcgaattgcgcgcgcacgcctccgccggctcaataaaacttctggtgaccattgacaaggcgaacggtctcttcagcgaaaaatgcgcggtgaaatggccgacggatcggagaaaagtgagaaagaaaaggaaggcaatgacagaaaaacctgggaatatttgaagatttattattattcatttccacaggcaactccggatgaattgtcgttgaacatttttattcgtaagtttttgatgccaatttggtcaaatggactgtgcgcaatgattgccgacaaagcggtggtcagcgacgcgcgtgaccatctgtccgtctctccattagatccacgcagtttatttggcgaaagagtaacattttaaatgtgtgccaactttaatttccgcaatcgcatgatcagggctatgaacaaattgagccattcgtatcggtggagtcacaacactattcggaggccgaattcaatgtcatccacgactattatttggaaaagaattggattagacagaagaagggacccgagggggaggaggcaaagcgacagatgatgtatttgagtgcattcaatccgagccattatgagagactttgctcattctcgtggaaccttagctgtagtgttccccgttttaa

SEQ ID NO: 9924 - DNA, 934 bp, Heterodera glycines
cggctggtatacacaaatcaatagtgcattttcacataaatggctgatgaggacagctacgaaatagatgaaattcttataacttttttatgattgtcaaattgtttagcactcacttcttttcaaaaaattagataaaaatttgttttgtttagtttgaagatgttgcgagttatgaatgctcaaaacaaccaatgcgaaaaaggcattgatcactgatcagtatgttttttgattagcacccagaattacgctatttggcattatgaatcattttgtctaacacttggtttgacccatcgttataccatctaatcttttaaaaaacgaattggaaaatgaaataggaaaatttatcatacataaatactaacactttcaaaatttcatattaatttttaaaagttctcaatagtgtcgaatttactcaatgtcgaaatagtccagtgtcgaaaatgcaggaaaacagtgaaagttttagaaatacttcagtgtcgaaatttctttgtgtcgaaaatgtagtgtctaaattacttagtgtcgaaaatactcagtgtcgaatttacccagtgtcgaaattaccagccacgcagctaaattagcctttttgagcccaaaacccgaaaaatttttccaaaatcattttttcgccaaaatttctcgagaatattgaataaatttaaattttcttaaaaattaataaattatgtcaaaaataagcaaaaaagcgaaaatttcgcttttgttgttgattttgcgctaaaaaaattaataaattttagcttttatgtttttttttcttttaaaatgattgcacgtaattgccgaaaaaattcgagaccaatttccgaatgttgaccgactaattgcaaaacgaaagccgtctttgtcaaagcgccttaccgagtcaaaaaattggaaatgtatctcatat

SEQ ID NO: 9925 - DNA, 4252 bp, Heterodera glycines
ccctgatgtctgccgttgttgatggccctgatcactcctggcatgacgaaagatggcaccaagacgacattctgcaccgactgcgcctccgcttgacgcacaattggccttgatggagccagcctggcaacgtaggatgaccaatctgcgctacttgttcgaaagctgctctccagtagtagccaaccagaaccagcgtgtctccaacggcgagattgcgctgcaaacccaggccttgcagcatgtcgtttccaacgcgaacaaagaagggctcatgatcaaaggctgccgccacaatgacgtaatcctcagccgaagcttgcgcgacgacataatgccgcaccaagttgttcggtgtcggtgggtgcgtgcgcacctcctctcggattatcatgagggcttcaccaagagcgttctgcccgagccaattggccgtagccgttaaaccgacgtcgtgcatctcgcgtccagcggcccaatactcatctctggacgcctccaccaattggccgtagcccgtcgttcgaagggcactgcgcaagggctcaacggcgaacttggcacgcagcgcacggcacatcaattcgaagcggacgacgtgccatttttgctcgacaaacggcatgatgtgacggccaagccgttttgccgccgccggcgttggctcatggcggatgtgatggaacgaggccatgtcgccgaaatgcgccgccttcagcataaagtaggcgtgctcgctgctcattacgttgatttgcccgtgttcatcaaaattcatgttgaaagtgtggacgaagtgattggaaaggacaaagctcctggagaaaaacttgaaagacgggacgttgtccaaaagaaaaggcacggcgacggagtccatcagaattttatttgttttagatctgaacttaaattcatcagaaatcgccacaccttccacaattttgagatttttaggtggccgtagccgttgtgtcgtaatttaagcggccgtagccatgcggaacattaatttgtttagtttagatatgagctttcgccctcagcccctcacaccaacaacaggaccgtctctggtcctcatttaaaataatatttgatggaaaaggtgaaaataaggtcatggaagagagaaaagaaagaggaataagtaaaaaaaaatgttagaacgagtaagactaaaattaattggggcacggaagatcagatttatttgccaagaaagagaaagaagtatcaaaggaggacaagaaagaaaagtgtgaacgcgaagagaaaggagagactcattttgacgggcattcacgggaccaatgaccacttttcttacagttgaagcaggctcccctggtaatgttttgggttccttgcctactgaagatgccttggtcaaaactgttttgaccgcgatttgacggccgtggcctttcagagtgtgatgctcgtatctgtgatggagcaaatgcacgccagccaaccgagcgccctctgaccggtcccccagccgggttacgagcgtctgttggattcgtaaatttgccgctggagggaattggggaataaccatttaaattagccaaaattccatccacgcgcttaattttggtgctttccatcattcgcaaatattcttcattgaaaattggcaccatttccttggctttctcaacaaaacggccccaaactttgcaccccatcagtgtgttaaagtccgcaatcaagaacatgccttctcttgcacgtgaaagcgcgactgtagctctatggctgtcttgaaagaatcctgaaattcttgaagagccaaacgggttttgatcggccgtagccgccgttttcgtcgtcacaacgatcaccaaatcagcttctttcgcctgatacgaatccacagtgtggacttcgatggtccgtgaaagcatcttcttttcacgtgcttccctcatggccgaagccaattgttccttctcatagagataaaggcagatgatgacgattgtgttcgattttggcaaatttgcatccaaaatcataacgacttcctgcgcaatccttctgtgctcaacatttgagagcgaaaaggaggtttcatccatctgaatccgaccttcggaatgaattagcacaaggggaattccagccattggcaaattgattgccgaagttgtgagtgatgtcctcgctttggtcactgcttccactggcaacagaacttctccgtgtggcacgtatgatgcgaaggagacgcattcaaccaaacttccgtgtgatctgtagcatcttttcagtacagtttcctccattcgtggcgatttcagcagttgatccgtgatcgattcgaggccgaagcctgaccagagtacttcttgcagttcacttaagtggacgccaagctgacggacgtccccggtgaccatcattttcttgagattcggtgccccgcatgccaaactcactacggtggtgaaacttgcctgcgttgcttcatccaaaagaagatgggttgcacaatttatcgtacccttgacgcgaccagccatgtgagtcgtgaggaaaatgactttccttttgtcgtatttcagataactttcagccactttcgcttctcggacccgcagaggtgtgttaaacacgtgctttttgtagtcctcaaattgctttacgtcctttttgtctttgacttcttccaagaatgtctgcgtgagtcttggccgtagcagacttctttccaacggttgaatttgctcgccgtagcgcactctggccgttccactgaagagtgccaagtgttcctccgaaactccaactgcccgagtttcttccaccattttggtgacagaaaggttagacgtagctgtcgccacaatgaccgtttcctcatttttctccgacaaaagaaggtcgatggccgtagccaatgttagtgtcttacctgtgcctggcggggcttgctgcaacacaaccaaaggaaggtcacatgcaatgagtgccaaagtttgttgttgttcctcgttaagtcgcgctactgatggcattgccgtcttttggccaagaccataatcaatcagtttttgagtggtcactttcagtccacttcttccaggcctggcgaggagtgctttcatgatctctcctcgcggtgaatcctcttcggccagtcgagacggttcatttgtgccgaagcaatcagcatggtctgagaaaccaacagaagcaccaaccgattgaatgatggtttcttcaccattcaccatctttctgaagttgcttatttgaccatcactttcatggtgtccaaggcgaactttaacactaacaaaaaatatgtcactgccttcttcagtcttttccgacgacttcttaatcagaataacttgcccgtatgcaaatgccttagcatcaaattccatttttgccgtgacgggggagtccgttgtccattgtttgacaagttgtttgacaagctttctgtccttcgtctggaacttcagccagaagtatttcgggaattcttcatttccatccgcgtcagcgttttggtcccattgcggccgaacaactccaacgaattgagtgacaagtttcagcatttcctcatactcagaagctgctactaaggctgctgccacaatacgttcggcaattttcacttcttcgtccgtgtactccggcacaaagggaaaaattacaggaattcccatggaatccatgcgcaaccaatcccggtcaaagaggtcggccgtagccggaatcatagtcccaaagtccgcaaacaattccatcccagaccttaccggactttttggtggcaagacataattcggaccaacgtaccaggcctcaggaacttttgccaaattcaatttaatgatctgagcctttttcaaacttgccatgtgagtgtccgggagaggctgacgctcataaagagccatagctctgaccataccatatgcagtgactgaaattgacccaatggttgcttcagacgctctgccacggcgtgtgagatcaacgacgatgccatattgctcatggtgttttgcaaaacgaacttttgtcactttcgtcacgactgcctgacattggattaaaccggcataaatccatttggacttatccaagaattccttgcccgagatgtactcgtacccgttgaccaaaaccttatcacctgggaggagcggacgctcaaactcacctttgaagtcgtccggcatgaacatcagaaacgggaaattattttttttcatccgga

SEQ ID NO: 9926 - DNA, 6632 bp, Heterodera glycines
  unsure (1)..(6632): unsure at all n locations
ttcacggtcggcttggtgctcatcaacgacttcagcatgtcattcttggaaagaggaaaagtgccaatcatttccggtttaaacattaaaaagcaaaataaatttaaaaaaaaatttcgctaaaattttccggtggcacctatcggctcggcaccgtgggaaaccatgattttcccaggttccgggtcagggatttgtatgtttttgaaaaatgcaacaaaatccgaacgccttttaagacagggcttttcgtcaggaattttgtccgggtcgtccattctcgaaacccgggtcccggtccgttttttcattatccttggctctaattttggcaaaaaatgtgtgtgccctcggattttccattttaaatcaggccataccatagacagaatcggttcgctgagtttgtcagacggcacgtccagccaggacattggcaccgcgcctgggtcgcccggtgagcagggcgtcaacaggtcatgagcatgcacattcggatcatgcggagacggaccgctgaccttagtttgagaaaacatgcattagccaatgaattcatgtccgaaaatgccaatgttgccaaaattccatgtttcgctcacccttttgaaatgtgtggcgtcctgcactttgcgcaccggctgcatcagtgcgtccctcaccaccatgcaaatgtcgtgccctgaatagccctccgttttgcgtgccaattcgcgaaggtgttcctccgtcaaattgttgggagtgtcgccaatgtgcagcttgaacatgtccttgcgtgcgtttgtgtccggcagcgaaatgtaaattcgtttctgaaagcgaattattggggaaggaactaaatataaaaatatgaaattaaaaaaagaatcgcattgtaaaaagagcaatttgtcatcaattttttttaaacaaacttattaaatttgcaaaaaaaaatagagcaatttgttttctggggaaaaagtgttaattgtaagaaaatttttgaaaataacagagcaaaaaagaatttggattcacccccaaaggggagatgtaaattggcctaaaaatgaatgtccaaatatttaaagcatttttatccatagccagaatgaaattcgtaggtgaaaattcgaaactgttgttcgggtgaaaaaatcgttttctccagtgttgtttttcaaaaaaaaattcagtttctttgttttttttttgccaaaaattactaccgttttaggtcaaattttcaacacacagcgctaaaatcaaatgttcacaattggtcctactctaaacaaaaaatcaggtaacatttttgcaaattttttaattttgcttttcattttttattttaaaaattttcctaaaaactatgcaaaaaattgcactcacttcaaagcgacggcgtatcgccgcgtccaaaatccacggaatgttggtggcaccgagcaccaaaatgccgtccatgtcgtggccgacgccctgcatttggacgagaaattccgttttgatgcgccgcgcggactccgattcgttgtcggagcgggaggagcacagcgagtcaacttcgtcaatgaaaatgatggacggtttgctgcgccgggccaactcgaacagttcgcggaccaatctgagaaaagggaattggcaacggatttaaatgtcgtataatccgtgggaatgccacttaaatttttgatttttatgtacaaattctgtgcccgaacccaaaaatttgcaaattttatgaaaaaataatgaaataacatcatttttaatgttcaaacttttccgattcgccgagccatttcgagacgagatcactgctggagacggagatgaacgtggagttctgcgcttcggtggccaccgccttggcaatgtacgatttgccggtgccgggcgggccaaacagcaaaatgccacgccatggggtgcgcttacctaaacgaaagttgcataaaaattaaaaaatgtatttgaatttaaaatgcaaattcccataatcaattcatgctaaaaatttaaagaaatatgaagcaaaaaataaagctaacgaggctttatatccatccaattaaggaattgcacttttatttttcccaaaagccaaagaattatggttaaacaatggctttttctcatgtttttttacattttctgttatgtccaactctttgacgagagagacacaagaaaagagcatttccatttcatgcgccccaccataaaacaaagacgggagacatcgcctcgcgggcgtggggagggatggcggctgtttgccatcgccggctggcagagaattggacacaaaataagccgactccatctctttcatactctcattctctcttttttctttctctctctccttccctctcactctctctcttccttttgtgcccggaggcgatgtttggccaaaagcatttttcatttctctgccccatcaacagccatttgtccaacgagacagacaaatggacacaacacaacaaacgccgccgccgctgaagccgccattcccggaccattttactcgcccagccgctcctttctcccacaacggtcgcacctcgtccaagtcgagaatgcagtaaaggacagcaaatctatgatctaccccattaatagcatcattaccctcccgtcacacggatgaaaaagggcccacggcataaaataggaggaaaacgaaaatttcttctgattagggctaagagaaaagcggagtctttcaacccatttacaaattagctaatgtgatggcaaaaagtgagtgaatgtgaggtatttttgcgtataatttgtgcctctctctctcccccgcccaatttctttaaagggcaaaagtgaaagaaagcgctgtcgccgaacagaaacacaataaaagcactaacaataagaagcaggccagcacacatagactttgtggcagcacaaaactttttttaaattgaatttactcactgaaaaagtctctcattttgcaacattaaattaccaaaaaattattaatttaatgttttaaaacatttaaatttaatttttctgtttacgttttatagtgaaatactgtggtacatatattagaattttacggcatatgcaaaccgaacaaatgcaaacacccgcagacacaacaaccacaatcgtacttcgcgaaatgttggttgatcaacaacagtccgacgacaactcctccgctccatggccgtccattgtcaccaccactgaccatgcccacccgtctttgttggtgttcccaatgggtgtcctcactgtgctggcacttttggccaacactgcgctgaccgtttacattgtgtggcgccgtctctaccacaactatgtgtcctcccaattcattttgcacttgtgtttgactaacattgtcgggctcagtgtgctcgtcccactgttttgtgtcaacctgtggtcgggcaacaacctttgggagaacaaccatttgatgtgccgaatgcaggtggtggaggatttgatttcgatgcaaaaaaacagggcacaaattacatggcattctttctggatgggcaaaaagtgccaacaacaacaccaccaccacaacacttggcattatttgccttttagacatttatgatgtgctcagtgtggaccgtaatccacttcatgacactgtgcatcgccggcgttcatctgttgacttttgcgcgcattcactacgcccaactgtttggacttccgccagggtcattttaaaaaaaatgatttgaaaatggatttaaagtggaggtttctcgctggtctaaagaatcgagagtctcgaaaacgtcactgtattcgcgcaacaactcaacattcagatcgctgtgcgcactggcgtggatcgccgcgttcgcggtcgcactgcccagcctgaccaactcgcacatcgttgtctacgacccggcactgcgccactgcgtgtggggcagcaccgactacagctacaagttcttggcctacatgctgatcctgtgcgtgctcatcccctccattctgtcctacttctgctacatcaaagtgttgaaaattctctaccactctccaatcgtgttccagtccatcggactgtacaagagtcgctttttggtctacgcctttctgatggggtaaggcactaatccgtcacattccatagatttgattagaattctctaaattttccctgcttatcggcacaatcgagccatcaacttcttaaaaatttgatccgaaatcctttgcttaattttttagaccaatttttttaaaaacggctaaaatccaattccgtcgatggcatccccagactcacaatcatcatagaaaatgacataaaaaaattcaaattatgcattttaatcaaatcgccgataaaatcccaaaaattggtccttcactacgcatcgcaatgatcagaaaatcagattttctcatcgatcaatccaattgcttggcactcatttgtcagtcacagtcaccaattgttcaggccgctctaccaggcgcccttctacataatcacaatgagcggcacgtggcgctttggccacggctcggtgatgcccgttttggccatgttcctcggctacgcgccatcaatggtggccccgtttgtgtacggcctgtcactgttccaaatgaaggaggaggacatggcaatgaccgcaagggcacacaaaacaatgaacacggccacttatcaccaccaacatcagcacaaccaacaacaacagttgaacaactgcagcaacaaccgcggggcaacacaggaggcaagggcacaacttttgtagaggaggacgggcaaaggcacggaaatgatgaaggacagacaattcaatgctttatattttcttttttttaatatttattcattttaataagcattttgtaaatttatttcaattgtttttatttttcggtcgagaaaatttggtccactccttgccctcttttttatggcacaatttggtccccaattaagaaatgccaaatttcttacagaaacagaaaattaaatttcatcaccgtacctttgaaaatgtgcggaaatttgatgggcaaaatgacggcctccttcagcgcccttttcgcgtcttccaacccggcaatgtcctcccacacaacgttcggcttctccacaatgatcgccttgctcatctgaagaatttgcgattttttaaattttatacaattttttacgaaattggcaaaagttttatgttgtttttttccggtaaagaggttagaaaactaacaataatattaatctggagaaataaatcggatgatcttggcaacattactcggatcaggaacagaaacacggacaggaggacccagtgaaaaaccgggtgcacaacgtttcccgtccccgaaaaattttaaaaaaatttccaagcttaagaagctgtccaaaaggaaatttgcacaaaatactagtagtttggaaaattttgggatggaatgacatgaggggaacgtttcccgagaaaaccattcatgatccggtcctgttccacgctttaccccggaattaattttgcaaaagcacaatttggtgaaaaaattaaatgaaattgaaaaaaattgaaaatggtacctaccgccttttggaactttttgttctcgtccgatgcgtccgcctcgtctccgctcgagtccttctcattttccttcaccggccgtgcccttttcgtccgctcgccgccgtcgcgcaaaaatgccttcaaattttcggcacggttcatgtactccgtgattttgagccgaatggtctctttctgtcggtcggcttggcattcgtctgcaaatgaatgaacagcaaaaatgagccaataaaagccaaaggtgaaggggaaccgtattttgaaaaaaattgtgtcctaagaaattacttttggattggaattagaaatttatcatttcgtaatgaacactccctatcaaaaaaaaactccatggacaaacggatacaaatttcttaaatttttaggacttttttctcaaacccgttgtttttagcttcccctatgttatagaaatgcccatttttggaataggctgttgaaatgccgaagggtttgtccattttgttcatttatcttttcaaatgggtttaagtaaggattattccagtgtatattaattgaaaaaatattcgttggcttcaaacaggaactaccaagcagtgaattcgcaaaattgaaaatttcggtttttggcacttaataaacaaaggacgacattttttgagtttaccttcgaaagtacagttcctgacacctttctcgttttttcgggacaaacttcacagatatttttctgtcataaatttacaatagaaaagtatagccaactccctacagttttcgagttgacatttttaaccaaatctatgcaaagtgccgtactttcacccccaaccgtctcacaattaagaaaatcactttttcgcccactcacatttcaaggcgtgcataaaatattcgcatgatccggtgtataatcgaagtgcctcctcgtaatttttggttttgtcctcttcagtcgctttggtcaccaattcatggnnctttgcagtgcggttgtcattttttaaaagtgtgtgcaaatgcctgaaaactcaaatttag

SEQ ID NO: 9927 - DNA, 1113 bp, Heterodera glycines
atatatatatatatatatatatatatatatatatatatccttctatgtgtatatatatatatatatatatatatatatatccttatatatatatatatatatacatacatatttgttcctcgctaggatactcgtggatagttgaatatttattgtctgctttcatatgagagaccgcacgggaccgggcgtcccttggtttttctctgagtctatcgggattaaactcgggatccccacctgggatctgtcccgaatatttttttacattcatctgggattgattgggaccgagattcggtctgtatcaccacttagggtccctatgcgctcatttgtccggaatccgatgcatatttctctttttttaaaaattatatgaaaaagtcgatcagtaaatgtcgtctataaaaatttatcgaaatcctatttaaataaaatcgagctttttgttgacatatctatacattacattattttttggctatatttcaaaggatgtctttgtcattaaagaacacaccaatttccctgtggaaaaattacaatctaagaattttccaaaagtattcctaagaatgtgtctaaccaccctctgtgatgtattgcctaattttactcattgtacgatatatgcaatgctcccaatttcggggccccgttttttcaattgttcattccggtggtcccccacacgggtgccaatcagtttgcgacgctcttcactatcaggcggtagatgcaatgttggttcgccgacagaggctgaattttttatatttttatttaatttttttatattaattttttcaaataatgaaaaattataaatacatattgttttttactaaaatattcatattaatatattcttttttatggaatttttatatttaaaatatgacaataattatcttattgaattataaaatttctaataaatatataatagaataaattttaaaaactattttttctcaccaagtctgttggatgattgcattttgctcagaacaccaagcaaatagaggtgaaccggtgacattggctgtgaatgtgtggcaattgtttttggaagttccaaaaaataaaaaacggccaacgaatactccc

SEQ ID NO: 9928 - DNA, 4568 bp, Heterodera glycines
  unsure (1)..(4568): unsure at all n locations
cattttcatcattatttcaatttaaaattcgcaattataaaattaactaatttccgatttttaactttattttaccaatatttgtggtgtcattctccaattttccactgcccatttctaatggtttcgatttcgtcattttataatgcattgtcaatttatcagcactttcattgctgagcttttggccttccgctctaattgttgctaacatgtgctaaaattaattcacagtttcaatcagaattattgctaggaattcttttcaatcacaaaaaagttaattgcgagaaaaatatttttttttataattcaatctttttttttaaattaaaaaattcattttttaaaactaaattaatgttcataaatctgccagtggtgatggatttacgaatatttcaggacagcacaaacagccaataaaaaagtgttgatgataaacaattttaaattaattaaaaaattaattatttattcaaagaaatgaataaagtcaagtaattataattattccttgctaatgtacatgcatttaagcaatgaaagataattaaaaagaaacttttaataaaaacaaaattctcttacaattttgttaatgataaacaaaaattaataaattttatgataattttttaaattcattttaaatttaatacaaatatgcatgtattaaagttattaaagataattaaaaaacattcatttaaataaaaactttttcatctttaatatttagcttttctagatgaaaaaaaaaattaataattttaataatgaatattattattatctttttatcaaaacttacaacatcgtgaccatcatttgctaatgatttggccaatgagagaccaaacgcaaagtgactattgaaaggcggaaatgccggatgggcaaacaaaattttgagggccaatgaagaaccaatgtttgtgagttcattgaggcaaatgaaaaatgccaacgattgaaacattctaaattttctgtaaaaaaataataaataaaaccgatcgcttttggtctgagactttgttttcgctcgaactcgaaaagccataattaaaaaaacttcataaaaaatctacacaattctcgctctaattggaacataattaaaggaaaaaggcaacggtatgccaaaattttgttttttctcttgagaattactttctgaaaaaataagcaaatatataaatgtataaaattaagcaattcttttaataaacgtatacatttcagaaaatattttattggaaattataataatttaatattttcattcatatgcatgtatatcttatgaaaattttatttgatatggctttaagtcttttttattgactaatttgccagcacttgaatattgctaaatgattttgaattatttattataatataaaaaatgcattaaagaaaaaatgaaatttttacgaaaatgtttaagagatttactaaagaattagtgaaggaataggtgcataatgagaactaataaaaaattttaaaaaaactataaaaatcgacaattctccgctttaattacaacataatttgaagcaaggcaacggtatgccaacattcgttttttggcgttaagtgaaggctttttgttttttttaaacaaaatttaatcttattatgtattagaaaatccctatatattaaataatgaaaaaaaagaatttaataaaatatttttgattgtataaaattaagcaattcttttaatgtaaaaagtataagcaaaaaatataaaatgtatatatttctgaaaatattttattggaaactataataatattaatattttcattcatatgcatgcatatttatataaattttaattgatatggcttgtataagtcatttttattgacgaatttgccagcacttaaatattgccaattgattgactttaaaaaaaatttttttatttaaatgcatgaaggaaaataaatgaaaattttagaaatttttaagcgatttaagaaagaattagtgaatttcagctttcggttggccatatgttcgctgagtgacgcaattggccactccattagctaccagtaaaaataataaaatttattgcatttttttaatcaatttttaattgcttttattccttgtttttctccgcgtccggattcctcatttgacttgtggttatgcccaattctttgcagtcactggaaatattaattcttttatcaatctgttttggataagcgttgatcatttgtggcaatggcattccccgttttgtaattttttaaattcttaaaaactcaaaaaatttaatctacttattttaattaagctttcgcaacatctcaaggttcgctggaaaatatgtgataattgcaaatgtcttttccttgtcaatcgttttttatattatttatctgtcatttatatttgctctaaacatccagaaaagtaattaatgaattatttaattgtcgaattaattaaaaattttcaaattaaaagaattgtttatggtgggcctgatgataattcaagacgaattagttttggttgcttctaatataatcatgggaatttatgctgattggtaaaaattaaaattttaatcaattagaaaaaaataataattaatttttatggctcagtgatcagaactgatcgcagcaacagcaacaatcgtcccacccaatccaaaattgaaatcactaatcccattttcaaatcactactgtctgtgatcatggcagtaatcttctgcctttgattctccagttctctgatggtttgcattgttggccgaggactgatcaccagtgaccctcatcgaaatttttgattgatcaaccggaagtcatcattaattatttttttatatataaacattaaatcggctaattgattttataagataaaaatttaacaccaaaaattctaaagcttcatgttatcgtgtgatgggcggcggcgcctcgtaccaacccacatccgccaaatttgtttgtttataaggcaatacacaccatttgacaagatattattcaaatccacaataggttagaatttcatattaagtattcaaaaatttggaaatgtaataagcaaaaatttcatagagttttaaaaataggctttataaataaacatttaaaagagtaagcgtccaggaaaaaaaattaggtacgataaaattctatcatcaaaaataaaaatgcggcaattttttaactggtttaaaaaatttcaataatatatcaaaattttagaaagttttatatgggtataaagattcgaaactaatgctttactgtgcagcagggatggtacggaattccgatttccggtttccgacatgtttggggccggaattccgatttccgaaaaaatttagggagtcagaattacgatttccaacattttggataaaaagtcggaaattttcggaaattttttttttgagtttttttncaaaatttaacaatttttgtacaattttacaaaagtgggcaactgatcattggacattacgacagtgaatgaatgtcaaaacctttttcgaaactgttaagataaatttttatttttggtcgcaatgtccactgtacatnttgtctactggacattttgtccatatctgtccaaattactcaatttacacatatctgttacaattttctttggtatctggccttgcttaaagcattcaagcatttacatattttaattggttactttttcactaattgttctattgtttttagctaaatttatttatttttatcctgtttatcctttcttttgcttttttttgataaatcttttactgggagtaaactctttaatgggttgtcgctcgaaaaggagaaatgtgattgagttttattataattaatttttattttttgagaaaattttttttaaagggataatttttaaaataagtggcggattattcccaaaatgagcaatttcgacgtcatgaggtcgcgcagaaaccaccttcattgaacagggagtgttctcagtcatcatcaagtctcactataaattgatctctcaatgatctttgagtaatttgtttagtataaaagggacaatcactcacctttcggaaccgaaataaaagtgcaatcaattaattaattgagtcaagactctcgagccaagggtgtaacactacaaaatgatggtctatcccccatccgaactgatcgacatccttctggccaacagccgaggcggattggaacggtaaattgagaaaaatgataaatattgacaaaaaaatgaattttatttcattatttaaaaaaaaattcagtcctcaaattgttttgagatttattcaatagaacactatgtatttgaaattttaactcagcttattcaattttgtctaattaaatattttaactttttttaaaaaaagcaatttaagataatatttattacgaaaatttacaaaaataatactattcttattagcatttttcgcataaaatttaattggaaccgggggggagtttatttttatactgtaagaaatgtgaacaatccgactctgagatccccgg

SEQ ID NO: 9929 - DNA, 2548 bp, Heterodera glycines
gaagtaatgaaaataaaaatagtgtaaataaattcttttaaattattataggcaatattttgaaaattcaaaaataaaattttttttttggttaaattttttcttaaagagccaatggctttaaatagaaaatgaaaatagatatttgatttgaaaagtgatttacttcttctaattttcattttattaaccgattataaatttggagttcattaatggtgataaaggttcataaaattttttttaatgaatttattgattatgacaattagaaataaacaattcacataggataatatgttttgaaaattttataattgtttcttcttaaaaaaatgatcacatgaatttcaacaaaccttgattagaatttatcaaaaataacatatataggtaaacaataatttaaaaaaattaaattaagaacataataaattatcaatttaggatttctttaaaaatgcataatttttttttctattttacaaatactaatttcggtgcttggtcgtttcgcgaaaaccgtaaaaatggtgacgtcacaaaaagagagtttcgcgaaaaccgcaaatatttcacataatgagaccgatccacatcagtacggtgttctttgtgctaaaataattttaaaatatttataatgtgtgttccttcccttaccgtagacaaaacaatgcaaaaaagaaaagcaaaccaaatgaaaattaagcctataaaatgtgtatttttaaatttttaattaaatctccctgatcaacgagctgaatagccttacaactactaaatcgccggttacatatttttacatatgtaccgtatgctaattgtctataaaaatatatatttatcagttaacaaattaaagaacctcatcccaaaaacactattaaataaattaattagaaaataatttttttatatttattttacgtaaaaaatattcatttgctttgcttgttttgcttgagtggcttgaaacagacattaaagttgttttttttcttaatttaacaaatacagacaccgtactgatgtggcccgctcttttgttaaatattttcgggttttgcgaagaaaaaacgcccccctcgccataatttccatcacatttttgaaattgaagcaaattcttttttccatctaaccaatgtataagttccaattttcaattcaatggcgattcttttgcgctaatttcaggattttttcctttggttttgaaatattgcttcattttttctaatttcttctcatttaagactttttttgcaaataacattattaatcacataattgttatgtccgaaggtttggcgacaaatatttattgtttggaaaacacaattaaaataaatgcgaacgaagagagagagagatgaaaaacataaatgaaatgaatgaatgagagcgaaccacaaatgggggaaatgcatgcgcttatatgcgaatgaaatggtcagacacaatcaataataaagggtagagaaatgcaataaaacaaagggagtgaaaatggactttggtcatacccaacaataatcatagttgattttattttaaatagctaaaatggaaccaatttggtgttcgagaacgttatccgacaatgcacgaattgaaaaacgattgaataaaagcggataaattttggtatttacggattttgtgagtcccttaatttttaagattttaattcatcaaatgctagcgaacattattagaatataaaaatttcggacggagacccggcgggaaacccgtaaatacgaatatttattgggtgaaagaattctttagggaattttaatcaacgcattaaaactttttttaggttttttaaaaaaatttttgagccgattaataccctcaaaatcacatctcagaaattgatgcaaatttctttttccactttcttagcgtttcatagccaatttccaatttttttgcaatttttttgtcgataatttttggatttcttttttttaatttgaaatattgtttcatctttttaaatttctcctcattggaatatggtgcttaaaatgaaaatttataaatgatataattataaaaatctgttacttttattgtattttggcaccaattcctttttccatttccaaaatgtaaattcagaaatgcccaattccttcacaaattctttctgtttgcgttggccatataaacttttaaattcagcaaatcgtccaatgaattctttctttttttgttcataaaaactcttttccatccttttaattttatttaaatttaattcgtttttccatttgtatattttactgcgatttgtccctaataattttccaattttctgctcaatttttgtgtcatttttcaattgatattttcctttttctctcaatttttctttaattgcatcaaatttttttatgatttctctttttcgttgatcatttgggtcatttcccatttcttcacccatttgatcaactgctgctgaattatcattttgctccttttgttccttttgctccattttcattatcactttgtcttctctttc

SEQ ID NO: 9930 - DNA, 5746 bp, Heterodera glycines
tcgttaaatagtctttcagcttcatttatcgatcattaagttattttatcttaattaaaagaagaagacagatattggaatttgttgtgcaaaattgcaacaatgactcactcgaaacgtagaagggaatggaagaaaaactttatgtgcaacaggatcaagcaatcgcgccattttcttgatcactcaaactgaccttttttgcctatttacgtgcaattgcttatcgaatgcccgaaccaattaatttgacccgaatatatttttaggatatattttaggatataatccgtttatatgcctataacttattttttaaaggtttagtttactgtcggattgtccacttttgtcggattgtccgggagccatggcgagggggaaaataaataaataattaattaattaaggataagtggaggaaaagccaaacaaaaacaaattgagggaataataagacaaatcattaattaattagttaattattttcttttgtccgatcagatgttctgctgattggccgatcaccttttttgggcgacaatgacgacgaaacgctgcaaaatgtggtgaagggcgattgggctttggcggaaggttcgcaaggcctttccgaggcggcaaaagaattcctacactttttgctggtcaaaaacccaacgtaaatcttaattcaaaaaaataaaaattttgtgaaaagtatttgaaaatgaattttcattttcatacatttttttgtccatagaattccgtgccgtgccattatttcttttttcccatatttaatttcgtgctgtgcccgaactttgccactttcctttcccttttccatccgtttttagccatcgcatggacgtggagcagtccctgcaacaccaatggctgtccgacccatctcttggcgacgccaaactttccaccgactgtttgcgcgagtttaaataccagcacaaatggttggagcgtcgggtgtttgtccagcagacgccgtccgatcagctaacgcaactgatgagcggaccgaagcaggcactgtacgccaccagcgaggacagtacgccggccaaacagggtacggtagaaggggcggggtctgcaatattcccctaaatcactggtaaccgtaaaatatttgctataatttatcacaggaagagagccgtgccacgcggagccgtacgccatttacgactatttgcgcatcaaacaagaaagcatgccggaaacggcacgtcgtacgctgccccacagtgaacacgactcggtcgttgcaaaaacggtatgtgacgataaaatacagtaccttttgcctttggctactgtctgtcccttttgcctgccgttgtcagcgtcgtgccgtccctcctccgcccattggcagcggcagcgactctccgttctccacaaagttcagcgttggtggacactgtccgcccggcggctatcagccgcctccggtgccgccccggcgcagcggctccgccgactcggcgcttgcggcgaaggcgccgccggtgccggattggatagtgcggcagttgcccccaggcgtaaagccggaagacttggtggctttttttgaatttaacggaattttcaaaaatatttgagcaaacgcgcccacttcgcaggtgtgggacccgcgttacggtggtggcttttacttgccgccgcacctccaaccgaaaggccccccgccgcagcaaatgggcggcccaccgcgaagccgaagcagcggcacattggaacggggacaacccgggggaatgccaacggcaggaggtgcaaccaaattgacgcaataattaattaattagctaattaaccagcagccacccacacgccctcccataatttggcaccattacccgacaaaattgccaaaagaattgaagcgatggcagctgctgcagccaaacaaagtgcagcacaaatggaacagaatgccacaacaaaatcggacaatgccaaaacggagcagcagcaacagcagcagcagcagaaactgatcggagaggaggcggaaatgatcaaacagttgaaattggccgacttgaagtttgaggatttgaaggtgcatactgttagggcgacattttaaaataaactttgaactgatcagaatccccaatcggcgctgatgaaactgatcagaggcgaacggcgccaaattcaggcacatttggcaatttgcatggatttttagctttggtgtatttttaaaggatgaattggaaaatcgggttctatcggacatttcggaggaaagttcgattcggtccacgatggccaatgaacaccggcaagaagaagaagaggagggggagaaggacagtgacggatcaacgccaaagggaattggaggaaaacaggcaaaaacaaaagcaaacaaaaaccaattagggagattataatgctaattagctaattcgagagattgacctgctgggcttgggttttcctgtggatttatatcaatgctcttttaaaaagttaaacggtttagtaaagccttaaaaattgattttctaaatttttaaattgaaatttgaccctttggcaaacaaacactgccagtgcttttctttgacttccaattgaattttttattgacactgaacatttcacaaaatacagcgcccctgcaaattggaagcgctcggcgcctcgcgcgaggaggaaatgagcacgacgacaaccgctgaacacgagggcccctcctccagcaccgcgactccgctcgcctcgccggcattcactgccgaatcgccacaacagaaacagccggggcaacaccaacagcacttcttcggcgatcacgaagagagtgctgaccaatcggagagatcgaaaaagcgctgggggagggcatttgggacaaaaatcttgaaaattgagcccaatcaaagctgaccattcttagtttaagcgaagaaaactgtggttgagaaatgcattgatcacttaaaagccgatcagtgtaattaaattttatttaaaatgcttttcctatttaaatgagttttttaggctttgcctcctgaagtgttggatgagagtgagcatcagttcagcagtgaaaatttgccgctgaatgtgtccgcttttcgcgaagtgccgccctttgccaacggcgccgcgttggacccgcccgaagtggcaaaagccgcgcttggcctcaagtcgggcaaatgctcaccgtgcgaagaacacacaatcagcgtgaagatcagcggcgggcgagtgccgtcgctgcagcgacaggaggaactgacggagagcgcagagccccctaaaacggtggatggcactgatcagcaacagtgggcacattgactgatcaacacattgatttttaaacttgcccacctttcagtgagccaactacgccgattgctgacgaacagcagccaatcgcagcggccaatggtctgatgaacccgctggagccgccgaacggagtgccgctgccgaagacggccgaggagcgcaagcagtacaagccgatgccggacacggagtttgaactgttgatggacgcggtggagcgaatcaaacgcgacaatttggccaagcagcaaaaggtgcgcgtgggatcgaattgactgcgcattcaaatgatttacagaagagcccgcacctgggtgaagagttggacgaattggagaagtaccggccgcaggacagcgcctgccgcgagttcgagctggaggtgcagcgtcagaagccgctgtacgacgcggacttcgcgtgggagtctcgctaccaaattgggcccgacactctgctgatcccaacgcgtggggcgcgcttcaatgcgcgtgtgcgcgactaccggcgtgagttgtggggcgacagcgcgccgttcgtctcgttcggcgtgctcggcgcgcgcaaccaggagatcacggtgcgcgagcgacgtcgctacaccgacctgatcagaggtgaccgatcagcaagcagaacataaaaggataatgtgtttttttaattaattttatattacagtgtatcagggttcggtttcgtccttgaatggcaaggacatcttggaaattaggccgtctcatttgtgaatttgaaaatatccttgaattcaagacggcttgaaaatgaaaatattgataaaatttattctggcgaaaaatataaaccatttggataaaatttaatcatttttcatcgcatatgataaaatttttaagtgtccttgaatttaatggaatttccccttatgtccttggaaaccggtatacccgtccttggaaagggaagtttattcgatccgaaccctgcagtatctgatcaaaagatcaaataaaagaagaaaaacaataaattactagggatgcgatttttagttaaatacctaaaattttgcgcatttaatacgcacagataagcacgaaaaaagcattttccacttggttttgggtgtctacgatgacttttataatacctatttttacctattttggagtttttctacctattatacctatttaaggattttcagaaaattccttaacaaaaatgcaataaaatcaaaaaatacacccctaagaatttgaaaatttttcccaaaaatttatttgtttttttatgtaacaaaatttttaatttaaaatgtcaatattttctaagaacatattaaaaatatttaaattattcgtttacaaagaaatagaaccaaaattttccccttttgtttgcttttttccactaaaaatcgttaataaaaaattttatttacctattttggtacctattttggaatttttgtacctatttaagtacctattctgggatttttcttacctaaaaatcgcatccctaccgatcacttttgagtggaggaaatgatttgcttgcttgtttggcacacatttcaaatttgtggcattttgatgcacattagtgccgcatcaaatgggccaatcctttatttgacaaggttaaaattcaaaaatttatattaatttcatattttatgaccctttttagctccgaatatcgcgatgctttccaaaaggaattctcttttttattcaaattgatctgtaaatgctcttccgcttcagttgctcctaatcactgatgaaagaaacaagccaaaggatttgagaaatgtgttgaaatttcatttaaattaatttttaagaatttcggtgcatttgtaataaatttatttccgttttgtgtagaatttcttctcccgaagagcgaatattgaaaggtgggaaatgaactctgttcaacatattttgtcatgtgaaaagtcgaaaaatagctgcaataagtccaaattttatagcatgttaacttttgacgtgagtagagaatttttgtaaatattcaaaagtgagcaaaatttctgaatttgcaggaaagtacgccaaaaatcaaggcatttttgtgaaagtttcaattgaaatttagaaaagtgagtgccaaattcatgtaaatataattttttcctcgattctcaattctctaaaagtaggaaaacactcttttttttgtgttttcgaactaaagttggcatgggatttttctttatatatttttacaattttccagatttttttacatattacatatgtatgtacaatttatatatatattttggattttttcgcatctttttgtacatattttcatttttaacatattttgagaaaatttatagaaatttattgtgaaaaatgtaaaaatttttcaaaattatacctctaaaaatagg

SEQ ID NO: 9931 - DNA, 967 bp, Heterodera glycines
aagtgaacgaacagtggtgaaacggaaacaaacggagaaggaattgctaatgctaatgagcttaaaagcaaaaataggcatttatgatttcaaatcaaaaaatattaaaatataaaaatgaattttcccaaaaatagtatttaaaaaaatatagtcgtgtagtcgtggtcatatacaatatttagcattacttgcttttcgttaaactgattggtaaataaatgatggacaaattctccttggtcccggcagtatggaggggacccacccaggagcgccatgtagaacataagaaaaactcgcccaatgagactcgaacccatggccttaccgtactatggaatgctctaaccgactgctgagctataggcgtttcctctaaagttctccccaattccttatcccactttctcctacactccgctcatcacagacgactaaatccacggctgcaacaattgattttctaagttatctcttctctcgtcacgaaactgagacgtcggtgtcaaataatggaatacgatttcgagctcagaattttccaaattcattgtaataatgggatcacatatttatttcggaacggacaggtagaacattttgttgatacatttttgatccaatacataatgattcgctcccggcccgggttcaaaattcccaataaattattcgaaagctttacatgttcagaactctttctaggctattgcttggcgattagacacgtgtccagacatttacgccccggacatttgcgcctagctccaaaattcaagcgctgatagcttaaacacctttaaaattaagaaacatggacttttgattattagaaacaataattctgttgttgaaaaatttattattttttcaaaaatttgctgacgataaaataattgcattcctacgtaattcgccctactaatatcacattcgcgtatgttttttaggtttctttgttttc

SEQ ID NO: 9932 - DNA, 2221 bp, Heterodera glycines
  unsure (1)..(2221): unsure at all n locations
atttaattttcagatttncattcggcaaattcccaaaaatcgtaaagaaatccgcaaaatcggattctgacgttaaggatagtttttcactgtgcgtatgaattgtcttattatccgaattagttggtatcaattcgaattgctttatcgttcatttttagggactttgccaataatggcggaggtaatctcgactttctgtgcctaagagatttgttgttggagcaccaaaactctttgaccaattgcgagtttattttggtgttggatgttacccattacaaatgggtgagtttcatgtaaattaaaatgatgagcaaataaatcttcagattcctgcttccttcgttctcccttgtcccgttcatttcgtagccctttctgacacttcgaactgtgcctcttcctctcttttgtccgaattttctgctatttctcactcttccaatttccaagaacaaagtgccaaaatttcgccattggttctctgccgagatgaagacgctcttcctctcgccaaaaaattggctgggctgccgcgacttgaccactcggcgaccatttttgtcgccccctctcttaaaataaatgtaaaaaatgaatttattacacgttttatctcatctttgtttgttaggtccatctgactccaaatctccacaaaaatggcatttattcgtttgaaggacaagtcatcaaaaggataagcgccttcccccgccccgcaaatcattcgttccgacttttgggcttctccaaaagtgactgtctcatcagcattccctcttcctccctttgtcacatcataaaaccctctgatggtccgttggttgtttacttttacaattttttttcccttcagagggcgtctcattctctgaaaattcggacagtttccatttgtttgccgaggttctcggctcagaaaatcaaattgccattctgagggatgagcaaacggatgaagaatttgtgcttaaaccatacaggttttgatcaaatgcaaatgaaacatgcatttattggcactttgcagggacgacccctccaaacggtggatgctttgcctccaattgttgccaagtgcgacgataaaatggcaaacagtcagccaacaacaacagagcccggccaaaggtgggtgaaaaatatgaaacccaggcaaaaggggaagttaacagcgacatttctgggaaaataaaccgatgtatttttgaacctattactttctcccccccccccccaatcgtaaagtgttgattttataggtttgaatggatatcattttgtttcagttgaatttcccgaagtcagttataagcaaagtgcgtcgactagaatttattggacggatcagcacggcattcagtcggatgtgcagagattgcaacgattacttaaaaggaccgacagatcggaacagttcaggcaggtaattccaacagtttatttcaatgacattcgcaaaatcccaggaattgagaagaattgcgacttatgcaaccgcgttgggttaccataattttgcgagtgtttttgcggaagtgatcgaacgaagggtcggaggtatccccgaagagaaccgagtgacgctgcagacggcggccaaagtgctcaggtggggcggggaggagatgctttggtggtcggttacatggcttggtacttatttggtttagggggacttttaacacacatttttaaattgcctataaattcaatcatggaaattttaactaatattcatgacttatttattcttctgcaaaatcctgacggtgaatttgaagaaattttttttgttaaaaatgtatgttctaagtaccccctaaactaaataagtacccatggcttttgtggcccgaacttttttgcctaattgtaagccaaattgtttttaaaaaataatttttcagtcccatatatggcataaaaaccattaaagccgagaatgaaaaatttgaacaatgctattgggttgaaacattaattgggactggttttggacatcataaatgtgcaaggtgtggctcgacacacccccacccccctcgttcgtcgtaaggggggcggctgtaaaaaagggagggggtcgtaacgaaagggggcagggggaatttaaaatttgcaacaatttccttggcgaattaatacaaaatcaaaggttttttcccggccgtctaccggcaccgcggaaccgcaagtggttagcaaaaaaaaa

SEQ ID NO: 9933 - DNA, 2060 bp, Heterodera glycines
tttctttggacagggaaggcggcttcaagcagttaatgcaattgaaataacggctgaatgaaagttttggagttaaagaatcgtataaatatagacaccgacagtgcatattccgtgtctaaaatttaaacataatttttttaaattagaaatacttgttaattgcttttaaataaatgtatggctaattgtttagttagtaaaagttttgatttgaatggcgacggatattttattccaaatttaaaataaacgacccttaaagaaattatttgatttgtttatcaattttccccggtttgaacccgctcaaaaaccgccgtagaatttttcttttactttttctatcgttttgcgcttaattaatcttgcaaaagtgctttcatgtgtttggctctattcttatgatccgttttcaggctaatcagctcttttattttaataaagtatactggtggtaattcatttattttaaaagacaaataatcgaatgaaagagaaataatgccatctaagaaaccattagctgattagggcccatctttgtctgtcaaaaaatattgccgctaatacaaaaacaaacatcgaaaaagtgatgcccaattttgaagttaataatggaggcgaagaacagctgaagagggaagtgagaagagtattactataatttctttgtcttttaatcgaatgattcgttatcaattcaaaaatgttcgccccttacgtttggttcggaatgcatttccggtcgcacacctcgcctttccatccctccgcacattggcatctgaaagagcgttcctttcgatcggtctgaccaatcagatctgtcccttcctctgaccttccccccaccaattctccattttggcaggacaccaccgtctcgcagttggtgccctcgtaattgtcagcacagcgacagtgctcccccgaattgcgccaccgtctttcattctctgcgaatgagtccaaaattaggcaaaagagagggacgggggagagaatgtttgttttgttttgtttcaatggatttaatcactcgcctctctctgccattctccaacatgccaatcgttcgcagaagcgaccgtcccatggcgccttgcaaatgcattcgatatgtttggagccgagtgccaattctccctcgtgttggcaattgttgggggtgcaactgatgggaaaggggcaattgttcggcacgggagggggggggggggagggactcacacgcccatataaaaggaatggttggctggacagccgatgtaatctgaaaggacaatcgctgatctctgcgcgcctttgtctgcccaccgttgcaaatcggccccttccaatgctctttacactcgcatttgcccttttcctcgttgaaatgtccatgtacttcaaaaagcctttgggtattataatcagaccatctcccgaccaacccttgaggtgtttgcatttgtatcgctcgtaatggctttcctcttcactggcactttgctcgtcgccctcaagccaaacttggcatttctcaagcccaccgccaacaaaaccgtattctataaatcgagaaatgtcaaagccaaccaaacgtgtttctcgggttgaaccttttgccgggtcccccgtccccggaagtacgcctttggcgtggtcgcacccctggggaatattccgtaggggaatcagtcgttgatactcatcgtcgatttctttattacgaacagcggtggcaaagggcaattgaaaacagaaaatggacaaaacgacaaaaaaagaaaaggggggaaaagtcagaaatattctcctggacaacgaaggcgaagccgagagaatggagaacattttggaaaccgaagctcgccaaatcaaaggctgagaagaagcgcagaaatcggacatggcgaagaaccgaagggaggcgaaggcgttttgaagtcgatcagacaaggaaagtcattggagcagcaaagagagggcaaacctaagcacagaaagagagagagaattggcgacgaaaggcgggcaaaattcattggcacattattacagacaagcaaggc

SEQ ID NO: 9934 - DNA, 2209 bp, Heterodera glycines
tgtcacagacatttgcggacggacatttgcggacaatttcgggaaaaaacaaaaatattcttaaaaaattttaaaaaaatctcaaaacatggaatggagactgcaaaactaaataaaaatttatttttggcttttaaaggtatcatattttatttttacacttcaaagaattaatttcactggccaaagtgagatgctgttccttaagtgattaaagaagagttgatccccaacactgttcggggaattcgaacgtcgtctgtttcactctgtcgggtgagagtgctttttttatttttagaaaaatatttttttctatttgacgaccaagtttttgaccccccccccccccaacatttaaaatttttttagccttatagataattctcggggaatttgataccagttccccgactttttttcccaaatagtaggggaagaaccatagataactcttgctctcgtgatcaattggatagcatttcgagaccccaaaaattttcggaaaggaaaaccgaaattccatggcacaaaaattacgggaatctgatgttggaaatcgggatttcgtgcagctattgatttttgaatatggacctccaaattgataaaaatgagtactccgggattatttctctaaaatacgacaattattgggttcatttatatcaatttttagccctttctttcttctatcgaatgcattttgtttcagaaaaaatatttgtctttttttaacaaagacattgttgttaaatataggtgccaaagtggggaaaagcacattttttgacccccatgttacaattggtcaaaattggcacttcaagtttaaaatgtgtaaaaccgaacggactaatttacgaactgttaatttgaaatagtgaaagtaaattttgttcatgattaagcatatcttcaaaatatttttttatatctaaaattagaagaaacgttctgatgagtcaaaattttgcattgcatttaaaaaaaaaatttttttataaaaattttttattttttcccgaaattgtccgcaaatgtccgtccgcaaatgtccgtccgcaaatgtcagtccgcaaatgtccgtccgcaaatgtctggacgcgctttattgtaggttttaagcagtcacaacgaaaatgaaattgataaaaggcatacaaaatataaaaataatttttaagaaaaaaaagctgatggagtgcgcttttctcatttttcttttctttctcgaaatgggcctaattcatagccaatgccacaattcatatgaattaaacatttaattcatgctttatttctatcgattatgattaattaccatgcttttttcatttttgaaaatttattctttttttttgtgtagtgtttggattaacattctattagtattaatattcataaatttaatgcaaattttaaaggctaaatggctcaaaatactttacgaaataagaaataatttaaaaaaatataatataaaatacaaatattaattttaagaaaattaatttgtatatgtaaaagtttagtatatttaaaaattattttttaaaatatttatatgaaatattttatattgcttttgttttcctttcctgcggttttggcagtattgccagtgattgaaagttcatctgcaacaattaactctacagaaccttcaaaaaaggaaaagcaaattttaaaaggtaaaaagaaagaaagatttaaaaatatatataaataagtttggctaaaaagtggcaacaaaattttaatggagtttagaattttaaaaataaactgccggtttttttggctattctccaacctcgggaattttctcagctcaaagcttttgtgatagtctctaattaattcataatttttaaaaattgaagatgataaacaaaatatggagaacctcagtgccaacattgtcagcagttccgataacgtataaaattttcttaagaattcgcgaaacttcgaatttttttcagagttccgaaagcgattatgaaacagcaaatgaaagcggttttgcaatttatttaattatatttattatatttttttgtttatagattcgaatgaatcagtagaggtcgatgaatcccaatcagcacaagatgagtattcattgaatattggaggtagtcatggggttacacgggtccctgggggagaacaaccgggtccgggtattgccggtccagaaaag

SEQ ID NO: 9935 - DNA, 2105 bp, Heterodera glycines
atgcggctcacaacaaatgtgaacagtttaaatttgctaacatcgcactgcaaaaatatttgaattattgtgacaaaatgggaaaaagtcgcggtcagtgagaattttgtgtaaatagaaatcaaaatatgaattcattagttgcttctatatgaattagcttttttttttgcaaaaaaattccttgatttacaaaaaatgccacaataaaattataatacaaaaaaaggatgaaatatgtctcatttttatgacacatttattcagtgaaaacaacaacttaaattggatagatattttttgaaatcgaaaaattaaacttcgtacacttcattatttaattggttttcagatgtgcttatgcacttagcactgaagccttcatttttacttttgaacaacacttcagtttttaatcatactagttcaaacttgaaagagattaaaattattttattaaaagcttatatgcgctttaaccaacaacataaaactgcagaagctggacataacagtgatggtgatgaagaaattttgaacaattttgcaaatagagaaaattgtgagaaagtgatgaaattggctgaggaatacaaaaaaagcaaaacattaaaggggtattttttttaatttcataattattaggaatgggtcgcgacattgacaaatccggaatttttttttaccgagactaattcaggttcccggtttatacataaaaatttggcattttttccccaaaataattaccatatctttgctaaaaatcacaaaaacttatattcttagtatcattcgatagctacaaaatttctcaattagtgtctagtccagactttatatcgggacatgtcccggatttctaatgggtttcccaattttttcgatttgtttgccgattttctggtcaaaagtgagatccaggttccagcttggccaaaattttgtctcaacctgcttttaatttattatacttttgctcttaaggaaaggaaaaaaatggcgtaaagctttgaaagaaattcaaaatttgatggaaaacaatggagattattgtacatcatgtgaaattcctacaattgatcaaattcagaagagtaaaaggcagattttcatgaacattccttcgtcaattgttgatgaaacgaaaaaaatgaaacaaaaaattgttaaaaaactcggtagaaataattcaatttttttttcaaaaaagttgatcattttctcataaatagcatatatagattggtatgaattaggttttacgaattaatttataaagcttataaattaagatgagaagattcacaaaactcgaaaaggtataaaaaatatatttgaaaaaaattaaatttaaaataaataatatttgtgtttattatttagttccataatttaggagaaaatgcataaaaggtatgaaagcgggcggaactatgttttgatcaaatccaactttgatgattctttttattactgcatatattttttggaccttactatctgtttttttttatatttttattttcatattttttaattttttcctctatgcataaaaaaggcatgtctaattttttttcaataataatattgaaaataatatttatatagaaaattttttgtttttcattaatccaacaattcaatataatcgatttaaggcacttttcaaataaaaaaatgcgcataatattttgtataatcgtttttacatttttataacagcgcatttttatttttgatgaacttttacaatttaattttcactgttacattaaaattattatttttccgcttaacattatcagttgaaagcagttcgaaaattgatcaagaagggtcgaaaagtgaacagaacaccgaatcgagttccgaaaaagatggtctcattattaattattaaattttaacaaattaaaaaatatataaatacctattttagacttaagcctggcaaattggataaaacggagcccaaaaacaaatacatcagttaagtatttaaatctataaacaagttaattcttaaaattacagtcttcaagatcaaaatctgaagaaataacggtgtttcgtaatcgaaatgtgccaacatcaccatc

SEQ ID NO: 9936 - DNA, 3253 bp, Heterodera glycines
aatttaagagaaaaataaataaaatatgtccattgtaagatacgaccgctctttgcattccgcaacttccaacgctgtgtttgaccacaatccagctgcttttcaaagtcaacctccgcgaccaactcaacagtttaatgtttcgtagaaatagtaagtaaaattttcaaaaaaaagttagcgtaagattgtgcctaaagcattcttgaccatcatccaaattcggatttgccgcccatgttgttggaactgatctcttttttgcgcgttcatggacttaaaactgaaggtatttttcggcgttatgctcccgtgaccaatatcaaagaattgcagcatcgtataaatatgggtcagtggcatagaaatctatttgttttttagctttttatttgagttttcttaggtgagtcaattgacttttccaacgatttaatgttccacggagacatccaaagcagcgttacccatgctgccgttctttttaaaacattccttcgttcactcggcgagccattaatcacaaacaaattgtacccggaactcacattgttgaacggtgggcacaatttagccagaaacaactgaatttagtctaaacaatttaatatttcttatctaattaggaatcgaaaaaatcaaccgcactgatgaaattcgtcgttttgtgcataaattgccaccagaaaattatttactactgttaaaagttatcgaatttctcgtggaagtggcgcagcacagtcaccaaaatttaatggatgccaataatttgagtgtcgtttttggtccaaatttgacatggccgactgatcaacaggttaaaagagaatggttcaaatagtgatacattatttttttacatttaggttccgatggtccaattgaacaatttgaacagcttctgttattcgttaataaaagattttgacgagatttttgtagataaaattaattgattgtttaatttcaactgcattatacttttttctcatattccattttaaagctgacaaatgaatgcgccattccctttgatataataaacgcgtcgtcggccgacgcgtgccctttttttcccttgccctcacacattctctgcctgtctcttgtttctttttctctctttctttctctctctcttctttttctctcttcttttcatttaaaaatttaagggaaaagcgtacgcatttattgccagggcataaagaaagcgtacgcagcaaccgaaaaagaggaaaatgttccttttgtggcaaaggcagttagtaaaaatattcgcttcaatggccaaaaatgaccgaatttcaaacaaatgagtgattgaggatgcttttccttgcttggtccctcttccatttcgccgttcgcttcggtcgtcgccatcggttaatcgcctcgctcaacgaatttttttctgcatcaacgccagccactgtacgccaacgtcgccatgaaagtttgaggaatgaccgttttggaaggccaatattcggtagaaatacatcgtcaccttaccgtagcatttgttgtcgctctaaaagacctttctcaccgtgccagaagacttttcagtgagttaattgaatttatccttccggtaaattaggtaattagaatttattgcaattttaagcgtcgctaatacgacgataaaacgcgtccccagtgagccgactttgcccacaaaaaacagttacaaaaatgtgcgcaaaatttacagcgatgaacaaagggaaattgttgtatttgatggggaagaggagaagcaggtgaaaggaaaggaaaataattaaaaataacacttacatatatatttcaatatcacaaatgaaatcacccaattcattcattttttagtcgtcgttttgctcttccgaacggtccgagccgactttgccttacgcaaattttcagttaaattctgttcaaattcatgcgaattgtgtgtgtttttctgcaaagacttcttccattgttccaccttctcatttgttcattcgacagatgcattcgaattgcaattttgtgggttaataagttacattaatccaaaattgatcatttttagctcgactcatttgcccttttcattgctcaccatcggaccaatccctccctccgtctttacacggctccaatttcgacattttttgatttggttttctgttggagtgaaggcaccctttttgaacgggaaacggacaagcaaattgaagaaatcagaagtaagtttagtcattttcagtctcagcgactctaaaatcataattttccgggtgagtcgcaatttgcaatattccaaaatttcagagcggaatttttaactttttatattaaacactattgttatttactttcaattccctttcagcttttcctccttcctttgcttccaatgctcaaaaacccttccttttttgccctccaaaaagacgtctttgcgcttctcttccttctcggcctccgtctttgcttgaactgatgtttttacaagaatccacctctgctgaagagaaaatgaaaattttaaggaaaggagaagggcgttttggaggaaataattgcggaagagaacggtgctttatccgtagttttaatataacagaaataagggttcatgattaatttcagtccattttcccgtttctcaacaacgtttttacccatgggcgatttgccagtgccaatgcttccaaattatctgaaacgaatgcggcgacgaaaatgcaaaagtggcggaagtgaaatgccttcaaactctgaaattgctacagaccatttttttgacccaacatctgcttcattgaggcgatttaattaaaaaaccaaaaaatatataaagttttttttataatttagtgatgtgtcttctttatcaatgtcatcgaatggagaaagtgacgtgactctaccgtcgaagggagcgttttgtcacgtgatggaaaaaggtgcgttcggagcggatgaaagggaaaagtgttttggcgatgacaaatccattcattgatcttgcatcgttcctacgactttgaggagggattaacgcttcgttcggtgcctttttccctatttttgtcacttttcccccaatctcccatacacgtcatgctttgctcctccatttcccactatttttggtgtcgtgtttaatcaataattccgtttcgatccgtcccaatttaatcccccccccctctccccctctccctctctctatcttcctctctctctccctccctctctctct

SEQ ID NO: 9937 - DNA, 3858 bp, Heterodera glycines
aacataaccctaaaagacgaaactccgactgtcaattgttcgtttctgtcaatgaactcgaagacactgaaattttcttcacttggccattctcaactctctcgaagtatggtaaaattcttttccgtttttactgactttggtcctcccttggcggaatgtcaatttttcctttgtttatttaattagccattcaaaaatttccagccgattttatggatttttttttgtaaataacttagtccataaaatttagaaaaaatcgccagaaaaactattcaaaaaattttttttcttgatttctctataaaaactttctaatttttctgattaatttctaacaataagataatttcctttttaatttttcggaggggagggcgaactgctcccgggttcatttggcaccttcctttcataaaatttgtatactttcattggtccatcagttcggttccaataaatctcccatttccgatttatcttttgtctcttctctctttcctttaggcacttctctgattccgtcttcgcccgtctgttctcttcgcgcttccgcagatgcaatgcgtcgacgttcactaaggcatggcaacagacagtgccttggattttggcacattttgtctttagcattttgtgcttttttctgtttgctaatcgctcttaccttccttcagtccgttgactttgtccttgttgctaaattatggtggtcatgaacattcgctgggtgttggccctgtcgctcccgcggccgccacccttttcacggccgacccgcactttcccggcaaattgccccaccggcgtgctcagagtgtccctcgtcgcagtttcgtctccgttttttcttgcaacggcaattgttctgatgatgccaaacgacaaagtgataagtcgttggatggcgctgtttcagacgcaacttctcatggcaatcattcgccgtttgccggtggcaatcggccgcgacaaaaaccgccatcggtgaacattgaatgatacagaatgcctttgctactcaatcagtgtttcttaactcaacttttgtccttttttggcattcttaagctgatggtttactgcggggatgacaaagttttgttcgacggaattcgggcagcactgcgacggattgtgcccaccgacacttacaccgtctcggcactgtccaccaaagcgcttctcgcccacccgtggatggattcatgcgctgtgtgtcatttgcatttcagagatcactgcagttttcaatttggacaaattcccttttagtgtttgatcattgcggacacttctcggctggacagtgcgtcgtggactcggctgcaaatatattttgtcaatgtataaaaaaaggatgagtaaagtctatttctaatgagttcatttcccaatttcagtcgggcaaaattttgttcgtatgtgagaattcgctgctcgccagcctgaccagcagcagttcccagcgggaacagtcgactctgctcaaaaacgcattcggcaacaaagcggtcacggccaccatgggcaaggagttcggcaactttttgaaacggtccctcaaaggattagccaagaatgggcaggtcattacttccgcatcatggattctgttataattcttaaaatgaataggtaaatgaaatattttatgcccgcgacgccgttggggacacgcgattctctgtagtcctccacaaaaagaaaggtcggaatgtttggcttaacaattgctacacaacagtgcttttcaacgtcttcccttttccaactctttcagaccagcctttgctgttgtacatgcagaatttgggccaacgtgccagtgccctcttctccgacgccaccaccgaacaattgctgagtgccggcgacggggctttggtccgcgacgcccttcaccgccttggccttaaagacattccacaaaaagcattgccatcggacgaaattgggctgcctctactttcgtccggttatttggttgctgcaagagacttgaccattttggacattccggtgggaaattttaaagtatttttatccaaatttcgagaaaaacttcgacgatttttctcccttcgaaatcgcttattttgtctgtcatttcagtgtcgcgcctttactcgttgacaatttttcagggaatgacttacggcaaagtgttgggttatgcagggccatcactcatttttcatcgatctgatcaccaaccatcgcttaaccaagacaacaacaatgacgatcaaaatgtcccttctgaccaattgctaccggtcgaagtgcgccgaagacgggacggactcccggagacaacgcaacagcatcggttcgaagttgaaccgttcttccaacagttggccacaaaaagacttggccaagtgttgctttatgtgcccgtttgtggtacaacgatggaagtggcaaaaaggttctaattttgttggttctattttgaattaactctttaattaacgggtcctagcctttcgcatgcttttccactctttgacggcattttggttgttgcgggcattcaattggctggtaaaggtgagtgtttttacttttttatcgaaagcctgcttcaattatatttttaaggacgtgctgggaatgactggattagccccgcgggctgtgcttcgttctccttcaactttaacatcccttgcgactcgaatttgggccgttccatttgttttttgcagcatatcaccgccgtttccgtggccagcgctgtttcaaaattattaaaggatgaaattccggttaattatcattagaatgattgaattggttcaccgaatcacaacttttaggattttcctatccgattgaaatggcccaacgacatttactacgaacgttcgtacaaattgggcggtttggttgtgcaagtgtctcactgtggccccaattattgctgcaccgtcggtgtcggactgaacgtggcgaatgcgaagccgaccatttgcatcaacgacatgttgccgatgcactcaaatcgacagctaacggtggaagaagtgttggcagggacaatgaacgaattcgaatgtgagagattcacaaaccaatccccttgcaattgttttttttatttgcagattttgtcaatgttttcgagaaaaaagggagggccgagtttttgaagtcgtactaccgattttggatgcattcgcacgaggaggtgcaggttttgcacactgaaaacggcggacgccgtgaaaaggtcgttatccgagggttggacgagtacggctatttggaagtgcggagcaaagagacaggccaaataatgaacgtgatggacgatggtaatggaaatccgtgaaacttcaacaccaaaatttgccctttttcaggaaacactttcgatttattccacgggctaatagtgccaaagtgaaagcatagacaaatgatgattcacaagagagcatcaattatctcaaaaattgtgatacgcactgacgaagcataactcaaccgacttaaataatttggacattgttgaaatttcaaatgaaggcttttcgatcccatcgatctcttctgccatatttgaatggcaaaattcctattttctctacggggttattatttgttgttaattttgttgaaataaataattttctcgaagtttatcgttggaagaatgcttaataaatggatgtgattgatgatgatgatgagatcggtctgttcgttcggtcatcagttccaattgaaatgtccggacatcaaattgttagggtccgccgagttcgaaaaggaatccgacgacggaaggccaatggcatccgttgacggaccaagcgatcgtttgccgaaactgacaaaattaag

SEQ ID NO: 9938 - DNA, 5555 bp, Heterodera glycines
  unsure (1)..(5555): unsure at all n locations
tgctccgctcgggttgtgttgctgctcgtcctgctccctttaagcgtcgncccccggccgntccgntgcggaactttgcctttcgccggccgcaacgattgttccgcctcagaagcgttcttcggacgtgccgtcttcgtcgtttttcctcttttaattcccccccccccctcagcgtgccttcccggcactccgcgcagttgccccggcacatgtccacccggttgtcgctgtacggtggacagttgttgctacccaagctcaaacccaggcccaaacccttctcctccggtgccacaaccccaaacaaatgtcggcaacggtggtttcaacatggtcaatttggcactgctgatgcttctgtttcggcaaagatcgcttagcattccttccgggggttacggcgcatcggcggcattctcttgtcaggacacggcatggaattgttgtgagctgccccttttttatatgtccttggtttataaaaggtttaaagccgtttttgcgcctccccctttaaatttggccattcttttttctcttaacctcccctttttccagttcagttcgcccccatgtgcgcctattctttgcgtatggtttacttatgcccccgcacttgcggcttatgcccatcgctcggcttcggcacggcaatgttcggcaacggaatgcaaacgcaaattgcactagcaaatgcattgggaagcagcgcaattggaaagaaatgatcagagaaaaggaaggaaaagccaaagccaaacacaacgccaaaaagcacccattagccgatgaaataatttaaaataaattaggcccctcttttgaaagttggagaaaattttgggaaatttcttctgtaagggaacatgaagcagacggatcatttgacaagaaaaagaatccccccgaacagtttcatcaatcgaaaatgacgatcagtgccaaaaaaagaaacgaacgaatcaccggagggaaaaataaaaataaattaaaaaaggaatttgcattattaactacagcacacagtgccattgtgctcacaatttggcctttgtagaaaaaagctgagcatataacacagcacaaaaagcaaatacaatggggggaggaaaagcttccgatggaaaggcgacacccccgggggccttttgtcgcctcccccgttttacccgtcagtgttgctcttctatcccccccctctctttctctctctcttcctctctgtctctctcttccccatccgctttatcccccccccctctatttttatccctctaatttttgtcatcgttttccctttttgttttgtttgactctcccccggcttcaattcccccaaattccatgttttcgtctccgttctctcctccgattttgtcggtgtcccctttcaaattgtttcctcttctgcttgtgcccttctttcctctgcttcttcctctctcttttctcctcctcccttctccctctttctgtggcacttccctttgcccctccggccaatttcgtttcggccgtatgtttttttttcattttttaattactcattctctccttcgcctttttcagcttgcatcggtgaccaatgtcctccgacttgtcccggcgtttgcacatgcgtcggcagaagggactgctgcacagatcgaaacgccggcggaggcggcgatggcattgccgtcgacttaatatccggcggagggtttgagtttgtttttggcactcttttttccctttggcattttccctttggcattctcttttttgcatttaattttggcacttatttatttttggcattcttttttccagcgcctctctgccccgtcttctgttggcacttctgctcggcaccggtcggcccggccttccctccctccaattggctttgtgccgtgacaatgccctcaactgtccgttgtttttgtcctactgccaacttccgcctttctctctttgcatgtattggccttactttgccatttccattttcccctttttctctgatttcccccctttttcggcgcattcattgcaccgccacttgcggaggctgtggcgatgactcattggggctgttgttggcacaattattattcggaggttggagtcgagaacggggaatgccattggaattgggtcgagactaatcggagaataattagccgcaaatgcgtcagtaatacagtattatgaaaaaagcttctgtagaattagtattgtagtacaaaagtcaatattgtataagaaccaggaatgttgcaaagagaaaaataaaaagcgaaagcaaaaaggcgaaagcgaaatgtccaaaaaaagcgaaaaaccgaaaaggcgaaattttttccaaaaaattcctctggtgattgtgagacaaatgtaaggatcgattaattttcataataataattttatttgctttaattttttatttcttttttatcgtagatttttgtatagaaataattataaaacgcatattgctttttttgaaaattactgtttattttttcctttaataattaaaaaatttattctattaattaaagtattattgtggcaaaaaggaaattttttgagaaattacctttcaaaaaataaattatataaatagaaatagtggattttattcaaaacgatcaaaaatttcttattatctttttttttgtatttaaaacatcttttttttcgcgttgcgctttttctaaagacttttcggagaaatgggtccggtggtgccgataggcgccgccgggaaaaattttgaaaatttggatggatctcttcacagatttgtccaaaaaattatagatttttacaattttgagagaactttttttttgaataagatttacgaatttttgggcccgacgatgccggtagttagcgccaggcgaatttaaaaaaataaaaataaataaattaaaaagaaacagtcaaccggcatcgaactcatgacagaaagtaatgtcaaggttgatgcaccaaccaatacaccacactacactttttatttaataaaaatttgtgtaaaaagattaaaaaattcaaaattttgtgttaattttttgctttttctcccacgaaaatgccattgtttattttaaaaacccaatctttaggggtgtacttttttttcgcttttcagccaaaaagcgaaaaggcgaaacttgcaacatccccgataagaacctctttctgaattagtcaattcattttttaaaaggttcaaatacttaaataattttggaaaattacccaatccataaaataaacatactgtaatgtaattggtttattgtaagtttctttccattatttaataccgtaaatagaaaaaagaagtcccttgagaattcagcagaaaaggccggcaaagggtttaaaacttttttaggccttaccgtgtcgacaactttggcaccgccgttggcaccgggacaattagcaattcgcgacaaaatgccaagaattcgcgaaatccaaggagaaccgccaaaggcagaaacaattcacaaaaaaggcacaacaacaacaacaacgacaaaatgccctgctggggaaaaccttaatggcacaacaaaaaacgaaaatgtgatgacaaaaaggccacagaaagcagccgtaattcaccgaaaaaaaagtggcggcacgcggcgaaagacggcacggagaaaaacgacggcacaaatgacgacaacgaagagaacgacgacgacgacggcacatccgccggtggtggtacaaccgatgccccaacaattcgcagttccgccgggattggcaattccgaaacagcagcagcaactgatcaggacattgatcgggaggagcagagagggacaaaacattttgatgagggaaagggacaaattggtggccatgctaatgagacgattcatggggggatgagaagggaagggcagggagaaaacaggacaaaagcaaggacagttgaccaaggacaaaaaaggacagaactcaaaacaaaattaagggaaaagaattaaacaaaaaatgatcgccaatttcaaatgattggaaatggaggcggaaagaatttaaatttggggaaaattggcacacgaaaaattaggctttgaaaaaaatatctgtgctaaactgtttgaatattttattttgtacatattatactatgctttgattaaaatgaaattcatttgacagaagggggcaaagacccgaaaaaggacattagaaaatggaaaatgaggagggcactttttgtgatgccataaaactgacaaacgaactcccccaaataatggcggagatagctcagatcagtcaattgtctctggtcctccattactgtagatcataataaagtcacattgagtcatactgtagtaacatgtcctctaattcattttctattgaattgactaattaaaaaggcttttctctcccatttatttaataatattcataaattgcgtcttcattttgagcttcgtttcgctgttcatgtgctccttctccgtctcctccttctgctgctgttagcgttgaataccctcgcgcttttccttttttctttttcctccgttggcatttgccccgaggcgcagacgggcgaaaacacatagcaattcatgtcatggacagccatcagactgaaaattatggccaaattttggcacaaaagatgaccaaaattggcagagtcagcgcaaattaaaactcaccaaaattcgtcagtgtgcgcaatataactgaagaagccggtgccgcaaatgacattatagaaagtgccgaactgctgctccgcctgctgctgcagccgccgcttggacttttcgacattggacggcacaacactctgagcaaaatgtacaaagtgggaggatggcatttttaaattgaaaatggccagaagtctcggctaggccatgtcctttaattgaattttgagtgcgtgccgtaccctttggatcagtgatctgagtcgtgccgaattgcacatttcccggttttcgtcaaacaaacgattgtgcgtcgttccgtcagtctcttcgggtgatgattcaaaaaagatgcccgtttgaggggttttgagcactgccgccgtcggctgttctctccgccctgacaaaaatgccatctccgtcttttggcaccccgcggggacgcggggaaagggacgccccccggcggaaaataaagcggcaagaggcggagatggtcggtcacgcagacaaggcagacgaaggaagttgggctgtcaaaagggggagaagtgaatgaggctcccggacaatcggacagtggacaatccgacagtaaattacactaaaagatagtaaaatgccgtcgccgaaggggaccgattgtgccgtatcaacaaaaaaggaaaataggcaaataaattgatgagtttttgtaataaccctaaaaatcaaacgatatgaatgtgcgattaatactgtaagggtgtggaaagtcattcaacagccaatttcgttttcttcttacaccattaagcacttttgtcaaagaaatgtaagaaagtaggcattggaattttattg

SEQ ID NO: 9939 - DNA, 1456 bp, Heterodera glycines
ttttgccgataagctgatcggcaactgctgaactgttctcgcccccactgttcgctttgctttcgcgcgacttttctttccgtcccgctttcaaaattttgtacctaaaaaaggctttcctaatagccaattaattaattatgcaattaactaattacattcgtctccgccattcgccgattatttcggcggtcgttctgctgtctcatttgttgtttttgttgtccttatttgttttctgctgctgttcactgtcgctgcttggaaattcgtttttcgattctgtcggtttttgtttttgttggtggtaacggcggtcggaaagcggcgtttctttttttgagaggagaaattgcggaaagggcaattaaatgaattaattaaacacctcgggggagaatttgttgaaaatttgcggcagcgattggcgacggcggcggcggacaaattgggggagagacgggggaaaaaagagagacggacaaaggcgagaagggcacggaagacggagacggacggaacaacgcgaggagtccgaaagtgtgcagtatagcaaaatttggcattatatgagacggggaccaagggatggggaggggcgggggcgaggggagaaagtgccaatcggacatacagggggaaaggggcgggggagagtgccaaattggcactgccaatcgggcattaatcagggaggaaagggggagagggcggcagagggaccaatgaaatgcccgacgaatccaaccgaattcctttccctaatcgaagtgccaaaagactaactcgacaaagggtcgcctgcgggcgtttccttggcaaattccgttggcattttgctgctgctgatcacctattaattaatttgatggtttgtacactcattttgtctctctctgtccttcttttcccattttctcacctccgtccgcgcccccaacgattccatcggtccttcggccgccctttcgccttggcccgaatatctgttcaaattggccagcagttgccctttcagtccttcgccctgtggcatttcggcaaagcattggccgcaaattgtggccaaaagtgccgaggaaaaaaggaaaaaacaaaaaatatgacgacggagggacaaaaaaacgacgaacatttttagaaaggcacggaaaattattaactgacaaataagctaagggaaataaaagtgaaaagagtcaaaatttgcgaagccccggggcgatcaattcgcacagcgatcagaagacgattttgaagggaatgatcagaagggattcattctctgatcaattcccccgccgcccctcctcaaacttgacaatattcccacatgaaaccggcggaattatgcatcaaatgcacgcggacaggtcacaaactgtgaaacgaaacaaacgaaatatcgcccacagttcgacacttctccaacttttgagtctctcccacttgaggg

SEQ ID NO: 9940 - DNA, 1433 bp, Heterodera glycines
caaacgacaaacgacataattttttgtcgtaatgacaatttcggagacaaatgccaaatttgtcgtttatcgtccgttttgtcgtttgtcgttcgtaattgtgattggccccaggccgtttgcatacgaacccatgttttttgactataactttttttctttgtcaaccaaatccaacgatcttggtatcattcgagagcccttcagcagtcgactgatttggtcaagcaaaccatggttttcttggactgaattgaacagaaggtttttgtccaaatttgatgacattacgatcggagttcgaattggaaaaaaaaaatccaaagtgatgtttaaaataaggaaaaatttattaggtaaatataaaaacaggtaaaattcttatgtcgctgtgcccaagcagattctgttagttttagtgccaccgttttcggaccaaattttcgagtttcgcacttttggctcaaaagcgatttaaacacaaggaaacgcctgaaagctaccaattttgcaataaaagataatttaggtaaaccgtttttagacggaatgaaagcttttgtttgtatttcttggttgcttaaataatacatacattaaaggattttttacaaatatgcttttttcccacaagaaaaaataatgaaatgatccaaaacagcgggggaaaattgtgtaaaaaggaggggacggtgaacagaaggaacatcattagtactgtaattagcgcaagcttaaattcattatgaataacaacctcttctcaaacggattcacacgcctaaaatcgaatttttgaattcacccccggggccgaagaagtcaagggtcggtccgcccttgagggataatcgaaaaaagaaaatttgctgaacatctttcaaattccgaagaaaatcttgctgaacgtattaaaaattttgcaggctttgcttatacataattttgacactccaacaacttcaagggctcaaaagacattcaaacaaaagcaaaaagtttttaatcattaaaaatctgatacaattaacattccaactcaacatgttccaatccgaaggtcgtattgtctacataattgttaatgttctctcacttagagacgcgcgggatgaaatccgtgcagattttacaggttctaagtccgcatttttttgaattggggatttttctcgcgagatccactcccgcaaaaaaaattgagttcaaaatctcgcagcgaaatccacaaatttgattttttgtgctggatcccgagggattccattgaatttgagcaacttgggcataccatccgaacgaggcgtgactttcatcgggcggaaattcggggagaatgccgtcatcgaaagagaaacaacgaagtgatggacaattgctgagcaatgacggggccaattggcgcaaacggcgaaaaatgatggtgttcaaaa

SEQ ID NO: 9941 - DNA, 1595 bp, Heterodera glycines
agaagaagtcaactgcggcgtcaacataggcatcggaggaagaggcgcagaagaagaccacgacgactacatccgattcgacgaaaggaaagaaggaagagaagcccaccagaacatccgagacggacacggcagcgcagaagaagccaactgtgacgtcatcaaaggcatcggaggaagaggcgcagaaagaagaccacgacgactacatccgatccgacgaaaggaaagaaggaagagaagccggccaaaacatccgagacggacaaggcagcgcagaagaagaccacgacgactacatccgatgcgatgaaaggaaagaaggaagagaagccggccaaaacatccgaaagaaggacaaggcagcgcagaagaagaccacgacgactacatccgatccgacgaaaggaaagaaggaagagaagccggccaaaacatccgagacggacaaggcagcgcagaagaagccaactgtgacgtcaacaaaggcatcggaggaagaggcgcagaagaagaccacgacgactacatccgatccgacgaaaggaaagaaggaagagaagccggccaaaacatccgagacggacaaggcagcgcagaagaagccaactgtgacgtcaacaaaggcatcggaggaagaggcgcagaagaagaccacgacgactacatccgaagcgacgaaaggaaagaaggaagagaagcccgccaaaacatccgagacggacaaggcagcgcagaagaagaccacgacgactacatccgatccgacgaaaggaaagaaggaagagaagccggccaaaacatccgagacggacaaggcagcgcagaagaagaccacgacgactacatccgatccgacgaaaggaaagaaggaagagaagccggccaaaacatccgagacggacaaggcagcgcagaagaagccaactgtgacgtcaacaaaggcatcggaggaagaggcgcagaagaagaccacgacgactacatccgatccgacgaaaggaaagaaggaagagaagccggccaaaacatccgagacggacgcggcagcgcagaagaagccaactgtgacgtcaacaaaggcatcggaggaagaggcgcagaagaagaccacgacgactacatccgatccgacgaaaggaaagaaggaagagaagcccgccaaaacatccgagacggacgcggcagcgcagaagaagccaactgtgacgtcaacaaaggcatcggaggaagaggcgcagaagaagaccacgacgactacatccgatccgacgaaaggaaagaaggaagagaagccggccaaaacatccgagacggacaaggcagcgcagaagaagccaactgtgacgtcaacaaaggcatcggaggaagaggcgcagaagaagaccacgacgactacatccgatccgacgaaaggaaagaaggaagagaagcccgccaaaacatccgagacggacgaggcagcgcagaagaagacaactgtgacgtcatcaaaggcatcggaggaagaggcgcagaagaagaccacgacgactacatccgatgcgacgaaaggaaagaaggaagagaagccggcccaaacatccgagacggac

SEQ ID NO: 9942 - DNA, 1861 bp, Heterodera glycines
acatacatatgatcatttttggacaaaatctgataagaaacgaccaaacattttcaaaaatttatcgaatagcaatttgaaaaaatgatgcgcattatgaaaaattgtccttttatattagagttgtgagcaatctcctaaaacaaaatttcatcaccatttcctggctataaaagagccaattttctgtttttttttattattctcacatatcttatcttggcgacactattgcctattctttactatggtggctttcaccattattcctcatctgctgctcttcactgtcttcatgtccatcatcctggtgatcctctctcaatgttgcggctgtacgccttcaaagaagaagcaaactgcgacgtcaacgaaggcagcgaaggacgaagcgcataagaagaccacgacgactacatccgaagcgatgaaaggaaagaaggaagagaagccggccaaaacatccgagacggacaaggcagcgcagaagaagaccacgacgactacatccgaagcgatgaaaggaaagaaggaagagaagccggccaaaacatccgagacggacaaggcagcgcagaagaagaccacgacgactacatccgaagcgatgaaaggaaagaaggaagagaagccggccaaaacatccgagacggacaaggcagcgcagaagaagccaactgtgacgtcaacaaaggcatcggaggaagaggcgcagaagaagaccacgacgactacatccgatccgacgaaaggaaagaaggaagagaagcccgccaaaacatccgagacggacgcggcagtggagacggacgaacggagcaaatactttaagaagatgtgataaacccaccgtatatgtgatccgtattgtatatatattgtgttgtattgtacataattccaccgtaatgtgatcccatgtatattgtattataccaagataatcccatcggtatgtgatcagtattgtatatatattgtgttgtattgtacagaattccatcgtaatgtgatcccttgtatatgtgttgtattgtacagtaaacaaattaaaccaaatctgtttttcatttcttagggttgtatttttctgaggtttgtaagcttaaaaaaataagcactaaaatattcttaaaattagaaaaataagtaataattaaggctcgaaattatacggactaaaaaacatcaaatatggacaaaaaactttttggaaaattttgcctttcggttggctcgtccagcaaatgttgagttgagctaaacacacaaacaacaaattgaaaacatatttatttatctcaattaattaattaaaattgagagatttcgcactttaactttttgtaccatttgaaagctcttgacgagatttttgtatgaagtcgaaccgcgccatctaaaaaccgacaggcataaaccggtttttaaccgattcaaatcttatagtaccaattcagtaccaaacgtaattcctgatttttagattaagctcgtcaagagctttcaattggtaccaaatttgtctggactcagtcgtttaaaaaacagttcgagtgcgaaatctcttatttcgagtgccgataggcgccgccgggaaaatttttgaaaataagcactaaaatattcttaaaattggaaataagtaataattaaggctcgaaattatatagactaaaaaacatcattaggccccgccaattggtatttttgacagattttttacataacagatttcactcaaaaatcataattttaaaataaaactacagaaaaacccataattggtgctgaaatggcaaaaatattcgaaaacctggccacatatgtacttttgctcaccttgaccagatttttttgt

SEQ ID NO: 9943 - DNA, 5288 bp, Heterodera glycines
  unsure (1)..(5288): unsure at all n locations
cctcggtttgtgccatgggatcagccgggtcggtgtacacgctgcaagagtgggaacgtggagctggactacatcatccagccagagggagtgaccatcttctcttcccggctcaaggatgacggagagaactttctgccatttgatgagatcggtaagggtttggactactgcgaaaaagtaatcagcaacttaagtggactttggcgacaatgccaagtttcgcgtccggtcacggaacaaaatgtttaccctgccactgagacacccggaagtttaccaggctgcacaagtcgcagcggaagcgaatgactgcaggcagaagttccaccaatggctgagaacaatgatgatgatgatgataatgttgacccaaagtgataactcagtgtgttgataagccatttgtcatcattcgtgatggattacccgagaataaatgagcgtgaactcaaatttcccattccctccgggattgttgtcagcgggccctcctcttcgggtaagacgcagttggtccttcgcctgttggcacacgccagcgagatgtttgatcccccgccgaaggtgataggtaagccctctttgccatgatgatgtaatgggcgtcccattgggttaagtttgggcttacggtgagtactcctcgcagatccccgagctcgagaggcagggggtagtcccgcacgcaggcccaccctccgaagaaatgatgaaaaagttgccaaaaccctttcttattgtctacgatgaccttatgggtgacattgacgcgaagaagttggctgatctgtacaccaagaagtcccaccacaacaactttcggtgatattcgtcacccaaaacctgttcgacaaggcgatgagagtgccaaggtccaatgcgcagtacattttcctgatgcgtgcgcccagcgatatgctgagcattcgtaatttgtccagccaaatgtttcctcgcgcgcaagggtttctgatggacgcgtacaagcaggcgtgtgccgatccgtacgggtatctgttggtgacactacacgcaaacacagacaacctcttacgactgtggacaaacattttcccagacgacgaagaaaagattgtctttgtacccaaaaatggttaagaagcaaatggtcgtacagcgggtgttggacaactacgagtatctgaagtcccttgggaggacgacatctcacaagaagaggcgtcatttgttgagcagtgcaggttgtgaagagctgttggctctggtggagatttgcctaaacctctgagaaacagccgatcgcccaggaccaacaagaaagcgatcaagcagaaagaaatgaacgagaagaaggaccacctcttggccatcattatgtctgatccgcagagattcggcgctacggaccgtgggaaaatattaaatccaaagacggggcgggagttcatcgactcggacctaagctggtcaattgaacgcctagtggaccctcgcccggagaatgccccttcaccaagcggaaccaaagagttgatgaggaagctcgcacagaatccgctcgccagtagcctaattaatcgactattcgttgggtctggacaagtcaaacaaacgggaggatttgttccctctaaatggacgaaaaaataaacaaaatatacaccgacccggccaatcccggtgggtttgcgggtgcgagtgcactctatgcagcggtcaagaagaagcacccaaaactgaagaggaccgactttgatgactttttgcagcggaacaccacctacacgctgtttaagccaaagagggagaagttccgacgccttcgcacagtccccggagggttcatgaccggtgagtttgtccacgttattttcacgtgatcggctcagacgttcaggcggacttggcagacttccaagccctttcgcgaaagaacagcggctatcggtacctgctgttggcggtggatgtgttgtcgcggcgtatgttcggctcacccgtaaagagtaagaggccggcggacgttaaaagggcatttgaggaggtgtttggccaaatgccaaaacttccggaaacactgtacacggaccgtgggctggagtttgtggccaaacccatgcaggagttcttcgctgaaaatggcattaagaaatacgagaccagctcaaagaagaaggcagccgtcgcagagagagccattcgtacgctgaagacccggctgtacaaatatttctctgccaaaaacacctctgcgtgggtggatgtgttgcccaagtttctgtctgcgataaacaattctgtgtgccgcgcaacgggacttaggccaaacgaaatcagtgacgtcaatgcgagagaggtgtggaagagggtctatggcgaaggacttgtaccagcggacaagagcccaaagatcaaagcgggggagactgtcagaatccccgagcccaagcacatattcgagaagggtaaagttactcctccattttttctgtattttttttttgtgtttaaggctatattcccaactattctgaccatgtgtacaccgttgatgcggctcgcgcaaccaaaccccagcactatttgctcaaggactattatggcacaaaaatgaatagaaagttttatttgccagagctaacaaaagtacaagtggacgaaaacacaatgtataggatcgagaaaaaatacaaagaacgaatgagggatggaaaaaaggaaatattggtgaaatttatcggatttccggaaaaatattgggtcacagatgaggattttgaaaaataaaagtacaaaatgaataaattattcgcgcttacagagacaatcgtaggggttatgggccttacagtaatcccatgagctatacccaaaggggacaaccttaagtccacggtcccggagcacccccttattcacggtggggttgaactgcttggtgattggcacagttagaatgtcgccctgcttcgtgatgcggaagttcttcgtagggtagtcgaaccgcacatggttgccgggcgtgccccacttctccagcaccatttctttcatcttctcaaagttgatgcgggtgcaggcgttcgagtccagcgtgatgcctcgcagcttcagcttgtactcgtcctcgccggttgcgttgttccgaagccaaagggcgtaggccttgggtccagctgaaaacgattagaaatttattcaaattattttggacaaagtccttaccacagatgaactcgacgatggtatggttggggtactcgtccgcgagctccccaagctggttgccacccttcagcgggtctcccagtgcagtcttgaagtcatagaagatactgtcggtgtcctgaaaaacgaatattttattatgaacattttaattgcacactcttaccatgtataaaatgcgcgtgtcgtagcgctgaaccagattttcctgcctgtagaccaattgcagtgagttgagcaagtgcacacgggccgctgccgtagtccatagggcaatggcgacgttgctggtgtcgtgctccaccacgtgctcatctttcgccttgtagcacaccatccagaatttctccgtcagttggtcgatgctgctgatgtcgattttgacgtcgttcagaagcttcgcaaggtcggcgtggcagtcgatgatttccgtcttcgtcagccgattccgcaacgcaaagcggccccacagcgagttgaggcacagcttcgaaaggtaccgcatgccgggatttggcttgatgttgttggcgtcgagccgcaccgtacagcccttccatgggttgttgatgtattgctgctttctgcgctccctctcctcctcgtcaatgtcatctgcggcacagtcagcagggaaaccgttggctaaatgattattgattaatttaattttgattgctgataaaactaccctcaaattttatgcgcaggaatttgttgaggtaggagaggaagaggccgttactccagtcacaatacagcggccagacgtacgcccggtagacatgggtaactctgtagccggatcgcagcgccgcctcgagctcgatgtgtgggatggtcgttgagaatcctgcgaaggaaaaataaaatcattggaaaataaagccattggttacccctctcagcgtcctcaaagtgagggcagttgtacccagggtcgaccagaccctttgggtacatctccgcgcatttccggcagagtgggaagagggtcctgttgttacgccgcattgggatgaccggaatgtcgtagaggcagtgccgaggcgggacaacgaagcacttgatgatgccctccattttcacgccgtcgtcgtccacaatgtgttccttcgcagtccagttgacgtccttgtccatttggatgacctttggatgaccgacggggtagttggtgaacatgttccttaattattgattatttgtgattatttaatttattttctacctggacgggtacagactgttgaagtccttcactttaatggtccgcccagcctgtccttctttgtccgggatgatggatgctccgagccactcggggccagtccgacctgtaaacaaattttgcatattttaaccaaaattgggggaaatgacctccgaaaaaggcgtcatggaagtcaatcgggccggagtcgggcgtgttgtcgaagaatgccttcatcggtgggtccacttccagcattcgaccgagctggcactcccacacgatctccacctcgaaatcccgcgcaatttgccgaatcctcttctcatccctcgctcgaatggcaccggcagtctctccaccgccaacaattgtgtcatcctcggggaagcagtgcgggcacgcgtgccaataacacctgaagggagaaaaattagcataagtttggcaagtgtttctttacccgttcacttcaatcgccaagtttttgtcctcgccgatccgctccagcatgccgtccagcaggaagttgccatgtttgtactcgccgccagggctttccacatggcgaagagtccatccgttgtcgcgcatctcttcctcggcacgccacttgaggtacttgcgggcgatggcactctgcttcccacgcttctcgtagccaaggtgggggatgatggccaccctctctttgccgacgtgcgacaagaccacgaagaacttcatgcaggcggacnggatggtgatggagtcggtcagctcctggctagntgcagcggcgaacaactcccgcattttgaccatcccatggcgagaatttgacatctgaagaaaatgcatatttttcagattttccgatttt

SEQ ID NO: 9944 - DNA, 2455 bp, Heterodera glycines
atatttattatctaccaatattcgtggaaaattctctttgcgggatgagtgggaaacgaattttgaacagtgccgggccaagcgcagaacgacgattctcagcggaacattcgttggcattttgacggcacttttcgtcggcccaacggagtgccaaaaataatatttaaaatatattaattctaataatttaaaagaatcgaacgattagatatttaactaataaatgttaattgatgtataaatatttacagcctcccaaagttcaaattcgttgttgatcgccaactgattatgctcgagaatttcatccaaaatattttgatcaatttgcaaaaattcctctgatctgaacaataagcccacattttgacaaatgtaacccaagcagcgatgagcaaaatccttaaattcgaggcttaatttaatttggaagggcatctctgggcgaaaattatataaaaatttatttatttttaatatatattttatttcaacattttggttgagaaaacaagcttggccataagcgagcaaaacatttggcaattcgttaattggaaagtccaagaaggcctttagcagcaaagcgatgttatatttatttgcttaataaataaaaattaatattttttaaacattttcaccggcgtaaagcactgccatggcattttgtccgttcaattcgcttaaatcttccgcataaatgaagctcaacatcactttgaacgcttctgcttcaacatcggtcacttcaattacgtgaggacagtcggcagaggctaaaaaataatgaaaaattatttttagaaatattttcggtatttttttttgtttacttttagtctttgagtttttgtcatcaaaacggaacatcgacccaaacacagcagaagcgaacatcatcacgcatttgtgtgctttaaaaagctaaaaaaactcggaatagaaatggaactagttcaaaaataaaaaaaaaatgaggataaagattcaattaaattataaacatttccctggcggcgaagcaccgtctgaccctcatttttagggagtccaaaaatatggatataaaatcgcgaaatatggccataaaatatggaccaaaaatcgcaaaatatggacataaaatggcaaaaatcgcgaaatatggacataaatttttcaaaattgaatgtaaaatttcttcaaatttattggttgaaattgcatatgagatacatttccaaattttttgactcggtaagacgctttgacaaagacggctttcgttcggaaattggtctcgaattttttcggcaattacgtgcaatcattttaaaagaaaaaaaacataaaagctaaaatttattaatttttttagcgcaaaatcaataacaaaagcgaaattttcgcttttttgcttatttttgacataatttattaatttttaagaaaatttaaatttattctatattctcgagaaattttggcgaaaaaatgattttttgaaaaatttttcgggttttgggctcaaaaaggctaatttagctgctgggggccgttctaatagaggtttttttttaaaaatgccaaaatatggaccaaaatgccaaaatatggacataaatcgcgaaatatggaaaatattgatatagaaatccttcctagaagcttcaaaccaagctaaaaacatgtttttcgtgcgtttcaggcctcccacagtccaggaaaaaaatatggatttccatataattggactccctactcattttactaaaatttgaccagaaaatggcaaaaaatttggtttttttttggcaaaaacgaatacaatccctgcttttcctccgtgcgctgaaaattttagaacggaaccctggattaatcaacttttgtgggttcaactcacctccttttctttcccaaccaaaaagtgaacgtccgccccttcgcccgtgctcaacatcagcttcatccgatccaccaaactgctcgacatatgataagttgcgatggcaattgaattatttatggattaactgaaatcgcaaaaataaagctgtccattggcccaaaattttgatagggttgaaacccgcaaatggggagggaatttattcgttagtgtctctgaattctgaaaattcttcccgaagattctaactcataaatagggtgaggatttttagcggcaaaaaatcccaaaataattaactaaatagtgacagaaaaatgcgaaaatagtggtaaaataataaaaatcctcactctactcataaacaaaaaaaaaggggggggggggagtgggaggagggattgtcgcaaagctgagaggggagaaaggaaaggatgaatggaatcgaggtgaatgaagaacggacggatgaccaagaccatttgcatctgtccattgattgttgtcattggacagtaacgggcaaagcctaattttgttttatatgacaccagtgcc

SEQ ID NO: 9945 - DNA, 2508 bp, Heterodera glycines
ataagggtgggaatttaagtcactaaaaatcttcaaaaagtcgactaaaaaagtcataaaaatcccaaaaacatttaactttaattcccagccctactaatcatttttaaagcgatgttgagcacagctgaggacgcggatgtgtactttttggtgggagaggaaaaggaggcgagttttgaaatttaaaacatttaattttcaaaaacctcaaaataaatcagggatatcggcctaataatgcgtaaatttgttatttttgatgcaaaatacaaatcgtataaattaaaaaaaatttcccatcgaccgctattatctttcaacaccatcgaccaaatcacctcctaaaattctcaaaaaaatattattctctgcttaccgcctgaggcttcaaacaaatttaattttaattgtttctctttttaagcttttgcctgcccataaacggattttggcagtgcgcttccgacgtatttgaggcaatgttccgttttgactcccaaaacggaaaagcggaaaatggtatgaaaaacggataataaaataataaataattatttttatttaatcttttaaacattagcctctgccgttagtcccattgttgtccctgatattgaagaagcagtgttccgagtgatgttcaacttcatttatgcgcaagactcaagcggactaaacggacacaacgcaatggcattgctttacgctggtgggataattaatttttttaatgggattattaatttcctttttgtgattaaattaaataaaatttcatgcattttttgtttagccaaaaagtacaacatttctggtctgatcaaagcttgcttggattatccaattggtcaattgtccaatgttttccttgccattgaccatgctcgttttctcagcgaacatgtaaagtttggcactgattttgaagaatttttttttgtaaatgaatttaatcccaatttaatttttttttaaattgccttttaaggattttgctcttcgctgcttggatttcattgaccgaaacgcgaaaattttattgcaatcggaggaatttgcacaaattgatcagaatttattgtgtgaaatactcgaaagtgatcagttgagaatcagcgatgagctcacaatttggaataatgtaataattaatgtttaaaaatagaataaaaattattgttcaaatcatttgactcatttaaggcactccgttgggccgacgaaaagtgccgtcaaaatgccatcgaatgttccgctgagaatcgccgttctgcgcttgggccggcacttttcaaaattcgtttccctctcatcacatatgaggaatttacacaaaatattggtaaatatggaagaatttaatttaatattatcgataattcatccaaaccttggtcaaaaaggccgctttaataagggggcgttttaaaatatttttttgttgttggaaaatgcccaaataagcaccaaaacgcacataaatcgcgaaatatgcatatggaaaacgtcctagaatcttcctaacaagctacgtttcatatgcctttcacagttcatgaagaaaatgcctgtgcatataattgaacgctctattcataatttaaaaaagtttttaattttttttggcagttccttctggcgttttaacatcagaggaatctgtcggcatttgtcagttccatttgcctgggcttttatctccggtggcatttccaaaccatgcacggatttccacgtggaataatacccccaagggaaacgcagggactctcgcgttggaaattacgaaattttctcgatttgcgcgaagggacgagggaaagtgccgacttagcaatggcaaagtgcacataaaggcacttccgtggaaaatatgtgccaaaataaatacgacgaaaaacgaaaatggcaccaccgaaaagtgtttgggctttttccttcagtgcaccgcgccaagggcaggtgggataatgataattaatggtgttttaattctaattaattattttttattttattaagacccgaaatggagttgcaaatgttcagcgacatttcgaatcatttctcaaaagcgcggcacggagcatttaattggaaaacgcaatgatcacatttttaacaacaaaatgaacattttgggtttctcaaattttattactttttctgtaagaaacaattaagagatgtctttttttataattgaccataattaaggaattgatggacccgagcagaggattttatgacaaagacggggacaaagtgacattggccatcgatgtcattgtgaaggaagaaaaagcggataaattggattattcaaatccaaacaaaacaaacgggaaaattgtgatggaaattggcaaattgactgagttttcgcgagagatttgtttgagtgaacggagcagcgaaatcaaacaaataaagggactttcgtggaagattggcactgataattaatcagaataataaaagcagcgaaaagtgttggcattttac

SEQ ID NO: 9946 - DNA, 1635 bp, Heterodera glycines
ccgtcaatgctcaccgattgcccagcccttcgccatgttcatttctgtggcactttgttgcccgaatttccgcccgacgacagtgccaatgcgtcggatggccaagtggtgaccaaatggctgttcacgcctcatttcgacaatttgccgaaggcatttaacattgtgaagttaactgtggaccaatggacgacaattgtggaacaaatcaaagcggtgatttttgtccaattaattcgctttttaaatgttttgtcttttttaggccttttcttctgcttcttctcctgttaatttcggcatttctgttctgtttccgccgtcctcttcactttctgtcgttgtgccatttgaattgatcaacgaatttactcaagagaaattgacactgtccaaagaagacgaagatgaagaagaagcagaagatccaaaatatttttatctcatccgttctccaattgtgccggaagatcagaaaaagcagaagatcaatgaaatggggggccaatggaacaaaattgacatagtagccacagacgacgaattcatcaatcgatgaacaattgcatttaaatgttgttgtatttgatttttgcttacaaattcataaaagatgttaggctttaccacgcttagtaaattttaaaaaacgtacaggaaattgtttatttaattttttccttatcaagtcatacatatttttatgtttttgtgtgttttgatacctaaagactcaataaaaaaaaattttgcctatttttatccgagaaatttggcccatttttgcaacaagcattcctcaattttggctttgccggtcgcgatcatttggaatttcaccgacaattttctcaccgatccaatcatggacgacacccaactcgtctgtttttcaaaaaaaaatcgtcataacttttgttaaagtcacaaaataaacattcttggaatcattcaatagcccttaattctctataaccaagcaaaatgcaagaaaaattttattgcttttcaaaaaagttatgaccaaaaatcgtaaaaaaaaaatttcgttcgtaacttttttttcaaacttgatcaaattttttgaaacttgatgggtggatagagaattttttgggctatcgaatgataccaagaatgtttaatttggttgacttttacaaaagttatgacgactttttgtcgaaaaatagtacgagttgggtttttaccgtccatcattcttcgtatttaccaaatctcgaatggatcatctcaatttaaatttggctgacacattttcatcaaaagacttattgtttgattgattgcctttgatttgtgctttctttttgacgaaggaaaagttgacacgaacaaataagcaaagaatcacattttgattgattggctgatgaagcgctgcccaattattggaaaaaatgggtgaaatgatcggatattcggagaatgacaaaatgacaaggagcatgaacaggcagaatgaattgaatgtgatctgctgttcgattcaaaaacggcaattatatacaaaatatttcaatttaccttttaattgattttttgaaattttcaaataaaccccaaaatgggaaaaattggtttcatgggacggtttgcctcactcagttcggc

SEQ ID NO: 9947 - DNA, 3855 bp, Heterodera glycines
  unsure (1)..(3855): unsure at all n locations
ttaaatttcagtttacccatatttgtttatttttgcaaaattttaagccgtctcgccaaaaaaagttgcaatggattcccaaagacgcaaatgaccgccgcaactggaagttgtgcgtcactttaaaagcggtacggttgctttaacactccatgttgcattttgggtcaaattttgaaaattttaaggaaattttatcgtctactaatttttcgaaaaatgcacccattaaaattttgagatttttcattcggaggacccgcctataggcctgggctttcaatatttctctcttttgtcagattatcccttcgctctccccactttctgcgccttctccgcccccaatgtcttccgcctcctctttttcgccgacaaattccgctagtgaaaatagcacaattcgctttgccttgcccatcaatcaggcgaaacaactgctgcattgccttgaacagctccaaattgatggtggcagcgacggaggctgtgccggcaattcggatccattgaatgtgcatcagcaaagattgtccggcccattgttcggcttcaaaaagagcgcattttatttggtgggtggcccaagaaatgagggataaagttcgataatttatgtataaatcaaaatcgacgcttcacggtcttaaaatttaagaacttgagttgaggacggtttttttgtcggaagcattttacccattcgggactcaatcgtcctatagcctatggtaaaaaaaattcaattttaaaaatagagctcacaatcaagcagccatttaaagccgtaattctgtttttgaaattagaagccatcattttttcttttatttttgcttcctttttcataaattcataaaaaagattttgcattctgtaaaagtaaaaattaacgattcctttatgaaattatttcaaaatttttgatggcgtcggatttgttgcactaatcctacaattcaaaaaaaatgcagtcatgcggatatataaagaatgattttacattttctcaaaaacacagagtgtctgccgtccgtccaaagcactgtcgggcaaaccgctcgtatttctgtctgaacaccaacttttgcccaacgaatttcacgcctggtacaagtgccacagattttgaatccgatcattgccctgtattttaatccattggcacttttcccaaaggcattcggtggtcaattcccttccattgtccctgtgctgtttgcccgaactgcgcaaatgtctccgattggtgcttgaacagcccgaggcgacttcctctgatcagcacagagacaatcaaagcagcaatgcatccacaaaacttgggcaaatgtttcttgcttagattacacaacattgtttttctattgtgaataaattttatgtccatttatttttatttgggcaatggtaaacaaaataattgaaggattcgtgatcggggaccccaaaaaccccagagaataaatttttatgactatcacaaaaaaaattttgcaaaacaaaagggtccccccttttgaaaaaattttcaaaaaggcccacttttacagtagcgcccaaaaatttatgtgtccaatcaaaattttcctaattcgaacatccttttgacataaggtaccaaccattgcaaaaaaaataataatttaaatattaaaaacgtaacaccaagttcacacacagggcattgaggcaacttggcgtgcagtgaaaaatggtcttcgtcatcttcacggcactaaccccgagcttttacaatcttatttgtatcagtatatgtttcggagatctaacaataacgaaaaaatttttcagcaaattctcgaagaaatacgtattcaataccctgtctaatcatcttttcgttgtattaatcagtcttcattttgacatttaagcatttaatgccaatattttaaataattaaataatttctaataattgattggacacataaatttttgattggacgcttaaacttttgattggacgcgtaaactgtgattggacgcgtaaactgtgattggacgcgtaaacttttgattggacgcgcaaactgtgattggacgcgtaaaagtcgattggacgcgtaaaagtcgattggacgcgtaaaatgcagtagagcctaactcgaatacgggttcgggattcgaatttggtctaaatggatgtcagattcgaaatcagcgacccagaaaatccactagaaattttttacatgatttgaaaataattttattttttatagtctgtaaagtgcataagtagtaccattttatctatgactcatcaagtacttgattttttacaaagttttaagaaaattagtcgggataaaaacnccttacacatatgttgtagagctcaaaaagagctttagaatgagctattaaatttctgaagaagtcaagtttttagatcacagaagagtcattggcgctaacggttggtcgaatgaatcaaaaaacaaattcattaatttattaccaaatttaaatttacattaattaaattttgaaattattaaatttattatttgaaatgagagaaagacagagaaaagcggtgggggtcggtttagtctggccgttttagtctggccggtttagtcagagggtcggtttagtcagagggtcgttttagtctggcaagctgtttttgtcctacattgatccaattctgatttgtttctcgaaaattctttaaaattaacaccataacagatttatcaatgtgttaacaacaaaaaaataacaaaacttgaaaaatgaatacgggcatatttcataatttcgagaaataccaacgagaaaattgatgatattatcaggattaacattggcatggtaattttgatcattttggtgagcagggttaatgttgttgatggtattgtaaccctgtaagagtcgaagaattcgtatcaacggcacgatattttcgcgttttttgaggagggacttcaccagcgatgcatcgtgcgatgtctgcatcaattgacttttctcatatcgaattgtgttgatgaagcggaaaacagttggatataaacaagcaaaagctcgttgaatgaaaaaaaaattagggtttactttgcctgaagctataaaaaggcggtgccaaactgaaggtttcgctttgtttttattttctaattgggatattcatttatattgtagctaaacatagatattttaagtttttccttatttataattgacaaaaaacatttgtaagaattatgggcgaaaacggcttgccagactaaaacgaccctctgactaaaccggccagactaaaacgaccctctgactaaaccggccagactaaaccgaccctctgactaaaccggccagactaaaacgaccctctgactaaaccggccagactaaaacgaccctctgactaaaccggccagactaaaccgaccctctgactaaaccggccagactaaaacgaccctctgactaaaccggccagactaaaacgaccctctgactaaaccggccagactaaaccgaccctctgactaaaccggccagactaaaccgaccctctgactaaaccggccagactaaaccgaccctctgactaaaccggccagactaaaccgaccctctgactaaaccggccagactaaaccgaccctctgactaaaccgaccagactaaaccgaccctctgactaaaccggccagactaaaccgaccctctgactaaaccgaccagactaaaccgaccctctgactaaaccggccagactaaaacgaccctctgactaaaccggccagactaaaacgaccctctgactaaaccggccagactaaaacggccagactaaactgacccagtccgt

SEQ ID NO: 9948 - DNA, 1230 bp, Heterodera glycines
gaccctcccgccccacccaaacccgtcaacgcggatcattctttggataggaatggacaggaatgtccgctcgatgaatccccccccccccgcttctcttagctttacctcaccatttttttacttcctcggcctctttcgttcgtcccttttgctgttcttgcgatgccactttctcgagttcacgtcaatttccatttctaatttctgtgccaccgatgggccgggggatgcgaactttgatggccgggggcgggggaagggggaaatgaatgaatgccgggggcgcgggagaggggggggggaagacgataccccaccagagaagaagcattgaggagagaaaggaaaagcgaaccccgaggcaaaaaggaaaagttaattgacttttagcggtgacatttttcgacaaatcctttttttgcctcatttaatttgttccgttcaaatgcatcattcgagcagtggcagcggtccttcgaacaggttcagttttgtgccaaaattgcttttagcaaccaaaatgcccaaaatgccttcaggcacattgacagtggcggtgccgtaccgtcggtaaaattggcaggacaaaatgccaaccgcggatggtcgcctgagcaagagcacagaaacagcacgcagctggactcgtatcagaacggcatgatgctgagaagaaggaaaagcggtgccgacgcaatgggcaacgaaatgcaaccagaggcgctgcatgtgcacggcaaccccgtgctgaaggtgatgttagacagtccagcaggcctaatgacccttaaatacccttaattgatgcattcatttggtgccacagatggcggagcagtgtcgcttgtgccgttgctggaagcgatggcagctcgcaattctggccaacgtcggcttcatgattgtgttcggcatccgttgcaactttggcgcagcaaagaatcacatggccaaggactatgttgacccctggggcaaaaaacatgtcagtgcaattagcaaataatctatataattgcctaattaccaatactaattctaagtcgagaagaaacattatcgagacttggtaaagaaattctcagcttaagccaccgacccaaaactgatcaaaattactcagtctatgattaaatatcctgtttagcctaattaaattttactgtctatttaattacttttgggtcactcaaactgattttttgatttattgtaatcattttgatc

SEQ ID NO: 9949 - DNA, 4129 bp, Heterodera glycines
  unsure (1)..(4129): unsure at all n locations
acgcgtttcggtcgcgttccgacacttgggtaaacagaaganatatatatttaaccctgcggcgtttgnagaacatttcaaaaagtcccaaaatcaaaaccgataattgggaattggttagtctgaattcaaagaccgatcgctgactgaaattattggccaagactcttgggctcgggtaaaacattttggagaaacgtttctggggaacaatcatcaatcgatcggcgcccgggggaatgcgatttgttagaattttccgatgcgaattttaaaatttcattttcttttttaaacttaaggtggcactcgtccaaattgctcaggtctctctttctcctctccactcgcttttctcggccatttcctttcttttttctttgccttagggtctcgtccaagggttggcctatccggcaatgcatggtaataatatgttatcacttatcactaaatgtttttctcattttcttttgaggagtttggtgccattgggcgcctccgttggaacgctcaaagttggccaccacggctttcaccgggtacgaagtgaaactgaccgaaattcgaaatccccccacgggcttttcaggtcgtacgccggggctgtgtttgggctgccgttgagtgccttgttggtttcctacgtgcattggtaaggcattttttggcattcccaatcattgctaacaatatgcacttttttatttgccgttcccgcaggtcaatgcccttttacatttacggagttgccggcgtcatttggtccgttttttggttctcgatgactttcgaaaagccggcctttcacccaacgatcacagtgcaggaaaagcaatacattgaagcacaaattgggcccgtcaatcagtcacatccgacggtacattcacattcattttttaggtgggggggggaatggccaaaacgaagccgaaaggaccaccctcaagcacagattgaaaaaaagtagagagataccggacaagagagttggttgatattgtcaaaatgaccgagtgtgccaatctctaataattaaccaatcaaaagtgccaataatttggggtcagtgcggcacccacccgctgttcgactcgtctctgataaccgttcattttccgactttcccatgtcccccgacttgtccccgcttctgtttgccgctcccctaaaaatgcttctgacgtccctctcgccccgttcagttcggcaccataccatggcgtgccattctcacttccaagcccgtctgggccattatcgtggccaacttcgcgcgcagttggaacttctatttgttgctgcagaatcagctcacttacatgcgcgacgtgcttggcctgcgaatttcggacgtaaacaattacggattttaaggcttactgtacaggaattacgatttttgggtctcataatgacgattgtgatttgggttttttactcttgctaccatactcaccaagttgatactgtacttacttctcctttacaccattctaattttgcttggtttaaaaatgaatttctgttgatttttctgaagttgtcttcctcattttgtacttttcagagcggtctcatcgctgcgctgccccacgccgtgatggtctgttataaaaagaccaaaatcatcattaattgctattaaccaaattgattatgcattatgtaaccgtacttttctccctaattgtccacatttcccctcaagggctgtgtggttttaattggcggccgattggcggattatttgcgttccaacaaaatcctttccacaaccgccgtccgcaagctgttcaattgtgggggtaagcaaaaacatcttctgccgtggattctctacatagaattttggcttaggtttcggctgtgaagcgttgtttttgctgttcgtcgcttacaccaaaagtgagaggacagcgatgatcggtaagtgattgattggccagggtcaatcaacaacaaatttgcgtgaatatcttctgttttctcgctttcagcgatgatcatcgcggttggatgcaggtaaaaaatatgccgattgatcagggccaccggtccaattaggtatccggtccattcttataactaaaacctgatcaaacaaagtaaaatccgatctccgatttggccagtacaatttatcaatcgattgattgaagtggcaaatctgatttgaacatttcgagtaaacccaatcgactgattgtgcagacccatcggcctaaccaaatgattgtttaaagtcgattcgattgatcattgcccttgccattttgtgtgatcggtagcccctcggaattgggcaaattaattgcattcattttccatttcattttcagtggtttcgccatctccggtcggttgccgttctcgcttctgcatttatctttgtttgtccacaaaaactaaaaaatttctatgataggtttcaatgtcaatcatttggacattgcgccgcgttatgccgccattttaatgggcttttcgaacggaattggcactttggccggcctcacctgcccatttgtggtcgaatcactcacttccaaagggaatgccaacggatgggtcggttatcactaattaattacccaattaacgccatttgtttctctaaaattggcactttcatttcttcgtctatttacttctcccccctctttttaaaggtgactgtatttttgctggcctcactaatccacttcactggcatcactttttacgcggtgtacgcctcgggggaattgcaggtgggcgaaggggcggcgagggcaaatcgaatcgaagaacccggcaaaaggggaaatgctaatttgtccgggttttaccgttattgtttctggaaaagcacatttgtcactctccaaccaaaagtcaaacattggggcgtcgaggaaaacaattacaattaattagggcaaaaataggccgaaactgtccagacactttcgactacgtccaacattgagttaaatttaagttttcaatttttcttaattttaaagctatttaggccatcaaggcttgaaaaatttaaggtttgaacccaattttggactttggcacaaatgtcgagtaaccgcagtttttttgctagcgcattatttgctattttttataattaattagtcattttatcaattaggaatgggcggaaccaaagccaaatgaggaggaacaaacgctgcaatgggacgcgcaaaaggcggccgaagcgcgcgcattggaagcggcggcaaaacggggcgacacttacggcacaaacgaagcgacggcatttgcgccattgccccatctgacgacggggcaacaaccaccaatgaacagtgagtttcaagcaaaaggcactcactcactgatcagatcagcgaatgccatccaaaacataggacaaaacgtatgatcaacgaaggccggaattttgagaaattcggcgcgatcagactttctaaatcgggccgggacgaaatgccgtacattcacaattagaagcgttgagaaaatgaaattttagcaaaattctctgccgagttcatccccagtctctcccggcagaattccatttgttggtattgtgccaatgccaaagtccgaaaaggatagacaaaattcttgctttttgcctcctccacagattttcatcaatcgacggcacaaaaccaaaatggcggcaccgctgcaaccaatcccttcatgaccaattggggcgacgactttcaccacgctgggtgcagcagcggcaacaaaagtttcggcactgcttacggaggccagccgcagcagcacgcggtggacgacgactattaccagcagcaaagctacagtagtcgcagttacagtaatccgtcaacggatgaaaaaaggggcggcggaagaatgcaataaaaaataaaataaaattataatggaaaaatgcaaaggaaagagtgacaaaaaagcaaagaaaagaaacaaaaaaaattgtgtgtaaattgaatcattttattgtcaattcttaatttaaattttttgcttaatattcagttgatttagttttgattgtcccaaatttttttacgattaaatgggaaaaccttttttgggacaaattgaaaacaaattaccagggatcatttttttatgt

SEQ ID NO: 9950 - DNA, 823 bp, Heterodera glycines
tggatttttcgcgcgtagggggggaggacggtccgcttccatactaccaaaatccgaaattctatattgttgattgctgcgctcctaaaaatttcaatggtaattgatacttagcgaaacataaactcaagggtggggttagagttcaaactcatctatctccccgtccaccatctccgaaaaaaacaataacaataccccaaaaattcaatgttcgagaaatatcgttctcgaactcggcccctcgggccattagatgtgttgtcagtgtctgttatgccccctccccccactaataacttatcatcatcatcatcacgagactaatgagagaggcccggcggggggggggacggaggaggggactcgatcacctcaatcagcagcagagcagttgggctcccgggagggggtgatggggtgtctttttgccctccgaaaaaattaataatatttgttttcttatctgctcctgctcccactgtcgggtccccgcccccccccctaccttcggggcgaactttccgcggtgtgctcgaaccgccactacatcatgtattgtttttcaggatcatttttaacgcagaattcaaacaaaacgccacactagttcaaacaatggacacacacatacacgcactcatctttattatataggaagataggaaaattcccactgaagcgaaaacagaaataaaaaaactctcatttccctttcttttattaaaataaaaaatgcgatgtaaataatgaacagatgtgagactaattttcaattgttctctccctttcatttcttttctcttatttcttttacttttcc

SEQ ID NO: 9951 - DNA, 3439 bp, Heterodera glycines
  unsure (1)..(3439): unsure at all n locations
aaaaccaataacaataccccaaaattcnnaatgttcgagaaatatcggtctcgaactcggcccctcggcccattagatgtgttgtcagtgtctgttatgccccctcccccccactaataacttatcatcatcatcatcacgagactaatgagagaggcccggcggggggggggacggaggaggggactcgatcacctcaatcagcagcagagcagttgggctcccgggagggggtgatggggtgtctttttgcctccgaaaaaattaataatatttgttttcttatctgctcctgctcccactgtcgggtcnccgcccccccccccctaccctcggggcgaactttccgcggtgtgcccgccccgcccctccagcaacggaatgggggtaggggcgtggcttcacccgtccgcccccgtgcgccattggctactccttcttttgctggagcaaaagggtggtgtggtgggggaaaatgatcaatttgccgcccccgccgggggcaaaagcgccgacgggcgatccgataagccatcaatcggtcggtcggtcggtttgatcagccacaacaaatattttgattgtacacactgctgctgctattggcggtgttttggatgttttgtccatacaacaactgtttctccactcccctctcactccctctgcttttgttgctgcttattgaaatgaggaaaagccacccccgggcaaaatgatttttggcatttcttaattaacattattaaaagtaaaatatttttgttattattttttgaattgaatttttttcataactaggtaaaatgagaaagggccataatactcaaaggcaaattattctgctgaaaattttttaatttattaattgtgaagcttaaatatttttatttccttaattttaaatattataaaaattgaattttaaatagtaataattaatttaaacaacttagaaaaaacattaagactttatctccatatcatccgctaaatcatcggataaatcgaataccctttattaaataaaattttcgaaaaagcgacgaaaaacctaacccattttctcgagtggcgtgggcgggattatccccatcattttcaacgctttcgcttttggttggtggcccattcacatntgggtctccccccccccccctcccattcattcataatactctctacacacatatttattgttttatgaatacaacaaatgcgaccggcattttcgttcatcgcatatgctttaagattatgtgctgctgctgctggcgggcgaatgggtcgcgcagctgccgcctctccccccggggggcattacggtaataattgtattctcccccgggcgtcgagtgggtggggggagaggcggcagaacgcccgccggggccactagaaaaagtcccccgtcccccgtcttcgtctccaccctccccctttttttctaatcggacctggagatctctgtgctgcgcatttcttctctgtgctcctccacctttcctaccttatatgtgtgtgtgtacacataataaatatacggagaaaatgtgaaaatttgaaaaggcagcagcagctgatcaggcgtaaaattgggcgcgttttaaaacatttaattttcaaatttttctgagtgatcaggcggtgagcaaagattttaatgaggtaatgggcgatggtaatgggcacgaacagcaggggtaaactgaacgcggacgcaaaaatgccgtggtcgtggatcaccaaaaaccaaaacgtttcaaaccggggataaggcaaacaagaatcccggttttcgaattataacaaatgccaaatgttgcggaggacgcgggttgcggtcgcgctctatcactgctaatgccggaatccgtccttcttcgccctttctacacaaaacatatggtccccatttgcttattctgttccccgctttttggcgtaatccccgtcaccccgaattgcccgacttgcaaatcatacgcttcttcgttatgtgcatccctaaagggctttttttgccttttagttaaatgccaatacgggcaatggctaagacaggaagtctgggacaattaatttttatcaatgaaaaaaaccaagttgttaatcgatctgattgtgaatgaatcgatcagatcactgggaagaaactgaaaatttaagtaagcttaattacgataatattcatttttgaagttgacaattttgacattttgccaaaaagtgcccttgacaaatggatgatcgcttaaggcttcacacatacacacacaacgagcatcattgtggcctaccaaaacatttgttgtttgtatagtgggcacacaaatgttatcattagcgtccattacgccccgtccgatcaccgcccgtcgtctgatcgaagcggcggcggcgacggcttatgggcgagcgccgggggagaatatggtgggggtgggctgctgggtgggaggctgtcacttccatctgtcagcagtcagtcagcaaaacaaaacatcgcccggggggaggtcgagaaaattggagtggcgagatggtgcgacctgatcaatgttttgttttttgcattttgaatgaaaattagagaaattctccctaaaaatcagtgtcagagtattattgatcggaaaattaataggaggttaaacaccctgataaataatagagattagtttgattggcatttggaaactgatcggattggaatgaagccaatgaacttcggccggaaaattaattcattgattatgaaacgaagaaaaacagatatgaatgtgttagtaattcccgctaaatatcattctcttgataattataaatggtatattttaatggacattaaatgtaatgatataccagggattaaaactgttcgagaccggatgtacgagaatttgtgaatgatttaaaaatgacaaatttgtattctacagagaccttaatctcgttaccgataaatagaagcatttcgtattaaaagcagaaagtgcaacagtttgacctaaaccttgaaatcacaaaaaaaactatcaaggaataaatcaaaacaattaaaattctggtgaaaatggtcgctggatttgacaaaaaatgctgcttaccggaaactaaacctagatcgattccattttggcaataaatcaatactggtcaagattatcaacatgccaataaagtttagtcaaaaaaatctattagaagatattttctgaatcagaaagacagacacataaattttggttttaaactgagcatccaatcactgacttatcgagagactcaatcggcacattgctctgatcaccgatcaaagaaatttgcagcaaaatcccattaaaaataaatcaaaacggatcgccaaaaagataaattccgatcactgtgaccgctttttctgatcaccaatggccacagtatctgaacaaagtgg

SEQ ID NO: 9952 - DNA, 2459 bp, Heterodera glycines
  unsure (1)..(2459): unsure at all n locations
acaatttttgtcggtggccaactgtacttgggtctctctgcggccggnagggggagagactggaggacacagaattgttaacattataataccgtagggcaaagaattttataatatgcataatgtgggtaaatacctagacaaaataaatttattgtaattagcctaaattaagaaatttttgtacgattcgatggctttaagagttttctctattaacttggaaattggaaaaaaattataacaatgaaatattttttgatttatcttttagtaataaaattataaacttttaaacataagagattttattatagttgataatttttgaaattatattcatggaagtatatttgttttttttcaaaaaaaaattaattaattaattttggcaattttaggaattcaaatcaacaattctacacttttgaaaaaagggctttcttcttttttttaatagttttgctgttttgatattgaatcataaaataaaaaatcattaacaaaggaataaagaaatgcattaaaaatgggcaaaaaattaatatctatggaaaagaaattttaaaaatacaaatttaatatatttgtttaatcaattaatttagaagttattttaaaagtcgaccaataaaaaaaacgtacaattgttgttttacataattaaagaaaagggataagttcataaaaaaaaattaaatttttcataattaaagacaaaaaactcagaggagctgatagattgatgatagtaaattagggaaggatggggacaaattggacaatcatcattagcattagcaattagcattcgttgtgctttctctctctctctcctttgctaacacactcactcactaatcatcaattagtgtatctctgctctgttctgtgctcgtgcttttcgctgctgctgtgctttttgggggcgggcgtctgttggctccgcccacaaatcgcacgcatcgatcgatcgattggtcattggtccgcgtttgcctcgggcaaaactaatgatcagcagaaggtgctgatttgtcataatagtgccaaattggcgaacccagaacatatacatccattggactattaaattggtaaattttgtttcaatttgttaatagaaagatgttttgcctaaaatggcgaaattttgggttttaagcgaattttttttagtaattttaagcccatttttagaggattgatcaaaagaaaagcagaaaatttcaacgaagggaaaggtagaaaaaaattaataattttcttaacgagtaattagctttcttaagccaactaaaaaataccttaagtttcgaaatttcgctattttaattacctaatgaattttccaggcctcaaaagcgctgctttattaaatataatttagtgcctagcggacgacggaagcacttgccgaaaacgcagcaccaccacacctttgaccttgattggataagttgcaaaagggaagaagaattgcggaatgccacaaaaagagagaattatgcttggcattttgttttatttttttcaaaagcgccgcgccgccccttctcatgccaaatccgctcgagtgccgtccacttgagtcccgccaaacttttttatgtttttttgtttttcatacattgccgcaaggtcatcgcccatcatcatcatcgtcaccataaaatcttcgtggtcacagtgagtgagtgaatgagtgccgacgccgccaccgccgcggtgccaaaggaagtgccaattaaaattaaggccccgggggaggaacgggattacgcgagacggacgagagtttcccccgcccttccgctttattctctggtcatcaaaaggtaaagaaaaaacagaagccaattctcgagagtcattcacttttttcactctcgatacacagacaaagccccgggggaataatttatgcacaaattttgcttttcaaaaatggccccctgtgtccacacatcctcttaaccttgactttttggagggcttagcaagtgtcattgaaaattttcagattaaaatatgattttttaatggaaattaaaaaaaaaacaattcttatcggagttatatttccttattttcattaaaaaaattctatttttcacctaaatagattttatgtaagattccaaaaaatcggtgtgatttttttcaaaaacaatttttccatttaatttcagaatttttgggtgaaaaattctcgttatggttatagttgcaacatatttatgttcaccccacttgttaaattcaaaaatccttaattgtccattaaggctagaaaaaaaggattaaaactcttacaaaaacaaaaaatgttaattgaaaagctttagcaaattggataaaattcccattttagtttgagggaacgtctaacataacaaaattcaaaatttggctttggtggatcacccatttgcatatgacaagcccgttcaacatca

SEQ ID NO: 9953 - DNA, 3077 bp, Heterodera glycines
  unsure (1)..(3077): unsure at all n locations
tgttcgctgacgatgaagcagccgcaccgctgccattgttgttgttgtgcccattgttctgctgatgatgntgagaataggtcgagtngacgaggaagangggagtggcagatgactaaagaaatgtgattatcatcaagaacgtgctgaatatntaaaacagcgctttccatctcaattcattttcgacaatnttaggagtatgatcagagaggacaacaccattcacctgctgatggctctgaccatcggcgttcgtctgctgattagtgctgctgctgttgcggttattatttgtgttgtagttgaacaggcgacggaccggcgtgttgttggacgcgtccaccaacggcgacttcgcaatggacgcgtatttcaccgcccagtcgtgctcactttcacgcaccgggatgtatcgatcgcccccgtccggtcgatattttgttggtgttgtctgaggagaacccctctgtattcaataacattcataaacaagacaaaaatatttttttataaaccaaaacgaattttaaaaaaaataaatgataacaaatttttttttaacttcattttcatatttttgcgctgaatattaccggtgttaaaaatttttgtggcgatggaggaggtctctggaaaaaggctcgcaaatcgtcattgttgtgcatcccacgcagttaatgaaaattcaaaaattgaaaccaactgaaaatggaataaaaaattgaatttttataggtaaggagtgaatagcgcgcaaattaattaaatgtatgaaggaatggaagcggagctttggaccgatactgccgccctaattagcgtagcccatcatcgccgatgtccttgagcatcgtttgtcaatcggcggacctatctcggggtgtttaacgatggcaaataaattgattgattgatagactcaataaacaagcgggaaaagatttttccgaccggaaagggaaaacgcaatggacacagtcgagtcatatcataattgtgtggtcagtcggcaactaataaatgagggcatcatttatgcacgcgggaaaaatgagtggttcaccagcaaagaaaagggagaaaggtcaattaaagtcaaggcgaaagaagcacaaacacttaatcattcaacaaatttgcattcaataaaaccaaaccaaaaattaatacgtttgacgattaatcgtttaagatatcacttatttttaatttcattaaaatttcattgttttaatacattttgaaaattacttacaaaaaaaaaacaaaatttcattgtgttaaacaaacgaataaaacgcaacagaataagcatagcaaatgctaaaattcccttcatcatttcgttcccgtggaaacgttgaaacgatcgataacaacagaagcgccccggggatatgaagaggaaaagcccaaaacattttgcggacaaaaagattgatgaaaaaaggacaaatggagaagagagtaaagaaaaagataaaaagctaacaaatcgataaaaaagaatcgtttcaaaattttatttttttgatttgcctatcaattgatattgggcaacggacaatgggacagcaaacaaacgaacacgaggaaggggcgggggagtttctgccttatctttggcttagcttttttttcctttacaaaacacgagactgggaattcctgtgtactatggattataccattttatttctttaaaaaaaaattataataagggaattaaaaaccaaaagcataataggcaattctcgtttttataccacgacaatacttttggtttactatttgtttgactttggcatttgatagtaccaattttttagttaattatgacgggtgaaagcgcatatgaacttgttttgttggttaaaccagaagtatttatttacaaaattcctccactaacgggcaacaagggctacaagtttgtttgtttatttgtttttttccagtttaattttttgtagggcagccgattggaaattggacagtcccgactgggtgggaaggctcaggctaatttcaatcggcgacaagctcgagattcgacttgaggacaaaacttcaggtttttatcgatactgacaatgagcatcttttatgacccctggtataaggcattttatttgttaaggtgaactgtttgcgaaagcgccgattggtcagctgaactctgtcgactatgaatcggtatccgactcatcccgctattttgttgtccgactgcgcaacgacaacgcccagaccgcatttgttggcatcggcttcgctgaccgagctgactcatttgacttgaatgtggcgatccaagatcatttcaaagcggtgaaaaagtgcgacgattcggcggaggataacgcagaaactgtgcccaagttggacttgagcttcaaagagggacagaccatcacggtcaacattggggtcagttgaagtcggacaacgcatttaaatcttgcaaaattttgggattcgttttatcttaaaaaaaataatttaagaaatatgtaggtattccgaattggtttttcaccacaatcccctcaatttaagaagaaaacgatcacttccaacaacaacagtagcagtgctgtgcccaaccttcggacatcgctcggcggtagcagtgccgtgccgcttttgccaccaccgcctgcctctgggaataaaattcgaaaatgacgtgtcattttttcacagattttgcttttcatttttctattgactgctgtgatttcattcgcataatttatgaccctaatggagagacttttgcactttctgttttttttttgttttccaattctaaattcaaaaataatgacctcccattaagattcttctcgctcaactgaagctcgaaaaatgcccacagtcttgtttctctccaatatttcttgcatctttgccatttttgcatatcttattttatccgtttgtcacattttttaatggttgaacaaggattaaattgaaaatttcgttttaaatcatttgttaacaataaactaaacttgtaaaataaaaagaatgttattagttcatttgttttgcactttgtttttaca

SEQ ID NO: 9954 - DNA, 4090 bp, Heterodera glycines
  unsure (1)..(4090): unsure at all n locations
atagttcatttgttttgcactttgtttttacaggatttntattgttctctgtggcaatgggcggagcaactgtcaccgcggtgacgaggctgaagaaggactaccaaaagctggtcagggacccagtcccttacgcaattgcagcaccgcttccgtccaacattttggagtggtacgtggcggacgtgaagtttaaaatgcaataatttgaacgagttttaggcattatgtcgtcaccggtgctcccgacacgccttacgaaggtaggcgcgaaaagacctgataaagaggtcgcggaatgtgtttctaaaatagaatttcaggtggttactaccatggcaagcttattttcccgcaggactttccctttcgcccgccggcaatttgtcagtttcggattttcgttattgtcatttgatgattcatttcatcatttttagacatgatcaccccgagcggtcgcttccaaactaacaccagactgtgcctttccatctcagactttcacccggtgagttcagcaggcgtgaaattaattgggtagaaaagcgacagggaattttgaaaatttaatagttttatatcccgtttataatattgcattaaagtaaccaccatcaccctgtcgtaaagtaggacatcttttgttataggacacgtggaatccgtcctggtccgtttccaccattattatgggtctgatctcattcatgaacgagaactcaccaacacttggcgcattggtcagcactgacgaggagaagcgcgtttttgccttgtaagactttcacaaaataattcttcaattgtcgtgtcaaataaatattaaaacattttctggcgttcccgtgagctcaaccttaaaaatgcccagttttgcgagctgttcgtcggcctggccgaccaaattcgggccgaattggaggcggaaagggccgccgcatcggacaacgccgaggggcaaactgcttccggagagtcgacgaccaaaaagtgaaataatcagtaaaaatgtagtttcttcttcattctcaaaaaagggaagagaccttcggtgatccccttacaaatgaatttttatctcgtttttaccagattttggccaacaaatttcatggtgacaatgaggatgtttgggcccaaattttaaaattttcaacgatcattagtgatctttcagtgcataacccagaagatttttagcgtaaattctaaaaaatgcattccgagggaaagttaaactgcaatattaccaaataaacatttaattgaaaaaaggttaaaacggaatttcaggaactctcgacacgactcttcctcactgactgccaatttgttaatggtacgttcgattcaatttataatttcgctcattttcattgttaaggtcgcgggtgttgtcatccttttcttcgccgttcgctacgttattctcaacgcgacgactgtatgatcgaaaaatgtaaaactgatccgactttcccactgcttttttgccctattttttgctgctgctattattccctttctctgtgtttcaccgacgcattttaggcctattcagctgacagaacacttgcctattttaagggtcgtttatgtcgccaattgaaatgcgatttttatgttattcgatttcaatgtaaaaaataaaataaatgctgtccaaatatatttctgttttgcttcccataaggttggactggcccctttaatttggcatttttgaacagagtcgggcttggcctggtcttgtcatatgttttgtccacccaaaaattcgaaccctgtccatcgaaccacagtggtgtcctctccccaaacagtattttttgaaagtattaaccatattttatttcattgtctcatcatatcttttgtttcactcgacatattgcgcgtttctttccccgtattctcaggcccgaaaaaacaaactgctttacgggcttcacatattgtatcatttaatgttttaccaccctctgtgttcaaattaattaatttctaccgtttaaataaattgctgtcgaattaaaaaaatatttttttatttgaaatatgaattaagaattccttaagctattgcggatgttgtgaaagagctcttaaccagacaaaacgcaccgtcatggtgagccttaatgtattccttaaagcaacgagggagggatgggactgggggttcaatggcagttcgaacaaaggtcaaatgtttttttctctaaaaaaatgataaattcaattttttaaatagaaaaaaagcaaaaattattttaaggaaagtgataggtatttgtgaaaaatccagtttttattggaaatatttgaaaaaaaagtgcgaaatgcctattgtacgaaatgccatgcaccggtactgggctcttcgttcgaagaattggtgagaccatgactaatccttggccagggccccagttcccgtccaactgattttaattaaaaaaagtttcagcggttgcgtttggccgtcgtccctccgtccgttcgtcgccttttctcccaattggcctccctctcctcgcgtcagttgctgttcattttgttcctgatgctgttcctctccaccttttggctgggccgtctgtccgttcagttggccgaattggacaacggcgcaatgggaggcattggcgaacggaggacggagccatgtgagggaggggggcgggaaatgcagtgactcattcatgcccatagccagaaacaaatttcggggtggaatccgaaaacttttttggggcggagtcgttatttaaaaaaccaccaatatgatttgatggaaaattatttataacttagcttaaaagcaaccaaattttaattcttgatatcattcgatagccctaacaataagtgttctctattagactacaaaaatttcaaaaaatttcgttaagtttcaaaaaagttatggctagaggaactcaaaaaagcttgttttcaagcatctctgggcctaacttttttgaaacttgacgaaactttttaaaattttgcagactgatagagaacatttagggctaccgaatgatatcaacaattagaaatttggttgcttttgagctaaattataaatagtttttcatcaaatcatattgatgcttttttaaataacgagggcataggacccattttttttttgctctatggaccaagaaatttttcaccagttgaaatgatattttaaggcattgaacagttggccaaaacgcctccgctcagcacttatttgatggtttggctgctgttgttcatttttgcttcaaaactcatatttcaattcatgtttgtaaagatttttaggtgctgatcatgacagggcctgatcaatggggtgagtaatgcttttcctccgcccccgcccgactcggatttgctactccccagtatcgtttcctccccccccccaaaaaaaaatttttttttttttgattttcaaacagaattttttaaaaaaaattttacaaggaaactttattgaatttttttttataaagttgggcgtttttttaaaaattctgacttttccaaacaaatttttttttatataaatgggcacgattgtcttttaactgaaaaaacaaactgccggactctctgcaatttctgacttacaaattagataattgttttttattattccttcccattaattgttttttatttcttcctatttttcgtgactatttgtgtttgcttttgccagaactccgtcgcaccattcgccaaacttggcttcgtctgtccaccaaaacgccgcaccaattccggcatttgttccccgtcggcacgcgcaatttgagcagcgcgcggctgggccaactcaacgcggaacagacggagcacggggacttggcactgctgcacaatctgaccgactcatacgaacaattgtcccggaaaacgctgctttccattgggtaaataattttcaatggatggacgacgaattgtaagctaatttttaatatattttacatttttttaatctgtccaaatttctcaaaccctctctctcactttccgattcaacttatttgttggtattcaaaaatcggattcccccccc

SEQ ID NO: 9955 - DNA, 852 bp, Heterodera glycines
gaatgctccccttattcatatttttgcaatactaattttcttcatcacttttttcagttttgcgatcgattccgtccagttttccttcctgctcaaggcggacggggactctttcgtccgtttgggtgcccttttgcacgcgttgcgttccgtcgcccatccctttctctactggggctttttggacggacgcgcgcggccccaacgcgcggtgggcggcaagtggcgggaggagcagtggcgactgtgcgaccgctacttgccctaccaggtggggacaccacgcattaaatggggggacaaagttttggaaataggcgtaaattgccagaaaatgggcacaaaaatggcacatccctccccaacggacggttgggggcagggaaatttaggcactttttacgatttatatggccgtataatttaattttatatcaaaaatgggtatattttcttggaaaacataaaaattgaaatttctgctgctcgttccagaattagccgatttttacactgttctacaggtccatgcacacaatggaaatagaaaattatagttttacaaccaaaaaatggaaagtctgccttgtccttggggcccagttgacctccctccccccgatctgtgccacaaccccaaaatccaacaggagattaggaagcaacgaatactttgtgattcaatgacatttcgctttcattttcagctcggcggtggctacgtgctgtcccatgcgttggcctccttcctccacctgaaccgggaacggctgaagctgtaccgcaacgaggacgtggcggtgggcgcgtggctggccgggctcaaagtgcgttatgtgcacgacccgcgct

SEQ ID NO: 9956 - DNA, 2032 bp, Heterodera glycines
  unsure (1)..(2032): unsure at all n locations
tttaatttgggtttcgaataaattttgtaaaaatgagacttttgacctaaaatgaggctttttacctgtaaataaagattttgaaaatttaaatctgctaagcctgtttttaccaatttttgttaaaattagttttttattgatttttaaaaaacacatttaaaatagaagtcattaggcctgtgatttggttatcgttgtcgggtggtggcacaccctctaatggactgtcagatataggcgaatattgttggttttggtgttgctgtgtttccgtctcttcgtcctcatctatgaatacatgggctgttagccttccttcactatcgataaattgccgcggttgatgttggcgtatttgtgatggttgctgttgcgacattgatgatgctgatgtgatggctgttgtggtggtggtgatggcggtgatgtagataccaaactttgttgtgttagtagttgtgattgaagttgttgttggggatgtattatcgatattgactgttgttgttgcggtggttgtggtattgatgcagatgccaaattttgttgtgttggtagttgcgattgatgttgttggtgctgtgatgacgaggttgacggttgatgtgatggtgcttgcgcagttacagcagcaacgacagatttaaaaagcgaatctgcagaagtttctgtggggctgaatgcgtgttttgttgtcaagagttgggcgtccgtttgtcgcaatgtctcggccgtttgtagaccaaattgttcattttgcgcgaatgccattgtctttttgcgttttgcaataggcgctaaggaaaaatgtcatcctaaaataaaaaacaagttacaaaaagggttaagacatatatgtccttacaatgttgacacggcaatttgtggtctcatcaaaaccatgtatttttagagctccatttgtatttcgaagcatactataattaattattttttcattaaaacaaggatttatatatttataacccaatgttaagaaagaaattttaataatttataactttaaaaattacatttttcgtgccagagtgatgtctatgtgtccttcatttctggtgcgcttgtttatttcttcgaggagtaaaagaagtgactcgccagccttaatgttatgtcaattttttcaaaataagattaataaaattacatgctcgagtacatccgttccaataaatactcggattccccttggaacccaattttccaaaaatggcactgtttttcgcatctaatacagctacagatgtcgtacagccgaagtgacgttatttcgtagaattccttaccttcgtcatgaaagtccctctggcattgctccatgtggcgatgcgagcaaagctgaaaaataagcggtttatttcgaagttcaggcgagcaaaacgcccgccttccggcgagcaaaacgcctgccttcccgcgagcaaaacgcccaccttccggcgagcaaacgcccgccttctggctagcaaacgcccgccttccggcgagcaaacggccgccttcccgcgagcaaaacgcccgccttccggcgagcaaaacgcccgccttccggcgagcaaacgcccgccttccggcgagctaacgcccgccttccggcgagaaatgcgcccgcctttcggcgagcaaaacgcccgccttccggcgagcaatgcgcccgccttttggcgagcaaaacgcccgccttccggcgagctaacgcccgccttccggcgagatcgcccgccttccggcgagaaatgcgcccgccttctggcgagcaatgcgcccgccttccggcgagcaaaacgcccgccttccggcgagcaatgcgcccgcctttcggcgagcaaaacgcccgccttcccgcgagcaaaacgcccgccttccggcgagcaaaaagagaaaaaccccattaagccacctcttgcgattgctgacgtcgtgtgcgagctcctccaatcaaagtcagagacaggtgaagcgtccacaagggctggatgttgtagtccgcgangggttcgaccattct

SEQ ID NO: 9957 - DNA, 1495 bp, Heterodera glycines
  unsure (1)..(1495): unsure at all n locations
tttttttgaaacaagnccgcaaaaaaatcgttttgaaaagcaaaaaaccatctatcaattctatcaaaattttatgtatacttggatgttaaaaattcccccngtatgtacttggaaaatgacttggtacgatccgagccctgaactatcatatttattacaatttccaaaaaaatttccggcggcgcatgtcgccaccgccgaaccctcattttaccttgttttttgaaattttaagcccaaaatgggtagatttgtcattttttgtggtctgagaaaatgattaaaccggaaatacagaaattttgtggttttcatatcacaacctcttaatatatgacttagactattggtaaaatttttgaaaaaaatttcgaatttcgcttttcgcatattttggctattcgcatttcgcattttttttttcatttcgcatttttcaatttcgcaaatttcgctttttatggcctgattcttctaatttagaatattttagaaattttcattcattcgaccaatttcgaatcccgaagtcgaactgccaaaattagtcgaaaattcaacttttcccaatttccacactttcgtactaaacttgattaaaacaagcagaatcaatcacatttaaatggctttatacagatctgaaatatgtgaatttctgaaattaaatttttcattattgttcgaatttgagtccagaattcaaaaaaggagccagtttttgagttttgtacttagtaatatggtcagaatttttgcagggtctaaaatttttggcacgaacacatgttaaaatacggtagtgtcgaactaccgtaaaattgttggtaattttatccgattaaatttgttaatcaatctttaaagatatacacttgtgaagcagggatgggccgaggtttcgcttttcgcattttgcattattcgcatggcgtttttcgttatttcgcatttcgctttttggcgcaaaatgcgaaagttccacccctaagaatgaatatttttgtaactttaaatttttaaacgaatgcttccgtttattattattttgggctgcatgattaataattacctttttttgctattttatgaaaaaattcaatttttggcatttgatcaaaacaattattaatttttgttaaatttaacctaaaaataaaaaatctcagtgaaaatctgtgtgtaaaattgggaaaatttgactctctctattattttgtctctctaattatgtcccattttctcctgcctctgaccggacgaagtgagcagcaaaagagacgagccacccctaccgactgattggccttcaattttgcacgtctgtttaaaaaaggtaaatttttctcccggcatcgccaatggcaccgcacaccccccccccccccccaaaaaaaataactcacatttttcttaacaaattgacccaattttgtctttttttggtcaaaatcttttaacaaatcataagcaaattttcgaaattttcccg

SEQ ID NO: 9958 - DNA, 2114 bp, Heterodera glycines
gcgtgcgacggagatgccaaaaaagcagatggccattcgctccggtggtccgccaaagcaccgtagggttaaaaacgcacagaatttaaattaatttcattttaaaattattttcataaagttaaaaataaaatttatatttaagccttatttccaccaccagtagcagcagctgtgcaattggaagttggattggaaacaccacctccaccaccagcagcagcagcagcatcaacttttacaccgccgacaccaccaccatttcctactccatttcacaaacacttctcatttttaacaccgtcaccaccaccacctgcaacagttgatttggatcagattccacttcccccaacaccaccagcaacattttcattggatttttggctaccacccgcaccaccaccaccaccagcagcaacagttcatttggatatgaatcccacatcatcatcaaaggcggcagcagcagacgaaattgaacgtgaaaataggaaaaagcggcgaggcaatcggtggaacagcacacaggtcagattgggaatttattttttaaatttcaattcgattaaatttacttttttttatttttaactttgtattaggaattataaatttgtttttttttaaattgtaatgaaattatagaagcgccagactgtgcgcgtaaagaagggtggtgtgccggcaaaggtagtgccgcgccaccctgagccggacctctcggacgacgagtacgtcgtcaaggctattttggcctactgcgaggtcaaaagccgaggggtcaccagtaaatgctactacatagactgggccggtgagtcttccccccccccactgccctccaactgttttgattaaaaatttttaaagaccagcgtggtcaggagagctggattctgtccacatgcaacgacgcattagaaattaccggcgaacatctcgaggattcggctgtggatgccgcatacgacgcggtgtacggcgagccggtcgctgaccatctagcgagaaaaatcgtaatgagacccaaataccacgatcgtgagttttttttctcgacaaatttttaaaataatttaaattgtgaaattcagtccggcgtcgaatggtcggagtcaatgctgcaccgatttgccgtcagcactttgctttccacacttgtgtcacaaaggaccaatttgataaggtgggttgggggtctgctgctgtttgcctttgtctctctcgctctttcttatatttttctgggcattggttagcaggcatctcttggtatttgcccccttaccaatgctcttttctgtaaagtggagagcataaggcaggcatctcctggtatttgccccccttttgtttttcatttttcatcatttctctctctctctcatttttctgtgtattggtgtgcaggcatctcttggtatttgccccctcatcaatgctcgtttctggaaggtggagagcataaggcaggcatctcctggtatttgcccccttttgtttttcatcttttatttagtttttttgtctcgaaagtctgttgttttcaaagaaaatcattctaaaacttttataaaattaaggcggagcgcctttacaaagaattacttgtcagggaggggctcatcgaggatcccccctcccacggagctcaataaattggaggaaaggcgccttggaagcaacgtgcccacagtggccataattattaattattttcacctttacaattttaataaaaaataatgtttgagggtttgttgaaatgcaaaattgaaaaaattttacaaaaattaaaatccaattttaaaataattaggtatacaatcagataagcaaataaatggtctgcgatgttataatgaaaatgttttacaaaagtgcaagaaacagtcgtccaattttaaaataattaagtattatgatcaaataaatgatcaatggtgtcattgaaaatgttttacaaaaatgaaagaaaagttttccaattttaaaatattaagtaatacaatcagataagcaaataaataacatattatgggatagagtgacagacagaaaatgctgcaaataatgtgttagtgtaatggatacttactcattgttctgta

SEQ ID NO: 9959 - DNA, 2553 bp, Heterodera glycines
gttttgctccctaaaaatccttaataaaaattttaaaatgccttttttcatgccattttcgggattttatgccttttcatgcctctcaattttttggtgcctattatagtgcctttttcgcgatttttggtgcctttcttgcgagctctagaaatgacaattattgcacctttttcctaacgactcgtcacgctaattaagtcatttttatggtgtttttcatgaattttttgtccaaaaaatattttatttacatatttgtgggctttacacacatgtctcacttataatttacatcccttagaataataatgaatgataaaatgatatggacaaaaatgggagtaaattgactgacgaatcacagaataacggaatgattgaacagggaagatcagtgagtggtgaaacccaataaatcacattaacaaatggaaatggaatgaatgaaaagaatggggcggagatcaccggcttacaaatggatttggggggaccaattacaaatggatttggggggaccaattacaaatggatttgtgtgaatacaatgcaaaaactgatcagtcgttcttccaatcaaaattcgtgctgtaattttgtcgcggctgttttctgttcgctgtgtccccgttgaactgaaaattcgttggatcctctcaaaacacaacttcaatttgcacaccttttgtgagctctccagccgagccctgagaatgtggcgccaaattcggcaagcgatgccaccactgacaaagggattcaaatttgggtttttgaaacgattagaatgtttagcggacagtcacctaccgaatgcccaacttcatcagctcctctctggtgacaaactccaaaatgtccctttttgtgtaccgctctctctccaagagctcaatcgaataatcgtcacaaccgatgcgcaaaagccattcacgtaagggttcatcatcatcacttaatgagaaagatgtacatccgtaaattgaattataaatttggatacaaaaagttatgaaataataatttttgtagaaaattttaaaataaagaaaaaataagtgtgtgtgatgaaatttaaatgaaaatactaaaataaaaaattgttacaaaaatcattaaaaaattttaccggaaaaccggaaataggcggtaacataagtcgaccggtaaacggttatttactgggttttttacccccccatatctgttccccacctcctccccatatatcaggttttttttctgaaaaatttcggggagggggaataatctctccctttgtctccattctcttgtctgggtcctattttccgttctatgcttctctctctctctctctctctcttcgcctatcgttcggtcatcagatattctcagaacagatgatggacccctgctctcgtctcacctcagtctctccatgtcaatgccactgtcatcgacggaaaggagaggagaagcgaagtgagtgcctccccctgctccctgctgctggtggttgctgccgttgttcggcatttgcccttgtcccattgtctgttgtgatgccaacgttgcccacaattgctgctgctgcacgccgttcggattcccaggcgtcaaatcggaggccgaagtgcacagtgagcggatgcgttcctgccgctccacaaatgccacctccaacacactgagcaatttgcgctcgacactgaccaagtcgtcccagagactgacaattgttggtttcactttcagcatttggctgtttttaccttttgatttggtcagtgtacgccttgcccaacagatcgaaagacgaagccggcgccaaaagcgaagattgttgggggacgggcagcaactgatggaccgacgaacattgcttggaattggcgaagccttcgtcgcgactcgtcggctcttctgaaggaagggagaagcattggtcagtcaaagcagcaaaagtgccaaaatgtcacgtggtctaagaaattttatcgcttgctgaacggcgtttcgtatcaaatcgtccaaagtgaacatccaatggggcttgatcttttgcagtttgagcagcggttggacctttggtaaagtatgttaaaccagcagaaaaagcacttcgtttccgttaggattttaatgctaattcatcagacagtaagcgcatgaaaaatgggctaccgtattcggaaaaaggtaaagagcaatcatcagttggtgcaccggtgccatttggtcactgtgccgcgggtcgaactcgcgacaaatgccctccagcgtttgctggaggtgttcctgcgcaggtgtcacgtcaatggcagtcgacccaccgccttcttttggcaaaatgaaaagctgaaaaggggaacatgaaaagggaaggaatggagggaaattcattcacccgaagactttggaggaggcgagtcagtgccacgggggagagaagcgattcaccggcaccgaactcattcagcagctgctcatgccatttggcaatgatctgagtgtgatcgaatcagctgaccagacaaaaggatcggtttatgggtctcgaccccctcc

SEQ ID NO: 9960 - DNA, 2730 bp, Heterodera glycines
gctcgccctccttctgtagagtgaagaaaaagttggagaatgaattctcttcgggaatgctcaaagccgtggagggggaaacgccgagaaaaggggcgttgtcggagccgaaggaagggctggcagtgtggggcgtttggtggtcgcgaatgggacttaaggcatttgaaaatggaaataaaaattagagaaaacgaggcggaaatgacacagttaaaaagtgacgtaattatcgtgtaaatacatgattattagcttttccattcgctcgacctgttcggttgtgaaaattgcacagggattgccagtggacttgacggtttcggggctctcagctgatgtgcggtggcacactgatgcacaacgccgacattttggtcagaagcaaagcccaaaatggaggagccaaccgtggggacttttggggaagcggagaacggcccctgggggcacgggggggagggggcaaaggacgtggcagtgggattaatcactgaaagggatttgtgaacttaaataaatagcgaattcacttacgcgcagcggccgatgccatcgactgacagcaataggacggcatcgacaaacaaggttcaatgcgcaacttcaaattacgctcattgcccatccgacggtccgaccgttccatgggcggtcgatttcgcattgacacggaaggagtgacgtgtatttgctgagggacggaggagagggacggagtggccagagaagaatttggcaaatccactgaatggacaatgaatgggagaagagaagtgccgtggagcactcaccgatggccatggaagaagacgaacacgccgaagggatggccaaggcggaagagacagtcatgccactcatatgagaagcagaacgaaaaaactctgaaagaaacgcgcagtcacgaaagagagaacagaaaaacagcacttgggcatgacaatggcatcggaaaaggcaaaagtcgcattgatcagacaaattgccatagggaggggggggggggtaggaccaatcccacacattcgaatgccagcaaatattggaatttcaaaatgtccaaatcggtggtccctcctccgtcccatttggccttttgactctctcatgcactcactgctcgtgtgttttccgcctcctcccgtcgttgagctttcaattctcttcttcgtgtttgcatttcggctgctgaaatgcaaaaggtgtgggctgggcatactgtaaagggagtgacttacgcattactgtagtactgttggatgaaagggtcgcccagcaattcggcagcactcgaacgatcagcgggatcggggttgaagcagctgaagaaagaactgattggacaaaaaagacagacagaggaatgaccttttgatgaaattggaagccgactcactgagatgggtcggaattggcgggtgaatacggtgcattccgactgaacggtggacaaccgtatgaaccatttaaaatttcagagtggcgaaatgacccaaaagtgactgacctttaaacacagccgcttctggaagaccaagctgttgataaacgagtgctttggtcattaatgagcaattaattacctcgataaaaggcggctttcccgtgaccatttcgatcaaagtggcgcctaaatgataatcaattaagtattgtcacttttgtaattagcaccaaagctccaaatgtcagctggtgggccatatccctgaaattgggtgaaaatggtaaagggtcaaatcaaattcgctgcaccctttgcccgccggtgatcacttccggtgccatgtattggagagtgcctgaattaattaaaatggtagtaattccgtccaatggctgaccctttttcaattgacctttgaacgtgtcggtgaccgggttaaggccggcaagccgtttgcaagtgccaaagtcggatattttgcacagccccgagtattggttgaccagaacattttcccctttaatgtcccggtgaacaatcttttgagaatgctaaaagtggcaaatggaaagggacgggcgcaatggcccaccaaatatttgagaccctccagaatttgacgagcgtaaaatgccatcgtctgctcattgtccaacggaccccatttggaacggatcagcgaactcaaactgcctgtcattttgttccaattcagtccaaatgcctttgattttggcattttgcttttctcaccccccggcacatgctccatgaaaatgaggaagaaagagcccgcctcgcgtttctccaccttcgagccgaggtatttgacgatgttgtcgtgggagagcgtcgagtgcagctgaatctcctccatcagcggctgaacctcctcctcattcttcacttcgacttccttcaccacaatcgaccgctgtgtggtgatgtcccgggccgaatacacctgaaaaggcacaatgccaaagtaaccaaatttgaatggcataaaaggaggccgagtcagcggcatggaagaaaaccgagaaaagccggaacattattgtatgtaattgttggggagttccttttcaagactgatttgcgagtattggacccgattagtctctaatttatattcaaatcatgagtaattacggtgccgtaagtgccacggcccaacacaatgcgttccctgttgctgtcgacttcgtattcgaactgaatttctttgttggccattgcatccgagtgtccccctcccctcctctgcctgcccacct

SEQ ID NO: 9961 - DNA, 1351 bp, Heterodera glycines
aaacacgacgcatacaaagtggagacggtgagcaaagaatgtaataattaataaatgcccttttgttagccaatgatggataatcaaggaaaactctcggttcgactcttgaattgataaaccgaaacttttggattcgatttgcgtttctcgaggccattctcggccctgtaaattcattgaaatgtaaccgataccataacagatcggcgatgcttacatgatcgtcagcggagtgccgcgcgagaatggcaatgcgcacgtgcaacacattgccgaaattgcactcaaaatgcgaatggcaagtgatagtaaagcaaaaacattaggaaaagcatgctttatttaatacagaagcaaatcattatttaactcagtttgtgaccaatttcaaacttgcgcacaaaccggaagagattatgatggttcgcatcggttttcacagcggaccggtggccgcgggagtcgtaagagcattttcactggattttaaatgaccaacggcggcattttgacattaaaaacggaaaattccgtcggactttatttatttttaagcaagggacatattaacttcctaaaatttggcatgaataattgtcccatttcaaaggtcggtttggctgcgcctcgctactgtctgttcggtgacactgtaaatatggcgtcgagaatggtttttctccccacaaaaaaataaatttaaattataactaaaattatttttcttaggaatcgacgggaatggcaaataaaatacaggcatttttattttaaattttatacatttatttattatttgttttacattttatagatcagcgaaaattcgtacaatttgctcaagtgtttctacatccaattcgttgtggtcgaaaggggaaaagttgaaataaaagtgggtgagaagagaagacgagcgaaatgcgacgatggcattttaaaagcatttaattaaattaattagcgtattccctctcaaaaatggggctttcttttattttagggtacacggtatttaaagatacagtatttgattttctttttttccctgcaggggaagggtgagtgcaccacttattttttggagggaagagagaaccgtcggggcctctgatgatcagcgacggggcaatgggccaaaaaagtgagcggcggcgacggcgaaagacaccgcccgaggcgacggatcggtggaattgcgctttctcccaattaaaaacgttttttcgtatgcgacgcattttcattagtccagcagaaaaataatgatcaaaaaggagaatctgctgatcattttcacctaaaaacctcactcagataaccaatgcttttctcccaattctttttt

SEQ ID NO: 9962 - DNA, 1797 bp, Heterodera glycines
tgttaaaaatttgatttagtgatcccgaaagcgctgaaatttatgaaaaatataataatagaatacattttggatcgaataaaatgtagaaatatttgaagcaatttcgcaaaatgttcttatttttgaccctaaaatcttattttttggcctttattcttattttgaaaattttgaaatagaaaccctggatttagacaaaaacacccataaaaattgactattctggcataatttataatccttaaatttggtcatttttagacaatatctgtgcaattataccaaaaaggaattgaatcgaggcgatacatcgaataaaggaatgtggagccaaacacatcattcaaaaaaaaaaaaatttttttgtgatgttttttggagctaattaaaaacaaacccccacccccgtccccgggggcgagaaatttctcacccccgcgactctgacccccgcccccgcgaaaagccacccccgcccacggggctcgaaccctatttaattcaatgccatccctcagctgccgttttgctattctctatcatctgtctgtaaatggtccactgctcgtctggcgacatgcgcaagaactccctgttagccatgagctgtcccattaattcgattctctttccatcgtttgccgtttcattttgaggaccatttgctgctgctgattctaattactttgtaattgatcatatcgtaagtattgattgattgaattgtttgtccaacctttgtcagatgagtgtttttggctagcgaaattcggttgcgatgtctttgcccgtttcttcgtcttttgattttgcgccaaccattcagctccacttgttgccatcggtgtgatttctgaatttgccttttgttagtctttccaattaatcacttagtaatgccattgccataacctgtgggttggccactgagtgatggctgctgcctctgttgagattggcctccattttcggcacggtttggcactgccggtgccccatcctttagcgatttgtatatgtgccattgtgcttcctgtgacagttccgaatattctggctcggctaacatccgttccaacaatgctactcgctcggcatcccatcgaatgttttgctcatattgtcgtaacaaatgaagcatagcacacaactgtttttggtccgtaatgccgccaccccgggaagcgatgtcgtccgtaagccatttgaaagttgaaaattgttggccgggcgttaattggaggtaatcagtgcttgtcattaacagtcgcaaaagctctttttgtgccgattgttcggaacccgttccgcctgcattcatattctttgattttgctgctgtttgtgtattttcgcgattcatacaattgcaaatgggaaatgaagtgaaaagaatcggaaagagaaggaaaagcggcccaaaggcgcgattcatcccggagggcacaaaattcgaaattgctaaatcttttaatattattttaattttaaatgattttttttacaaaatatgtaaagaaatataagcagcagagctttcacgtgtaataagaaaataatgatgaaaaactataagaaatttacaatttaatgcaaatgtatgaggatgagaagtggcaactcaccataatttgcatgattattatttgctttataaaattttctcttcattgattaatgtaattcaatagagatattgccaattcattcatttttataattaaataataatgttttaataatttggatttggttttaaaaaagttcttaatgtagcacttcttctatcctgat

SEQ ID NO: 9963 - DNA, 3087 bp, Heterodera glycines
  unsure (1)..(3087): unsure at all n locations
aaaatggattattattttttgtcatttttgcaatcattgaaaaaacaaaatgaaganaaatataataanaatgaaataaataaataatgatttaagatgagtccgcttccttcattatcatccaccactttcaacggaatttgcactcctgctcaaaaggaatgcataagttagcaattaattacgctaattgcgctttttgctcacaaaagttgcgtttccgaccaccttcagcatcagcttcttcaacttcttttgatgcatctcaattttcttctcaattatctgcaactttaaatccaattgcattacaattaaatgctccggggtcatttggccaaaactttttttttagggataaatttttgtgtttgagtggaaatgccatattgggctcacataggcctcagacctgtgaatgccttcatcattgtaagctttacttcccccctccatttgcctgcttaattcggctcagttcgcgttcctcggattccattgtggccaatgcgcgctcatatttctctaacagggcgtgccatggggccattttttggtttacaatctaaagaaacacagcaagacttgacaagatcggcccacttctgcagctcgagagtcttggtctcgaaacagagatttttacatcccaagggattggatttttggtgattaaaatggagaaaagtgccaacacttttgaaagtctcattggtctcgagtttatacccgagaaaagctcccgggcacttacttcgatcacatcgtcaacccaatcggcgaacacaaacaactgaaggagcaccaggacaacgagcagtgtaaagaaggaccgtcgcacaaatcggagaggcggcgaagggcccatttaaaggggaaaaagcgtcaaaaaattgggcggctcattagcaaaacgactaaaagagggaattaacgggggaaaaacagtgccgattagtttatttgtgttaaatttttcttcaattattcgtcggccataattaacattaaaattcataaaagttgcaaatgatatttgttgatctgagatgaagccgagcaaaaaaataaaaatatgtttttttttttggagttggcgagtgaaattttcactgatcaaacatttggacattttggagggacggaaaacaaacagagaaccgatcggacggaaagcagaagcattcgcagcaattccggttgctatgaatgggcaaaggaagaagagaaagcaaattaaatacacaaattatgtatttcgcactttccttttttggaaggttttcctcaaaaattacgattgcttttacaaaaataataatcaaaaatttaagtgtaataattaataaattaaacgatcaaaattcgataagcaatgagaagtggctcttctgcagtttacggatccgatcaaaacccacaggttcaaacacggggcattgaggcgattattgaaaatggttttcgtcatttcatggcacaacccaaacctttacagtactattatatttgtaccagtaaatgtttcggctatttgacaataagaaagaatttcaagcaaactctcgaagaaatatatattcaataccagtaaaagcaccttttaattacgtaatttaagaatagcacctcttttattccgtatgattaattaggaattaaacccaataaagtcgctttttcaacttatcttcgatgatttttaaatttaaacacaccaactttattcatttacttgctcaagacataaaggcatttatcataattatgcaattagcggaaaaaggcattttggaatttggctaaactgagggagcaattaaaaaatgattcaaaaagaattgttaatttttttgtgattttcactgctcctccagcagatgattttcggttttcgtatgtaaaatatggcgaatttgctcacttttgctcactttcgatcaaatgaatcgtcccattggatgacattcatgtccaccttttctgcaggattaatgcccccaaagtgggtactgctcgaaaaagtcgtcatgttcggtgtcgaccaaactgttccaaccgtcctaattgtgtagatgtacagttttgttggcactttttcattcagttgtttgaccagttcgaccaaattttcagtgaaagcgcttttcacagctcctttgttaaagtctagaataaattttgaaagattaaattgtcaaattcgaattccctaaatccactgttaattgctcgcctttctcgacatcgaccgcgacgaagtccttgtcctggtcaaatccgccttcttaatcgtgctaatgaagtgatccgtttgcgcttcggcgcttggactatttggcctcccctctgagtaattaaaaaataaatgaattttgaattgcaaagttgttatgaaatgattactgtgaaatgtttgctaattactcaaaataatgataagcgccacgcgttgaaatgctcgcctttttcatccctttgaaattggcttcaaaccgacggtcaacaaatgcgttcccttggatggccttcgaaatggcaatcatttattttcttccgtttatcccatagatgcggattttcttccaccactttcttccaattaatttcgcctttatggtgcgaaatgtcaatgaaaattctattgcattctgtgcaaaaaaagaactttcaaaaaagtgcaaatgaacaccaccaaataatttgtttaattgtgaaccgctggaaaacgatcgtaaggtgaaagttaaaaatgggcttttctggcggtgtctggacaactcatcatcagttggacaaaggacaaagccaatggacaatcggaatggacaattcgtcagtggaaaataagccagtaaattttataaggaattttttaataaaaaattatttaatttattttttgcacatttatctaatgaataatttgattaaatttctttaaaggctgaaaattacagtaggacaaccctcagggcaaacggtaacagtcatttaccattggttttttgccatttttattgaatcaaccgagcaaaaagggttttaaaaaattggcaagctaaggaaaaactcaaattaattgag

SEQ ID NO: 9964 - DNA, 5532 bp, Heterodera glycines
  unsure (1)..(5532): unsure at all n locations
tttgcccaatttttgatgccacccagaaataacgggattcgaggatccccttcaacatatttttttaatttgttgctattttcaactgcatccctgtttccaactccaacttggatcttgagagatcccctttgagttgaaactttagcatccaaaatccaaaacaacaatctgtcgttgtacagctgttgggcagtgagaagggtttgcaagaatcccaaatcatccaaagttgctccctttcgccacacaatgatcgactgcacgctttcaatttgcaattctttcgagaaaaggtgtgcgtcccattcttcgggaaaatgacaaaattgccgtgcatccgcgttgatgagacaattacggagcacaccaccgtcctcttccccttgccccaatatcaaaattggggctttgatgaccttcaccgccggttcgtcgtcatggtaaatgtcgtcctcaaacagtgccgttggtgtcgttgttgaactgggttgttcggtcggttgtacttcatcaatttcgtaccactcttcctccatgctggctaggctaaccgtgtcttccattgttaacgctgaaatttcattaatgggattagggtcagactcgagggtctctatttccagtgggtataataaaatcgttgacctttccattatttttccgtcgggcatttttaatttggcagttcggttattgattatactttctattttatctaatttccatttattccggggacacggtttttggtcattgattagtaccacttgtcctatttttggaaacctttgttcatccacatttttggccttttcttgttcccttaatgccaataaatagtcatccctaaagacttcccaaaatttggtactcttatacattgttttcttgtgaacttcgaggagttcatccctttttgtttggttaatttgtgaatctaaatcgtctgtattctctgtttcattagtgtcactctgatactcaaatggttctccttctgatgcattgagaatatgtattgggcacaagggctccataatttcatcattctcaatgtatgtaattggtctctcattgactatcctttctacttggataagataagtcaataattcttcataatccaataattttttacctaaccctctgtataaatggtgtttgactagaccgattagtcgctcaaaaaatcccgagcgccaaggcgctaatggagaggcaaattgccatgtgatacccttatttgctgtaagttcttgtacctctctttcgttcatgatcattgaccatttctcttttcttctaattccctttgtctggtctgaatttgaccccaaaccttattttttctccaatgtgcttcagtaattttagccaatatcttatgagaaagaacaaattggctagcattgtcagaaattatcatttttggtactcttctacgcctcatgaatctctctaaagccaataagaatttttgtgccgtacaatctgtcactatctctaaatgtatggcacgtgtgactgtacacacaaatattgctccccaaaccttttgcgtttcttcattgacctttattgttattggaccaaaatagtctaagccaattgtttcaaaggcacttgaccctttaactcgatgaattggtaaggggggaggatttggataactgaaagccttggcttctaattttgcacaaatcccacattttgtatatggatttttcttaatgaccatcgtaatcattcttctgcattttggaatccagaatttcttcctcagataattgagagtctgagattttcgaccatgttctgtttccaaatgtgcgtcagaaataagcaaatcaagaatcggtatctgatgagacagataaataggatttactgtatcataatcaaaccctccttcttcaattcttcctttacacctcaatataccattatcgtctgtgaacatttgtaaattcctcctggtattttcatctggaggaaaattctcttgcatctctttgataattacttcctcagcctctcttaattcaatcgccgtgagaggcttaattctttttatagtttcacttcttgccttgagcaatttgcgttcctgaattggctcaatttgttgtacaaattgaagaggccccttgtaaattcgcctaatatacgccactgtatttctaatcctcttccactttgagaagtggttcacataaactgtgagaaaggaacccaatttcctttggtttctttcccttgccggattcgccagttcacaaacagtgacctcttgattttgatctgcccatacatttggatcaaattctctgattgtttgtggccactgtgtattttttagacttataaacggcggtcctttccaccataattcattggtttgtaaatcttccggacttgtgccacgagaggcaacgtctgccggatttgattgaccctcaatatgttcgacattccattgtctcattttttctacccgatttttaatgtatctttctaattttgacctttgacataatttaaccatttcgaagtcaaaagcattgcgtgtaattccaaaatcggaatggtccgatactttgatggaattattgctggaacaacaaggcttttaccaaatatgagattggcatttatttgattttgattaatgactctcaaatatattgccgttcccatggccttatgtgatgcgtctgagaacgcatgcaattcacacttacaatttttaatcatttctttcggaatgatattccttggtactgttattgactgatcttcccagtctttcatcagtgttatccattcatttagctcttcattagacaacgaggtgtcccatttgagctttttattcgtttctaccctttgccgaaataattttgctggcaaaattgccggggccgcaaatccgttcggatcaaaaggtttagcaatctgtgctaagaccttccttcttgtcaacttctcagacttaaacacgggaaaatgtatgaccagagtgtcattgttgatgtcccattttattcctaacaatttgactcctccttttaccacttggtcttcacttggtaatttctctatttccttggtacagttggacacaaattctctcacattcatacctgccttagaaaaaatctctttgagaagagagtaatatgactgaatttcttcagccctttctaaaccaagtattatgttgtccacataaatgtctctctctatttctcttacttttttgtccttgtatttggacaaatgaagtttgattgtcaaagagagatgagctggcgaacaaatgactccaaacgtgactctcgtaaaccgatactccacgaggggagaatcttctacaaatgggtctctgacccacaagaatcgcatcgcattcctatccttaggatgtatcaaaatctggtgaaatgccttggctatgtcacatgtcaagagaattggtttaattcgacttcgaattaaaatgcctgctaaatcattataatcattatctcccttttctaacacttggtctgtgaccgaacaatttaaaactttggactgaaaactccattttatcaataaccgaaactgctttctgggttaaggatcctgaatttcaaaaccccaaaaaaggggaaaaaaaaaccccaaaagggggaaagggggccccatttccccattttggaaacttttttaccccccccgtgtcaaaattaaaacttcttttttttttaaaagggggaaaattttgacaatttttggttttaaaaaaaaaaaaaaaaaaaaaaaaaaaaccccccaaccccccaaaaaaaaaaaaaaaaaaaaaaaaaaaaatttttttttccccccccccaaaaaagaaaaccccaattttttttgtaaaggggggggggggcccaaaaaaaaaaatttttctccccaaaaaaaaaaaatttaaaaaaaaaagggggggggggggggggggggggaaaaaaaattttcccccccccaaaaaaaaaaatttttttttttttttttttttttttttggggggggggggggcccccccaccccaaaaaacaaaaaaaaagggggggggggggggggggggggggggggggggggggcccccccccccccccccccccccccaccccccaaagggaagggggggagggggagccccctcctctgcgggggnnaaaaaaaaaaaaaaaanaaaaaaaaaaataaaaaaaaaatattttttttttttttttttttttttttttttaaaaaaaaaaaaaaaaaaaaggagaggaacttttttttttttttttatattttaataaacaacacaccccccctttttttttttttttttttttttttgaagaggaaggaaagaaaaaaaaaaacttttttttttgggttttttttctcccccccgccccggcgggcgggactacaatattttatattttttttaatgatgtggggggggggggggggggcggggggggggggggaaaaaaaaaaaaaaaaaaaaaaaaaaaaaaaaaaaaaaaaatatggggggggggggggggaaaattatggatctttctgtaatctgttcatttttcccttggatcgaggcttgcttttattaatttatttagtttgaggaacttcgtccatcccattgtgctttgatatggcctgccctatcttgatgcaccttacaaaatcactcagttcgcaaggagaaatcatacgtaaaactctaaaattagatatatggcttctagattgtgcgccattcattatcctccatttcaattttatattctttcctgtaatttacctccttcacacataaacattcattactttttttgaaactctttatacgcattaacgattgtgagatcgtaatcagttcccctcttgatatcatatttttttcgcatcaattcctttacattcttttgggatttctccatctaaatgtaatctctttcatttattttctgtccttttttatcaaagtgatcttagtgcaatggcataggataaacgctcttatatacgaggtttttgtttattattataattcactctggattattctctattgacttttcaacatatattcaatccttacgcgttattgctcagtcctttttcaactgactaacatcataatagggggggaaggcccacctcgaggccgcgaagcggccgagtgagtaccttcggtgcaggaaaattattaaggaagagagttcattatttatttgttttttgcataattaattcataaatatttttttcagaaaatgctctgaaacgcaccaaattttatttacatgctagtttaggcactctgatgctttttctatcaaaaagggagatgaataaatttttaaaaatttttaattcctttttaaacaggccaaaaagtttaggcttaacttttaatgaaaattcaatcactcatttttcgagtagtgatcagaagcgcaccaaatgtgcaggggcctaaaaaggtcaaggaaaggcgtctct

SEQ ID NO: 9965 - DNA, 1603 bp, Heterodera glycines
tttgcaacaccttaaacattttcatttaattatactttttttaatttgattcacccggcctccggatttcttccggtcagatcgattggccctttttcgctgatttttgtttgacggcacactgacattactgtttgaacgtgccctttaacacaaggataattttaaacgtcagaaccaatcagttctaaccgaggtgccctcccgtggctgcttttgtccgtcgcacatacggataactcggacacattgccatcttgtggccctatttcttcattaaatgtcggctcattctccctgacaattggcactgtgcgattctcttcgtagatcaggccggaaatgcgcttgacgcccccacaatgatccaaactgcgaatggccggattattgatgccttgaatgctgccaatgcgcggcttaaaaacggcactttgattaaaataacccttattttcatccgaaaagcaaaaacttaagccccaagacttgaaatgttttcgcgcatctttaccgttttttccggaagtgatccgtcaataaatatttcaattggtggcaatcgaaatgcaccttgctgaccattttggacagaattagcgaatgagtgatgatcacccatgctaaaattggtgattaatatcatttttaagtaaaaaatggcggcgtgtaaataagaattactattacttttgcatgtgaaaaaaaaaataacaattgatcattttttgatcaaagaaaaaatcgcaaaaaatgttaaatttttgaccacaaaatctaatttttggatttgaaaaatttttgaatccagacccaaataaaaaatcattcgccagatattttaatttaactgaggttacctttccgaattttcttcctcaaggttattgttttccacgtccatgtttaatgccaaagcattttggaattcgtcgtgcagaacgatgttttggtttggtctccaggcatggtccatttcactttcctggtgttctccgttggtatttgcctaaaaatggagtttaatgtaaagaattaaagtttttctcgcggcggcacaacactgttcataaagatttgtgaaaaaatgcttcgcaaaagatgattttttaaataattaaaaatcaccgcctgacttaaaaatcacaaaaatttttaactatttttagtgacaatctattaacaaattatattttttccatcccaaaatctaattttctataaaattttgctaaaattgaagaattcgccttttttgaaggccaatttttaaataatattttaatattactgtagaattttcccttgttgagtttgccaaaaaacgaattgcactttcacaaaaactggtagttgacttaccgaatcgattgtgatgttctcaccaacaacgatatccgaaattgtgtccataaaattttcgagttcttcgttcgctccattgccagtttgttcgcaacgaatatttttataaggtgcaattttcatttttttcgacatattctaaataaaatatttgtaagcatttaaaacgggtaaaaatccaaaaaaatatcgaatcacaatatatgattgctgcgcagaattaaaaacgaaaaggcaa

SEQ ID NO: 9966 - DNA, 1433 bp, Heterodera glycines
gggggaatttgggggcggaataatggggttggggcggaataatgtgtctgatactactaacataatatttttgcagatgtggaagctgccaaacgcgaaagaaaacaaatcggaattgcaaaaattttttgggggtgggcataacggaccaacagtgaggaaacgatgcacggcaatggcatgaattcaatgcatttttcgtggcacattcgatgacagagtcggcactttgatgctcagcgatggcattggtgctgccaaacacgaccacatcaacgcttaactgaccagaaatggtggcatttgcgcgaagacatgcttttacctgaaattgaccgaaatttacaacttttatcaacttctaatcagcaaactgtttttgcaccaaaattcttcaaaatttccaaaaacaaagcatcaaatattcgaaaataaaacttccgatcttgctgtaatgatttaagttcaatcattccagtctgtccaatgtgctgtcgtcttggctccatggtccggccgtttccatttgacattttatgaggacatggacgatcgggagtagagaatcaagcgacgtgactcttttaaaattcggagatgaattatttttgataaaattccatttcataggggtgtatttttctgaaaatttttggatcgattcttaggagtgtatttttcgtttttattacatttttgttaataaattttttaaaaattgctgaaaatattaaaaaacatcaaaatgacgaaacagtgcaaaaaaaagcaccaaaatgccaaataagcaccaaaattaaaaatagaaaaatcagcaaaaatcagaatgaaaaaagtggagttagaagcctcaaaccaagttagaaatacgttttttatgcttattaacacgcccaattagcaaaaaaaaaaaacagcatatgctgcaaaatgagtaatttaatcattatgtttattcatcaaaatacaaatagcgccgagggatgtgttgagaaggacaaaaagggggcgggcggggagagagaaaacattggcaaacaatccaacggcaaatgattctcatccaatcggatctttggatcattatttcattttgaaatttataataaaatttcatttctgttgccggcgccacacgggtcacagtttaacaaccacggagccgggaggtgagacaaaaaatgggagagagacaaatggacgaaacgggggacaaaggaccaaaatggaagacaatttgggccaaatgtcggacaaataaacaaaaagagggacactaaggaaaaaaacagagacaaatgcaaaaaaggtgataattgctaaataaagtgaaaatggccaaaagagggcaaatggtcaaaaagtgggataatatcaaagagccaaattatcgatgaggatgttttaaatgaagttttgggctccattgcatt

SEQ ID NO: 9967 - DNA, 1394 bp, Heterodera glycines
tgtgcaagaattttgccgaaatggtcaaccgatttggttttgtgcccgccggcggacgcatttattacaacaaacggtcgcagccgccattcctcaccccgtagggcaaatttgaatgaaatttggttgaaatttccaactttcagtttggtctatgaatactttggtgcaactggtgacattgaatttcttaaggaaataatgccaacgcttgaaaaggtgttcccattcattagcataatttatcaattaattaactgataattaataaataattttaaaaaacaaaaaaatgttttctttatcaataaactaaaaataaataaattattaaagaagttataagtaatgaaataaattagagacaattatcagggtttcgaggtttttatattttatgcgttatgcaaaaccgaccgaaataataaaaaattgcctacctttgttcaaaagcaaccaaatttttaattcttcatatctttcggtagtccaaaatgttttctattagcctaccaaattttaaaataaaattcattatgtttcaaaacttatggccaataatgttcgaaaaaattgtttttgagttctattgactttttttggaaaactaaagtaaattttttgaaatttttcaggctaatagaaacacttagagagagctattgtatgacatcaagaattaaaaatatgattacttttgggcaaacttatgaataatttgaatatttttttcaaaaattttatttggtagttttttgagtaatggaccaagcgcccaagataacttaccattaattaattaactaattcattaaaccacctaaagcaattaattataattaattagttcattaaaaaaaattaattacgtataattttaaggaattattattttggcaaacaaagcgatcggttaaagtaaaagtgaagggaacgatgaaaatgttctatcagtacagagcggacacaaaagtttgtagcgtaaacaaaaatgaaatttttaaaatttttacaataaatttaaagttaccacgccctgaggcattttgccaagacgtgggcctcgtgaaaaacatttctgatccgatggaaaaggcgaagatttggcacgaaattgcgtcggcatccgaatcgggatgggatttcagttgtgagaaggaaaagaggggcaaaatgaatacaatttatttattattttaaaacccgttttaatagtaagaaattaatttaaataatttttattcgttttttaaaaagcgatttttatcttttacgaaaattatcaaaaatttaaaataaaatattaattatttttacaaaattgtttcaatcggaagaaaacaattaaaaattatatttttatcaaaaaaaatcattttttccgtaaatcaaaa

SEQ ID NO: 9968 - DNA, 974 bp, Heterodera glycines
agaaaactggggacattaacacccaagcaaaaaagcatttctcatactttacgaagcctttatgtttggagccaaatcattcctgaaaactagaagaaattgaattgcaaaaaaaaaaaacataacttatgtgcccgaattccagttataactcccaatatttgttcaaaaacctgacctctcatagcattaacaaaaatgtcaattgccaatatacctctccaaatctgccaattccaatctgggaaatgactttcaattcgcccatcggaattgtatcgtctttccatgccgcatttcgccggatggagaacatgttccacgagcgtcgctcaaatctgtcctttttcgggttgagctgctcatccgccgaattcgtgtcgtcgttcacaaaaatgtcactcattgaacgagtattgccaatttcgggtgcccaattttccttgaaaagagcatgtaaatgccaagaaagactcttcgtttaaaacctgggtttttgacatgaccatttgtgtgaccagttccttcaaatgcttttgtgtcaacccacaattgtcctgcactcgcaattttttcttgcattcgatgtgaacagccattctgtgaaaagacaaaggcacaattggcgatggcacaaatgaatcatggcactcattcattacttgcaactgcggcacttttcgtattgtacaaagaatccaaaagtgttggagcaaataacacatttcgtcttgctcggatttttgcgtcgctttgtttcccattgatgcggtatttgatgtgctctaactctgctatacattcatatgtttgctaaaacgtcaagaaaaaataaagaaagcaaagggttatcattttaaagctcttaataaggataagctttttttaagcaaatgctaagcgattcgatgcattagaaaaaagctatgggcgttagaaaatttgttttttgaataatttttcgaatcgaccca

SEQ ID NO: 9969 - DNA, 4593 bp, Heterodera glycines
aggggcaacgggaagaaaatgaaacaaaaagccagcaaaggcgaccgaaaaacatctttaggccggagcatagcagccccttcctttcttcgtgatagataagtcatcccactaattcaatttgatcagacaaaaagcaattgaacatgatataaattgtaccaattattgggagccttgtcaatctttgattattttggaaagttgcataattcaaaaataatttaagattaactattaataatttgaatatcagagtcattaattgttctgaagaaaggagagcggattgaagccgaattgtttaatagataatcaatatttttaggtatttttatgtatgttaattttttaataaaaaaaggttttaatagggaaatacaggtacaggcttttttaaaatatcgatctctactaataaccagggacggtcccaggattttggcttgggggggggtacctcccccgggcgacgacctttttttttttttgcttttcacacccgttttttttcatagcgcggtttttccaaaaaattttttggggggacagggggtccggcggtgccgataggcgccgccgggaaaatttttgcggtttgttaacagattttgtccaaaaaatgaccaaattttgtgattgagccacttttagcagattttcatcaaaaaatttgtagattttttgaaaaatttagcgaaatttcttggaaaatttggtgaggctaccaaaaatttttgaaaaatctgatttaattagtatttaagatcttttggatgattgagccgacgaaggataacctgaatttctacgagcaatggattctgagcggaaatgagaactcgaccttctttggaaagcacaccaagtgttcacgcatcagactccgccagggcgacacgctaatcatcccatcaggtcggttggtcaaaattggtccggtttaggatctttttatgacaatttttaacaataaatttgtcccaccattttttggcatgtatcaatccgaattgtgatttaattgggttttttcgaattttgtgtacattaaaaactaaatagtcataatttcggcacatttctgtggcttttttcaggatggattcattgcgtttatacgcccgtcgattcgctcgtttttggtggcaatttcctgcacagttactcaattccgatgcaaattcgcgtgtcaaagtccgaggatcgcatcaaggtgacggaaaccaatggcattttacaatcaaaaatttatgcacagatcggcagcaaatatcggttcccgcattttaaacaaatgttttcggtgtttcacggcgcaaatcgtgcgcaacgcaacgcaccgaatttaccagaaaaaatcgccggaagaagcgcacaacatcgagaattcaacggcaccatcagcagcagtggcggcacacaaaaatcgccagtcggcatcggaggaggaagcgaaaagcagcgaggaaagggacgatcgaggtcggtcatcaaaaatttaaaaaacacccaatttccaccgctatggggccagcctcctttcccaccggaaaattaaatcttcggaaatattacatttttccgaaaaccttccagaaagtcccagatgatgcttctgccgctgcttcccacggctctgacgcagcggacggcgaggaaaaagcagaaaattctgccgaaacggatgtcaaattgggcggatgacaatgggccaaaaagtgcgactgaattcggttggcgaggaaatttgctacgacgaattggtgggcaacgcatctgatgttagcaacttttttgtgtaaatataatttttgtcttttagggctcatttactttcaacccaattcaatcggttttcgaaaatgaaaccgaaatggaattcactccgacgcagaattatgacttaggtaagaaggtcaaaaaaagactgttcaccaccaactttgtcatgtcagattatctccgttcccttccctcgatggtggtcaatggcctcttcccccttctgcactttgccaagcggttgctgaagtccaagcaaccggaagtgatcgaaggcatcacgcggcctcgccatttggtcaaggagtttcaggtgagcagcagcggagggacgagacgcatttgtgtactgtgacatcgctttccttccaaatttacgcttaacaaataccaaaattatttaaaaacgatcaaatgatggtaaggtgtgcttgcctttggcattttaaaaatccaaaaattgattttttttttttcctgatggaaaactaaaaaaatgccgggactcaattttatttgtgtttttggaattgttacaattatttgatccaatttttcggtaaaaacttcatccctttaggcgctcctaggcaaaatcaacgaggttggcctcgtgtgcgtgcagctcgaggtgcaatttgcgccgaagtttcgctgtgaaagtgccgaattcactgtgccggcgccgatggagccgcccgttactttggtaacaaaattgcattaaaagcatttaattaagtattatacaccagggatggcacggaattccgatttccgacgtttttggggtcggaattccgatttccgaaaatttttggacccccggaattccgaaaattttttaggcctcggaatgccatccctgttatacacactcattttaaatttagtcagtgaaacagccaccgaaggatgacaaaagaaaaagtttgcgtttattttaacaattttgttttaatttgtttgtttccagtgaaaagacacggagcggttgaggaaacagtgcagaaaaagacactcaaaagtttgttgttacattttttagaaaaattatatattttcccaaaatattaccattttggaggttttttttgatatcatggtttcgaaaaacttcaaaacttgggacgggcacacttgaagaaccaaccaaatatcgctttttctacgacaattcccgcatttccagagaagaatgccggcactccgttgacgcccgcgaatggccctattttggtcgggggtttgccattgtccacgcatttgcacacgccctcgtcgtccggcagcttcaacccaatgggcgaaattgtgaagctcggacagaagccgatgcagtcggcgtggcgaaaggcctcaaatgtaagacggggaaaatgggggggggggggcgggggcaccccaatttaacttgatcgttttcggaaagaaattcaatgatatgaattttgttttttacaaaattcagtatgagttggttcggctcccccaatttgtttaaaaatgcactaataatttaacttaattagatggcaaaaccgccacccccgacgcacattcatcagctgaaaaagcgctttgattattcttcaacaaccaccaacaacaacaccatggatggtggtggacatcacaacgaagcggacaatgcgtttgacgaattcgcaacacaacaaaaggggacggaggagggcggcgccggacagcaaaacgcgaccgttgctgacgacgcggcgttcacgacacagtccacgtcatccttcgggacgttttgcaaagagcgcaaaatgggcagccaaagtgatgggggaaatgggacatttgcattcactaattgtcatgcatttgggttaaggaccccaccgaaagtcaataccgaaggtggcgcacaacaaactcatcgaaatccatgacgattcgcccgaattttcgcatcgatcgccactccaacgcctccgtggccaagaaacaaagacggccgcccacaatcagtttggcacaaattcatttcatcaaaggccggtgtcacacgcgtttacaccgtcgaacaacaacaggagcaacaaccaatggaataacggcaactttggagggaatagccactggaacaatggcaaatctgccaatggaacagcagcaaatttggcggagacgaccaatggaacaacggcaaatttgggggggacgacccatggaacagcggcaacaatcagtggggcagcggaggtttcggtggccaacaaccgtaccaaccgccaccgtcggaacccaccagcagcaccttcagcgaattcaagggcacatcacgaaacgacacgtttggggggaacaacaaccaatggaacaccagcaacaatcagtggggcagccgagggttcggtgaccaaccaccacccagccgaggagggttcagtaaccaaccagcaccgtaccagcagccacagcaacccatcagcagcaccgtcaacgaattgcatcacatttctcaaatgtttgttggctaccaataagatttgagaatgggttagcaaattttaaaccaaccaaaggcaaatgaacgatgaaacattattagggcacctcagagctctacagtatcgactggccgatacaggaattcaagattggtagaattagttagaatttctagctctgttggggtcttgagcaagcccaaattgtgaaatgaattatataggctggataaagttcggcgttaatttggagagaaattaaatttgataaaaaagtgaatttgtttggttgattatttttaagcgatgtaatttatgtaaaatttactaa

SEQ ID NO: 9970 - DNA, 4046 bp, Heterodera glycines
aaagtgagaaagtgcggagacagagtgagagaaggagagagagagagagcgagagagagaaacgagagagagagagaggaaagagtgagagagaaagtgagagagagcgagagagagcgcgcgcgagagagagagcgagagagagagagagaaattgggaccgaacgagaaagatatatgaaaatagtgtgaacaaaatataccaataaaaatacatataaaaatgagaggtgagcagagagtgtagtatattaatcaagggcgaacagtgatcagtgacacagaaaaagaatccctcaaaaatagcatgcaaacatagagagagacagagtgcgaaaggacagggcgaaatagtgcacaaataaatgatgcttaatcgttttccccgcgaccattttttatcctactaattcgccgccgctccccatcaacttttatcgcgatgaccaatcatatttggaacgcttgactggcttttcatcaatccgctctgctgcccaaccaccaaacttttgctgatcagtgagagatatgtgaaccgatttggacacggtccattgggcttgggaatggggcaattcgagaatggtgcgcgagagtggggttatcgcgcaatgagtcgagaaaaaaaggaaggtaaaagcgattagtgtgagagtgggattgactaattggtgggatggggggggggaaattgcgcgaaaactttattacaaaacacagtaattcgatgggatgacggaaatggaaaaaattgattttgccgaacccaaattgacgtttcttttttttttgaaaatttctcctggatgttgtggaaagcattacggtcggagaatttttttgaaattttatcatttggtggatagaaaattttaaatttaaattgaatttcgaaaaaattgaattacaaaaacgaaaaaacacagtaaccgatccaatttaaaaatacgggtcaattatagtaatcttcttaaatcatttttaaaaaccgttcgttattcaatagttttaaacagagttaaaaatttaatataagaaaattaaaatagcattttagaattaccgtaaaattgagtcgctacagtagccgagcaagctttctttaggcttgaaaatgcgctgttgttggacggtatttttccaagatgatgatgatggtcctctttatcatcatgatgatcatcatcaccatgtgcattgtttggatttgttggcattttcggtgccagctttggcatttgctcattcccagtttttctgtccatttctgaagctgttgctgctgctgtcaatttttgctgctgttgatggtggttattgtcattgctggcagttggtgctgtgcccgttgttgtactgcttgaacttggcggagtcgtcatcgttttgacattttgcttaaaaatttgattttttatttgaaaagaaagtcattttgagttccttaatctcctgtttaaatttatatgatctagagacgggcaagggatttattcggattaaaatgctgaaaaactgaaaacttcttaatctgtttttcgattaaaaacaaaatataaacggactgtttctgctctataatctaatcaaaccaataaaacttctctaatcatatcaattcagacatattcagtataattttaaagatttgcccatgaaataccgtattcctccataaaaaagtaccgttgtgtttgaatagggcgagcccatttatgctgcccccacccctctctaattaagtccatcctaattagtcttaatgatgatcttttgcctcaatatattcaaaatgaattgcaaatttgtaagaattaaatgttagctaaaactaataattaaaccacacctttgtgccaggcgcagtggcaataggcgtgaaaaactgccagccatgcactggccacaacattgaagatggcggcggaaaaattgttgccgcaggcactgtttctggtgttggcatggccgcagggaatgggaggaacattggcattggcacaatggggggagcagtgtcagaagcatttggtggtggggttggtgatgtgtgcggcttggacagcaaattttcaatggaaaagtttgtagccagcgaagaaattttcatttttgtaaaattttgtttgtttttgattaccttaaattaagcaaattagcctatattaattattgcaaaaatgtgaaattaatgataaatttatggcctcgtttcaatgggagaattcttttttggcattgtgttattgaagaaaagctaagggttactgtaatgccaaaaatggagaaatccttttctgtcaaattctttaatggttgcgcgcaaatcaaataagaacatgaaatttacgtaaaaaatatcatgggaaaataaacagataaatgccaaattcttattgtattcatttcaaaaatattcagaattccaagaatttgtttcgtattttcccaaaaagaattttgttggatttatggaaaattgagatttgctgcgtatttccatttataaaattgagtacaaaatttaaaattaatttggtgggaaattggatgccaaaataacaaatgaaaaacttggaaatctaactttattaaaagttaatgtcatttaaattccaaaaagtgagagcaattaatgtgtatcaattagttttaattcgtcaatttctaaaaaacaaaattacataaattttgatgaaaaattgaaaattggagaaaacttgatttgtttaaaatgaaatttcaaacaaaaaaaattaaaataatattaactgtgttcgagaatccaataaaattatgttttttaaattctataaaggcaaatcaaacaaacaaaatttatcggattggtttttgcccacaaaatccgagaagatttagcactcccaaccttagtgttccagcctaattttaaatatggcattttctgtgccaaaaaattatggcaacccaaaaaaaaattggggccacgacgaaaattcgttgggggataatttgaaggcggccggcaagacaattattattataaacaataatatggaggaggaggaggcgattgtggcaccgctgcaggtcgagtccagcgaaacccagctcaaccaattaattgtctattaactatcggtgtccctaaaatattttattttcccctttgttttgttgccgacagaaaatggcaccggcgccgccgcatttttgaatatttatttcaacggcacttccctttcgtgccggcggggaggatcaacccctcgccccccccccaccatgggctgagaggatatataatgatggagtgaaaggttgctcgggcgtgagaaaatcggtccccacccccgagggctgatgttgggcagggtcgagaggagacgagagtgggccccggtggcggcggcgccaccagtgtgcccatatttaaagcgattcgtcgccgtgggaccctatccgcccaatatcctatcctattccccaaaacccttaggggcaggtgtgatgcatttgggatggatgggatacctttttaaccactcccctcttccgggggatgagcaaatattatcatctttgtggcgctgggggcgctcccagcacattacaatccgacccgctgctgccggtgctcccccccccctttttttcaggatcgaaaggtatactgtatgcagtgggcccgcctctatcgccaaaaagccaaaaagacagaaaatggtgagtgccaacagcatcaaaaagtgccaaaattggtcaggctaatagggcattgcgtcgtgtgttgtgcttatgcgctgaaaaagttgcttatagacttataagaaaaggcttagcaaattctttggttggttagttgagtaaaattaatagcctaaaatctttttttttcaaaaaaaataatggattttttcccaaaattggtccaataattgttttttggcactagaattaaacataatttatttaataaccaattttaaaaattcaccatttatttcaaataagtttacaatatttttctgtttttttcatcatcggatatgggggggggg

SEQ ID NO: 9971 - DNA, 786 bp, Heterodera glycines
gggggggggagaggtgttttaagcttttcctccgctccgataccctatccattttgaagcttattagtgtaccgtggtgccccgccggcggaagggtggcggataaggcaaagtcggcccatccccgacgggaaggaggggggagggacggagggggggggggtgattttcccacgggccaaagcccattggtcgcgcacagattaccaccacctattattatcattaatttaccggcatcggcactggcgaattgctgttggttgcctttaattcacggcaaacccaacatcgtttagtttgattaagcaattcgcggaaccatggctggaccgttggtgagaaaatggaattaaaaatgttttccgtgccacgacctgcctcagcagtggagaggggggggggatgattttatacaagtggcataaataaaaataacacaaattttcaagaaatttattgtttgaataaaaaaaaaatttgatttttttatcgagtctaactgttttatgggtttaaattttttttcaagtaaaggcttttagtaattttgagttgaatttgctttgtgcgtttttacggtttgatattttaaccagtgaaagacatttttcactcaggttaatctttggacagattattcattggataatccagaagtgttttcagggaggggagagataaagcgggggtgtgttgatgaaagataattcatatattggcacaacacccgcaggcaaattcaatttgtccgaccaccggcaccgccagcaaatgttagcaatc

SEQ ID NO: 9972 - DNA, 1398 bp, Heterodera glycines
  unsure (1)..(1398): unsure at all n locations
aaaattattttattttttgaccaatcattttcaaagttcgtttccatttttcgattgcttttcgatcgttttccgtttttggtttattttattgttcttttttgtcgatttgttcacttaggtcaaaaggaatggcaatttactcatttccctctaaaactccaaaaacaccgacccaaattggattggaggaatgaggctttttcgaaaataaattcaaggtcggcacccgcacgaatggaagaaggcaaaaagccaatggacgtgcggtgaacttaattgagtggaaaagggtgggaggggaagatggaccaggggaaagggggagagacagagatggggagagagagagagagaaagagtgggagagagagagagggggagagagagagagagaggtgagagagagagagagaggtgagagagagaacgaagatgaagaagggacagaagtaataatgaggcaaggaaaagaagtaaggaaaaatgagacgagaaggagaaataaaaagaaaaacgaagggaagtatgatgatgataatgagagtgatcaaagagaaagaaagaaaaaggaacgatgatcatgggaagaaaaagagagggagaggcaaagaggaagaaaaaagaaatgagaagagggaggaagaggagagagagggaggaagaggaagagagaaggaggaagaggaagaaacaagagagagaaaggggacgaaggaaaacgctgaagggcgtagtttttgtcagaaatttgaatccaaattgaatttaaaaatttccagcttagctgaggatagctctcactcacttcacatccacttcccacgtttcgctcctcccaaaacttccaattttgcattcccttccctcttatttcaaactcttcccgaaagagttgtgttggtcttcttggtcttcgtcattgttcttccttcccttcctcctccgctcaatggtttgttcctccgtccttttcagcactaactcaagagcactgccccttctcttcccctcccccctcttcttcttcctcccaatcgtccacctttcacccgtctccccctcactttccccactttctttcgtctttttcatcctccaattcattctctgtccactgacccttgcggtgtgtccccccaattcgtccattcatttccagtaatttttcccgaaggtcacaccttcccccgacccccccccccccccccctccatcgccccctttcacctgnctgccatccccctcgagggtcatttttattcacttttttgttacaatttctttcattccccgctgacccttccacccccccatttgaacaaatttatctttcccttatctcctttatcccccctggcttcccccctcttcctttccctttggtctccctctctc

SEQ ID NO: 9973 - DNA, 995 bp, Heterodera glycines
gagaaggagaaataaaaagaaaaacgaaggaaagtatgatgatgataatgagagtgctcaaagagaaagaaagaaaaaggaacgatgatcatgggaagaaaaagagagggagaggcaaagaggaagaaaaaagaaatgagaagagggaggaagaggagagagagggaggaagaggaagagagaaggaggaagaggaagaaacaagagagagaaaggggacgaaggaaaacgctgaagggcgtagtttttgtcagaaatttgaatccaaattgaatttaaaaatttccagcttagctgaggatagctctcactcacttcacatccacttcccacgtttcgctcctcccaaaacttccaattttgcattcccttccctcttatttcaaactcttcccgaaagagttgtgttggtcttcttggtcttcgtcattgttcttccttcccttcctcctccgctcaatggtttgttcctccgtccttttcagcactaactcaagagcactgccccttctcttccccctccccctcttcttcttcctccccctcttcttcttcctcccaatcgtccacctttcacccgtctccccctcactttccccactttctttcgtctttttcatcctccaattcattctctgtccactgacccttgcggtgtgtccccccaattcgtccattcatttccagtaatttttcccgaaggtcacacttcccgaccccccccccccccccctccatcgcccctttcacctgctgccatcccctcgagggtcattttattcactttttgttacaattctttcattctcgctgaccattcgacccccaatttgaccaaattatctttcctttatctcctttatccccctgccttcccccctcttccttctctttggtctctctctctcctcgtggggaatgccaatttcggtttccccttttatagcaacctaggaggagcgaacccgtggtgtataaatggcgatgatggcagg

SEQ ID NO: 9974 - DNA, 2204 bp, Heterodera glycines
cccaaaagttgacccaaaaattcagcagtagaagaatattaagccaatttatttgcatcttcccccttcattcttcccattcgtcctgaattgatgtgctcttccctccccttccctttgctcttccctcccctcccttccttcctttttcttcccttttttcttccttttcctcttctttcgttccccttcgtatcttccgtcatttttcaggtgctctacccatcgtcagatttcctcagttcttccactaataaaataacattgcgctcccacgggtccctccgcttggtctgcttttcgtccgtccgttcgttttcgccatgtccgccgcttcttccgcgtgttcgtcgcccccatgcgcctcctccccgtcgtcccattggtcttccgcttctgttcttccttcgtccccttcttcgcttcgtttccctccgtcctctcaccgtctcgtccatcggtcccttctgatcacttttgctctgctgatcattccctctcttctcttcatatcatcagtcgaagccgcccaacttagtagcaatcaacgcgatgccaactcagtccaacagcaggaactatcagtgtacgacaacgaaatcatcagtgagtgaaaatgggcaaatgggccaattaatgtgtaattgatcactctttgcggtgggaagggatggaatttgtggggaaaagaagtgatcgaacggacaatgagcagggagtgatcagtcaaaaaaagatcatcagcccactatcctttattcaaaattggttctcttccctcttcccaaaagtgagttcatccggaacggcttcctcccccccccccgcccacccgcgcagcgcctttttcggtcattgcctttgctaaataaaaccttgaacttttcgtccccgtgccctcctccccttctctgtccgttttatttgattttcgttttcggcggtggtccgatttgatgtaatgaaaaggcaattttgttggtgccccaatcagccgaagaatgaggttgacacaggcaaacaaaaactgtgaactgccgagcggaaatatttgcattggttcgtcgtgggaagtgccgacaacggatatgggctaattggaaatgaattgggggaataatggggacagaatgaggggagatgaggaggagaaaggacggaagaggaggaagacgactaatttgacggaggaaaatgggaacgggggaagggaaccaacggatcatccgaaagggcgacttaccaatgaatgatcggaaaatgactagaaatgatcggagagattggaaagtgccacagaaaaatgcctttcttttgtcaggtgagcccgaaattgagtgcggaccgggcattgtgcgctttaatgtgaggactcgcaaaggcaacgcgtcggcggtttacgtgcggggccaaagtcagaacgaggactgcactttccacaacacgcgcaacatcaccatcgaattggccaagtgcaacgtgcgacggaagcgggaggtgaacccgaacccgggcattgcctaccaaatgaccgtcgtcgtccaattgcacccggttagcctaattgtttggaattggaaaataaatcactcaaaaagtgttgcccaatttgcagctatttgtgaccagagtggacagagcttacaatgtgaattgcttctaccgagaacagagacaagacgtcagtgtggactttggagtgaagtgagtgccccggggggggggggggtaatgtagcaaattggggacgaaaagcaaagcgaaagaatgaagcacggatggaaggtgatggtggtggtgaccttctctgaattgtttatgggaatgcgcccaaaaatggagcgaaaatgcaataataatattttatttattcatcaaagtgccgagagtgcttaagggcctgggaaggtcaatgctacttaaaggggggtgggacaaatgggagacaaaagagggacaaataggagacaaaatagggacaaatgggagacaaaatagggacaaatgggagacaaaatagggacaaatgggagacaaaagagggacaaataggagacaaaatagggacaaatgggagacaaaatagggacaaatgggagacaaaagagggacaaataggagacaaaatagggacaaatgggagacaaaataaggacaaatgggagacaaaagagggacaaatgggagacaaaagagggacaaat

SEQ ID NO: 9975 - DNA, 1453 bp, Heterodera glycines
  unsure (1)..(1453): unsure at all n locations
ctgcannggtcacaattgtaaaatacagtaaaaacaaattaaaaccaattataataagaaatacaaattatctaactaaactttgtgctgtaattaattcgtgttattatataattagtgatctaatttttgaccaaaaatcaacaaaaatgaccccataatgggaaaagaagagcaaaaaatgaagtatttagggagagatttaatttgtgacctaaaaattaataaaatatgaccatacaatgtgaaaaaaatgactttaaaaaatccaagaagttagggctgtgattgtgatcgtcacattccatcaagaaatccaaattaaaaaactgaattttgcttcattttttacagttatcaatttttaaaatataaatccccccccttcccgcttccccgtgccgtcctttccccgtgcgacctgctcgcgcggtgagttcagcccatgccccgtggttttgtcgtatttggcccgtgtgaatggtatctccgttctgccttcgcatgccttgtcaaacaccgggtcacagcgctccaccgggattttgtgcatctccagcggacaactattctgcgtcgactgcataatttcataggcgaccacttggcctataaaaagggtccaatttgaagacgttcaaacccagcgggggacgagcagcaacagaggcggaccgcaaatcgaaaaagacactaacggatccgatacgtggaaaaaatggagcaaatacgaaaagcggttgcgtttcgcccctgccagggaagtgcccaagacttcgctttggacagttgtaccggggtttagaaataccaggaaatcatgtcgatcattggtcccaaaatttttttaaattttttcggaaaatttcgaatatttttggaattttttttttttttttggtaatttaacttttatttggattttcggctttttaaccgaatttgggtccggggttcggaattttttctaaatgcaggacggattcgttcatcgtctcaaaaacgtagagcgacatttgcccatcgtcttgtgcctaatatcttttgcgaaacataatattctaattatatatttaattctttatacatttcatacaattatatgaacattatgcaaaataagtagatatctcacgttgagcgtccgtgcgactattactagaatataatgaagattttggtacagtgcaaacaattgagagaaattataaaaaaattgtcagagacaaaattttatataaataaaaatagtgattcctaatgtaaataataataatttgtattattagccctaaattaatgttcccaaaacaaatttaaaaaattttatcacatacaaaacaagttatttgaaattaaatagaaaaaattgcttttttaatttaaaaacaatgccaaaaataataattttttttaaaattaaattcccttattttttaaaaacgtgaaaaaa

SEQ ID NO: 9976 - DNA, 2758 bp, Heterodera glycines
  unsure (1)..(2758): unsure at all n locations
ccccccccccccccccccccccccccccccccccccacaaataaaaaaaaaaaaaaaaaaaaaaaaaaaaaacaaacttttttttttttttttttttttaaattttattattttttttttnannnncncccccccccccccacacagagaagaagagaaagaaaaaaagaaaaccccctctttttttttttttttttttttttttttttgaaagagaagagagggggggggggggggtaaaaaaaaaaaaaattttttttttttttttggggtggaaaaaaaaaaaaaaaaccaccccccccccccccggcgggggggggggggggggggttttttttttttttttttttctctccccccgaaaaaaaaccccccccccccccttttgtaggggggggggggaaaaaaaaaaaaaaaaaaaaccccccccccccccccccccttttttttttttttttttttttttttttttttttttagaaagagaaaaaaaaaaaaaaaaaaaaaaaaaacccaaatttccccccgtttaaaatttngtttcataaaaannttgggccnaaaaatttttaatgaaaagggatggatttggagtaaagtaagggcgaaaaatatgggccaccaaagaaaaaatttgccgtaggcgccgtgcctcgggggtgcgttaattaattggactcactgaagaaggcgaacattgtggtcaaatttcggctgcttggcctaccggatgggcccttgaacatcagttctattaaaaaaatttaaattgttaaatttttaatggcattttgcctcaccagaaattgccctggccgatggaagagtcaaatccaagcggtaaacgccgtcctggtaattgcttggcgcgtcccggtgaagccgactgcccacgctgccccattgggggtgggccaaattctaagggattggaatttcaaaatgcgaaaaaaaacgaaatttaattttaagagattaaacaaaaatccaacattaaaccatccgtcgtatcgctgatattcagttacacgttcaagccctgaaggaaaataacagttgtttgcaatgaaatatttatttcattgaccaaatttttataaaatcaaatattttttaaaatcaaagaaatgtaattaaaatttttggcactttttggttaggcagccacactcccacaattaacctacgcgcataaatcgcttgttttcagtcttttttttttaaatttagggtgcgctgcatatccgtaaagtaccaaattcattaaattaaaaaaaaatttaaaataaaaaaatgaaatcaaaaaatttgaaataaattagctacaatttctttaatatttccttatgtcatctgtttgttttttcataaattattgaatgcatttttttattattttttgaataaaaaataaaaatttaaaattattataattaatcccaattattttatatttatacttttgcacattttcaccctaaatgctccacacaaacaatttctgattttcattttttgcaacctccgaaaaatgttcctcctttattgggtttatttatttgtgcgtcggggctaaaccggctgttgctgcaacgattgcagcagaacaattgaaggaataatcaattgtgacgacaaatttttattgcgtttgttttatggtggaaaaattgccaaaattggataataaattttaaaactcattaaaaaattgacgagttattaaaattcgatttaaaaatgtcgaatgcttcccttttttggcattaattagcaaaaactcaaaaaataaataaaagaaaagcgtctttatttaattaaaatgaaattaaatatttaaaaaggatttattttatttgcatttaccatggatttgtgtgttgtaaattgcaataagtgttaataaaattatccaattcgttgttggtattcgcctttgtttcaattgttttaacatatttttgaaaggaaaaaacatctaaaattcaaaaaaacaaatttaattgattactaaataaatagaaattaataaaaattattattaaaaagtaattagtgaattttttggtgtccatcgcgacgagagaaaagaaattgaaagtgatcaaagggaaataatagcacagatcgatcggaggggcagcgaaatgatgaagaaggcattcattcacattcattagaatgcgaagattcattccgccgccattcgcccgccagcggctctccccccccccccccctaacgcgtgagcagcaatttggatgaccaaagttctttgagtctgacgaatgcctttttgcatttgtacgctccaattccattctgtgtcctttttagcaaaacatcaagcggcttactgacgaggcgcatggttttaatgaattgttggtaatggttgaccattcccgaatatgaccgaagtgaagagacgtccgacagtgcgggcatctcattgatggcggagattttgctggggtcgggtctgcgcccgtttttgccgataatttgtccgagatattctaatttcatcttggaaatacgaacatttttcacgtatgacaccaattccccattcttgatatcgcgagaacatctttttccaatgaacagaatgtttttttggtccttggtgacgatgatgatgcctactaggcaggctgccgcgaagccagaatctgccaacatgaggtccattatcgactggaacatgccaggagctgtttttatgccagatggaaagcatttgactgcataattt

SEQ ID NO: 9977 - DNA, 1100 bp, Heterodera glycines
attctttttcaaaaattcagacagtccagaaatattcttttgaacttttcttttttgataattgtaatggttaagatgcaattgttccctgatggctcttttcgcaaagtccgtaacaacattgaccgattgtttgacaaatatatgaccgatttaatccgcggcattcggaacaacaaggaaaatgaggtgatgattgattgactgaatgcaaaagccatttgtacatttacaatttgggcacttttgctgggcctctgaaaaaaaaaattcaagggctcatccaattacaaatccttacaaaaaagcccccctttggaattttctctcgtgggcctccaacaacagccaaagtgccataatttatttacccaaaatgttataggcggaggaagaggggaggaagaacgaagaaagaagggggaagaagggaggaagagcggaggaagaggggaggagatggggagagagtgggagagagggggaggtaggtattactgagaatggctgttgcgcaagccattggagatgtatgagagggggaagagggagcaattgtgggagaggggagagaatgaggggtcagggtggagaggccgagggtgcaactaaatgacggttgcacaagccattgaggaagtgagagtggtgacagaagtagcagtagtgcgggtgcgcgggccatggagggccgaaacgaggccatagcaatgagaggaatgtcatagggagaactggccataaaaaaatgtgagccatggggaaaagtgaacatgtgaggaggagaagcactggaacgaataccgccgtttccgcttgcgcacttcactttcttataaagcagggttgttccgggtcatccgaatctcgaaactcgatatttttctcgtcccgaatcccgaaacccgacatttttctcgtcccgaatcccgaaacccgacatttttctcgtcccgaatcccgaaacccgacgtttttctcgtcccgaatcccgaaacccgacgttttctcgtcccgaatcccgaaacccgacgtttttctcgtcccgaatccggaaacccgacgtttttctcgtcccgaaacctgacccgatttttttc

SEQ ID NO: 9978 - DNA, 4414 bp, Heterodera glycines
aaatttctatttgaaaactacttccctgcccccttatacataagtcgaaattcggaaaatcgttttgttttaaaaatctttttctcaaaataaattatctcttccctaatttgtttgctaacgaaatacatgtctattttcaatagacttgcgctcagatgtagctgttttgatatcaaagatttttaaaatgaacacttcaacagctttcgaatgctactaaatttgtcggggaagattttttgtgagtttttggctctgtgccttcaattagttaattaccaaaaatttactattaaaaatatacaaaaccgccgcaaaaaaatcattaattttttcattgcaaaaccaaaagaagcattttttttctttattaatgatcaagaacagattaatacataaacaagaattgtggtcaaattattattctggcttctacggaaaggggaaaattttagaaattttttttggaaatgtttagaaattttctgcctaaaaaaggtatggcgaatcgtgtacgcctccgcccgagtgaatgccgccttcggtggcatcctcgcgcttgctgcgcaacatgcacccgtcacgttcgttgcgcaacacacgcatgttgctggcgttgcccaacaaatagccgtagatgctcagctcactgacaatgttggacagttgaggaacctcttttacgtatgggcggaccatgaaattctaataaataaaattttcaataaattaaattaatttttaaaattattaatactttcccattaacggggaggggaactggagatcgataaaattgaaccaatattttatattttttaaattaaaatgtaaaaatattggcaccagcggaaatggaggataataaaacaattaaaatagtattaaaattaataaattaaattttaaacttattagtaccagcccattaagggtgagggtgaagtggatatttgatgaaaaattaaaataacatttaatatttattaaaattttttcgcttctccatcccccacccgttaataatatgatatcataaatttgaaatttaattcaataaatttaatatattactttggaggggaaagtaaagtggaaaatagatcaaaaattatataataatatttaaaattaattaaattaaattttcacacactgtctcgcacacccctcttttttttcctttatcaccgaccactgttaattggataattattaattaattgtaccgcgcaccttcacaacaagtggccttaatctttccattaaaatgtgtgctgctcgcttattgggtttgaaagtgcgtaatttttcagcaatttcttcattccaaaaattgttgccgcctccttcttggcttggttttagcacgtaattaccaggattttcaatggcatcctttaaatttagggatttgcagcttaagcgatttaaaattggatttaagcattacagtaagatatgtgaaatggaaaaaatctttttgtccatgggatttcaaaaattattttaaacttattaattaatggttattatattaattacgctaatgattttcatggtttcatcatcatcttgctcaaggctccacatttttgcaaatgtttttcgtatatcgttgaccatttgtgcatattctggttcagggaaaaagtgttccaacatacctggttcagaaagggcctaaaaaattaatttctataattaatttaaacaaatttatgaaaaaacgatcattttttgaacgtcacctgttgaacttttttggcacatgtcaactcgagactaatagtcgggcttttcttaagaatttaattgatgaaaatttatatttacgtttcatttaaaggtgaaataattcgtttaattttaatattataataatattattatttatgtattttattaatacaattgccgtcgatttttcgattttgagccgtgcattatatgacttttgtattgggttcacaataattgttttgtaatacacaacagcgaccaagtgaccattgtatcgcaatgaattgtcttctggatcaagaaataatctaaaatattgaataattaaataatttgggggaaataatttatttatttaattcccaaatctaaaatgtttatcgctattatttggattaaatttaaataaaaaaattcactgatcatcgcattcgaaaattgaaagtttgacaatttggattttgtttcccgacaattgttccagccgcagttccaattggaactgttcaatgttgcgatcagcgtgaccagagacgacaacaacaattgcgtcattaacgccaaatgcaagccttaaattgtattttattgagagaaggagataaaaaaaaaatcgggagcatgaccaggattagaagggactactggaaaggatacttgaaaaggcaggaccatgattaggtcaggcctggaaaagatgtcctgggtatctgtgatccttatatgtttttttaaaattcgggaatagaaccaggatttaggagccgggcctggaatgttgtcttggatattggcaatttaaaatggtagggcaatcagattagtaaacctaaacaaaattattgtttttggcaaattattgaagcgataaaaattggctattttttaattggtactagaattggtattaccaagcctgatacagccccttggccacaatgccttccgcatcattgtccggcaaattggccgcttcgtatcccacctttgcaaacatttcacggtgaatgattgttgtacggtttgcaattgctgggcctcccatttgaccaatgttcaattccaccttttttgaaatattttatttatttaattaaatttaaattaaaataaataaataaaattttttaatttttaaatgcctgtttcaattggtattcttcttcatctgttccattgcttttgcgcaaatggcacatataatcctgtgaacaattaaatgaaaaatatttaaattttaattacccaaggaaataaaaattagggaaatgttaaaaaataaaaaattatttatttaaatttttaaacaaactgatcgagtcaaaaccaaagtgagcggctgactgatgattggcagattgtgaacctcacgaaacagtttcaaccagctttggatcgtaacatctgtggcggcaaccggctccaatgttttggttaaaaaatcgaaatcatttgaaacccgaaagtagagtaattgcattgccttaattcaaaaaaaaagtaaaaaaaattaattaatttcgaaaaaattgggcgctttttgaaaaatggtccacgaattttattaaaaataaatgggaagggattcttgtggtttgcaaatgtgataaaaactcgtgaaaacttgttttcagagggtttttagggtccttgatcacgaatgtgtggcttttgcttgtaccaatttctaatccataacccgaaaactaactcgaacaaaaatcgaaaattcaaattttctatttttatttattttttgaagtcttgattagaaagccagaattagtcaaaataggtgcaacatagccaaaaagctcaggaacaaattttaattactagacaattattttataaaaaaaaaatttttatcattccaaaagggtgccggattttaataaaattccaaatatacctatttttaaatagcgcaaaattttgtatatcaattaaaatttgaaaatatttctactttaatgaataaattgttaaaattaaattaactttttgaatttctagcgcctcgttgtaaattttgcgcgggaaaggtgacggaaacaaagtgaaaggcacaaaaacgcaggtatcacttctgcaaaaaaaaaatgccaaaaaaattataaaaatttttatttaaatcaccgtggaaattttttgtccgctcgccatgccatgccaatgtggtgggcccaattgatggcatcatccaccaaagcccgtagacttatttccactaaacaataaatgttgtgaaaatttttcttttagaaatcttttccctttttttaattaattatttttttgtaatcgaatgaaaaaacaatgcatttttttgccaataaataagcatggttttgtataaatttggacaaaatcctgggttaatttgcaaataaattaaattaaatttacattttatatttataaattttacctcttttcacttcgtcagttccattgctaattgcacttccaattatcaacagaaatgaaattgtcaaaaagatttgaagcattgtaataataggtgtaattatttggagaaagcagttaattaattagaattatatttatggcgcctaattaaaatttcaatgcttttttataaggcaaagctttcgtcagcttagaagaatctataactaattattatgacattttttatttttca

SEQ ID NO: 9979 - DNA, 5315 bp, Heterodera glycines
tataataacgctgcggacatctacatttttgaattgaaaaaaaattggtaattactctttctttttctccatattgaccatcatactcatactccccccacccttttcttcttccgccacccaccctttctcctccttcattttttttttcctttccttctccaaccctctcctccctctcttgatagtttaaactgaggcgggaaacgacaatctgatccccatcaagctagcttctgcaggtcctgctcgagcggccgcaccggaaaaagttgcacaaaaaacatttaactaacaaaacaataacacaaaacaagatacttcaaacatgtcgttagaaggaattttatgagatggatcaatgataacgaatatgtcacagatgaacctcttataatcattggagtaccttttttaataactgatgcacccctacaatcatatgaagaaccacattggaacattcactaaatataattaatgatcaagactagaaagcaaatgtcaagaactgagcagcgatttttcccaactaaaatgccaacggttcacgcacccgctagatacatatttatgccacttttcatgcatataatttatacctaaagatcacattagaaattcattattaatttttgaaaaatttaattattcgaaataaaaattggcatttatatgttttcgggttttgggtgggctgtaaatgcaaatcctactttctgtgtgaccacgacgcccatgggataattccccttaatgcaaaacatttccaaaactgcttactcgcgtcaaaaaaacgaccagcccaatgtcgctggttgaaatgtatttcattgaatttggctggcatcgttgcaaaaattttctccaccttaaccaattccattccgattgccgtcttgagactgtgtacactccgttctcgttcaggccgcccgatgctaaaatttgtcatgatgttggaggagattgagtttattaattaggccgtaatgcgaaaccaatggaaatcctttataaaaagtttggtgtttgtcagtaatcgtgctgggtcgtttcgtaaaaagtgccactatgggcgtttagtaaaagtgccaccttgggaatgtttcgtaaaagtgccactgtggtcgtttcgtaaaagtgccaagtcgtttcgtaaaagtgccaacttgggaatgtttcgtaaaggtgccactgtggtcgtttcgtaaaagtgccaactattttattcgattttgataacatataaaatgaatatataaaatatataatttatcaatggcaatttttattttttatctgtgcaaatacgtgtcatccgagacttatacatagatgttagcgagaattttttattttttacaaaaacgctatgattgtgataaaaaatttgcaattgcttatatgaaaacgttgattgtttgctaacaaaagtttgttttgtttatttttaatgagattcttatgtttagaatttgttatgctggtcagtccatattttggagaacgttttaaagaacattgaaaaataacggattttatttgattacagttttcaatattcatagtttactaattatataatatgtataacacaaacataaatttttgaattcataactctatactcaaccatatttttataatggttcttttacgaaacgaccacagtggcacttcacttttacgaaaatcccaaggtggcatttttacgaaacgacttggcaccgatcaaaatcacaacacctgctgttgtgttgttattttgttttgttgctgacaaaagacgtcgttgagaagcaatgcgacgatgagaaaaatgaacaacagaaaattattattgtttgaagccatggcaaaaaaaaaggagaggaaaactctgacaaatttgaaaaaattgtgaataataaatgcgaaaatttgagatacctattttctatataaaattttttagtgctaagtaaagaccttaaaaggtttctttgctacagaatacttacctattacatagaatggcattcgcgtcaaacgacccgttcctttttatacccgacaaacgccgattccgacttttttcccaccccgaattgctacgctaatattttagtataaaaatgcccttttttcttatcttcctcctcattccattctctcattcattcttcctgtattttctgttcattatgttgctgcaaatgtcaacagaaattttgtgtacgtttattattcccttattttccgcatttattttgctagacatttaagcttgtaaccaattttaacaatttcaacacgaatttttaaactgtagatttttggaacttcaaacttcacttttggattccctcgctttggtgcttttcccacttctttcagtcagttggtctgccttgtttcttcattggtcgattacttttgctgcaactttttgttcgtggattcaatttgatcaaatgtgatgatcagaaataaaattcaaaataataaaataaatgctttcattttcaattggcaaaaaatatatttttaaattaatataattttatgaggaaattttatattgttaactatattattttttaaataaagtaaatagaacctattgcataaatttatttttacagcaaataaaattaaaaaatttaaattgtttttaatattaaacataaattaacaataaccagataccgcacatcaacagaacttatctccaaccgtgtaacatagtcgaattttcttggaaataaatttttatattttacttagaaaatctataatttaaaaatatttttttatattactgtctgtagacgcccaataactgttcaacacaatattctcggcaaattcgatgattcacttagttaatctgttttttcccatatttatgccatttaaagataacaaaataaaatctttgtaacttacatcaaatatttcaataaatcaaaatggagaacaaacaaaaaataaaaaggaaaaggaaaaattataaatcaaaaagtaatgaagaaaaatttggaattgtgcaaaaatttattggaatggcaaatgaatacaaacaaaatcagaaaatgctaaaataatcgtacttttttataaaagattgtctagcaaattttccagaaaacttcatttattggcaaattttatttgaattaatttgttgcatatttcttagcatttggtcaacaaagaaaagagttatgatgctctaaacttgtctcagattaaaccggccagactgaactgtcccattccgcataaattgacgaagtttgaaaaaaatcattttttaataattttctactctactgatgatcaaaattgtaatgaaagtagggaaaaataaatatttttcatcagtaggataaaatgtttatttaatcgtggaattactttattttttatttaattacttacaatcttcttaaaattatttattctgagaaaacatattaaatatatatgtatttgccgtgaatgataaaaaagctgaataaatgtagattttgaagaaaataccaatgattcataaaaattggctgaaacagattatgatttctcgattattttttatgctaacacccaattatttcatccttttcttaattatgccaattggatgtaaattaatgtaaaatatttcttattttttaagaaacatccatttatagaaaaaaaattaaaaaatttttttctttaaaaaaagaaaaaataacaaaaaaaatggaaaaaaataactaaaaaaaaattaaatttaaaaaaatttccaaatcgataaattctcattttttcatttataaatattatagcaaataatttcacaatttccgtcattaaattaaattaattaacagaattattgtcaattgaaaatgcaatttcccctgttctcattttaattatatttttaatcaaccaaattaatcaaatcggaacggaaaagaaaaaattggaacaaaaatcatttgatgaaatatttggggaaagttgggaagaaaaagaagaaaaacaacgaattgaagagaaaaaaatagaaaaaattgtggcaaattccataaaataaaagaaaaaataaaggaaaaaggaaaaaaatattcagcaaaaaaatggaataaaattgaacagaaaatagcgaaaaaattggggacaaatcgacacaaaatttatgaatggattaaagaattaggacttaataaacaaattcataaaagcaaaaaatccaaaactgataaagaaaaaattgaaatttcataaaatctctttaatttttctaaaatctctttacattgtgaatttattttatttttattgaaaatatgtttattattttcgaatgagctccagtagaaagtaataaaattttatttaatcattaatttaccaattggcaattattttgtcattaagataaaattattattattatttctttgaaattaaacaggatttccttattttattaagtaaaataatgatttattcagttttttaatcagaaaaaaatcatttaaatgcctcaaaaaatgaattgccatttaattgaagaaaaataaaataaaatcatttcgagacgacaaaaatgaaattatttccgctacttttattaattattttatttttaattgacaaaattggatcagaaaagaaaaaattgcaacaaaagtcatttggcgaaatatttggagaaaaatgggaagagaaagaagaagaaaaacgaaatgaactcaaaaaaagagaaataattggaaaattttataaaataaaagagaaaataaagcaaaaaggaagaaaatattcaaaaaaagaatggggaaaaattaatttgaaaatagcaaaaaaattgggaacaaatcgcaaatatatttatgaatggatcaaagaatttggtcttcaaaaacaaatgcataaaaattacaaatcaaaaactgatgaagaaaaattagaaatcgtgcaaaaattcattgaaataacaaatgaatataagcaaaaaagaaaaaaatatgccgaaatttgcaagaaaattggagttagtgaattcactattatgaaatggaagaaacaatttggcattcgcggtaaaataacggatgaagaaaaaatgggaaaaatgaaaatttattgggaaataaaaaaagaaaatccaaaaatgagtgacaatcaaattgctaaaacattgagaattagtctaaatagcattataagatggaaaaaacagttttgagaagaaacttcgtcgaaaaaagaatgatcctggctatttaacgcgataaagaaataaaaattccgatcaaatttgttttcccata

SEQ ID NO: 9980 - DNA, 4259 bp, Heterodera glycines
  unsure (1)..(4259): unsure at all n locations
ggaaggatagagaggaggggangagagagtaagggagcggggaagagggaagattagagaggagggngagagagagtaagggagaggagagggagtgccgagaagtgccaccagggaaaagactcaaagcaaatgagagcaaaacgaaagactgacttgaatatggcgatgagcatattgatcagcaggatgttggccaccagcaaaaagatggtcatcagaacgggcggaatccatccccccggcacgcaattggtgccctcgtctccgcatgtgtcaatctctcccgcataaacctttcctcagaaacttctctttaacattaaattcctttcccaaatgacctctccgtaaagcataaaatagggcttgtagaaaatattgcgaaccaaaatccaagcccatttctcatgcggaaaagtgatggattggcgagataaaagcaaagggagggaaaagggaagatcaaagaaagaaatgatcagagaatgaacggaattaaatgatcaaaaaacaaaccaacgccaaaggccatcagagtgacctgtgaagaagggaagagcaattacaaaaatcgaagcataattaaacaaatggtcccaataattgaccgaccattagcagtacaattatgtaactcatcgccaacacctttaaaaggtttcgaataattttaatttgcgccattttaccattttgccagccattgtaatgtaaggtccgatgcgcgggtgaacactgagaaaatcaaacagtttcatgtgccaaagcacagagttagaggcaaggacagtgcgcgagagagtgtggacggtggacggattgagacggaagagaaagccgacgaaaaaagagaggacggcaacagtggtcagaatgttccagtatctactgtagaacacactgagcttctcaatcagagaggacgactcgagcacgaaaagctgaaagagttagaagaaacattttggaaaagggaaagggacagacgaaaccttgcggaagtgttccatggcgaaggaaaggacgtaaacgaacagaaaccattcgacgggggacacttcgctggggaattcgatcagcaggacgaaaatcagggcgagcatgaaagtggcgtaagagatggaccaagtccagaaggaagtgatcggggcgcaatagaaaagcacaaatttggacaaaaggcggcagatgggaaaggtcggccgacagagtacccgccgttggcactgaaagtggtggacggaggggagacggagcatcggcatgaaaatgaacggcaccaaccggagaggggaggggcgggggagcggtacttgatcgcaaaatcaaactaacgtcgattgtctcgtttttattgcattacatacaccatggacatacccagggagagggggcggggcggcggggcgtgtacatagggtacgacgtgccagggatgggtctcgtgccgtcccgtccccatttgtctgtcctttttcagtctgtccccattatccccgtccttttcccgtacatgcgccattggcaattgcatttctttacgatttcccaaacattgacaccgcacgaattgttgctgccgctcccctgccctcctcctccgttcctccatcagctgctcctcctcccgctcttcgctcatttctgacattttgctaaaatggcattttgtccgttttgccgtcgtcgtctctgtcccccgctgtttccctcctccgcactctgtgccctcctctttttcctcgtcactattgctttcctcctcttcataaacttcttcctcttcttcaagtgaagtgtcggcatttgaatggaagttatcaaaagaatttgttttgaagtcaagtaagagaatgctgcagcaaatgaaagtgccaatgaacagacagtcattagacgagtgattaggcgaaatgagacaattcattattaattacctcggtgggaacagaatgccaagcacaactttgaagttcgattgactgaacaaattgcgattggtgcttttacacgcaattgcaacgcgcaccttctgaagcgaagtccgccgtgccaaagttcggccaaaagaatttggcagcacgggtgggccaagaagcgtttgttgttggcgatgaccgccagcgaaaggcaagtgcgatggccccaattgggcagttcggccgtcagaaggcgcatggtcagctgagagtcctgctgatgacagttgtggagcaactccagggaccaatcgcggaactgaagaagtaggaggaagaagaagaagaagcagcgcattggcacgacgcaaaggaaaagcaaaggaaaagcaaaggaaaagcaaaggaaaagcaaaggaaaagcaaaggaaaagcgaatgcgacaaataccatccgcccctttgcatttttcattttcaaaatctaccatcctcacccccctgcattcttacaaaagccatccccaatttgtccctgaaattaaccccattgcccgcccatttcccaaaagtttgtcgctttgtccgaccactgaccgcgttggcacactctctgagttggttgctgacttccacttccgtgtagtcgtgcgctgcttcgcggctcatgcatttgtacaatcgaatggccaccaatgcttttgccattggctcttcgccgtactgccaaaagaatttggccatctgtcggtgcaaatgatcagcaggtgacacccattcgcaagttcacttcgtgtcgacgcgtcagcacagcccaaagcatcaattcgttgaagggaaagtcaaagtcccgcgtccgttttcgtccgtacggcgcgtcgtcgccgttcgccggcgcttcgtccgtccgttcgcttttcccctttctctccgctggggtggtcaaagcgcactttctctgaatgaattcgcaatttgcacctttcttaagggactcaatcgccttcgctcgctgttccctctcctccatcgggtcgccaatcgcctccaaacaaaggttcaatgagctgaaatttctcgtggcgcctttccgcagcgattgatttccaccgaatttggccctttcgtaacgcattttaaactcgcgcgttgtgtaggcggaacggtaagcgtttcccatgagtctgaggggggggggggaggcgaacggcactctctccgcttgtttcgtacgcctgttgctgccccataccgttcgatgatggctccaatttccggcagagtgatcactgtccgcttcgtcccgcgctcgccgcgtcgccgacgttccgcgcctctccgtccgcttttgcgcggcgcgtccttcgccggttccttcacacaatgtccgttcttttcgccctttgcttttccttctcattttaccgcgttatacaaccgctccaagcggtcgaaggtcaaaaaccgtttcagcgatagtccctgctccaaaaagagcttcacaaattccacccgactcatcagcaatgcctccatcatcggtttcgccagcgaagcggcgcccattggcagcgagcgaacgccgccattgccattttgaccccgaccaaatatttcagcgcgggcgatgtcctcacggccccagacgagcgtcattaacagctgatcgaccggggacagattttgggccttgaaaaattcaaaaaaaaaacaatggcacgaaaatgagaaatgccaaatcctgaaaggaattgcctggagaagggcacggagaatggcatggtccatttgggttggaattggaggagtttcggcgttgttatgaaggcaaaatatggtcagctattaggaaggtaaaggagcggaattgggcaaactgcgaaccaatccgtcccggtattgagcgcattggacgaggcggtcgagaatggcatcgctggaaggcatttgctcaagtggtgccgagttgcagctcaattgccgcatttggcacaacaaatgggaacggagttgagccggcaaaattctatgataaaatactcattggattggccatttcaaagttgtacttttgttctgacttttggtcggtcaaatgtcgcgccgcaaatgacaaaatgtccgaaacgcggccactgccctcacaaattatcaccggaacggacggagtgctgcaacgaaaaacaccacactcattcattaagcagagctcattaaggaacaaatacgaatatatataatgaccatctgaatgaaaatggccactttttgcgcagttttttggcccaccccgtgaggttcagccaattcattttgtttatggccaattatgggattg

SEQ ID NO: 9981 - DNA, 2247 bp, Heterodera glycines
ccccgtgaggtgacgatggatcaaattcagcgtgcaaagtccgccttccaaaacaacgctaacgatcggaattcgattgcttctgccgcctctgtccgtgcctcctcgcccgtcgtgcgcttccttcgccgctctgctggccaaaaattcctcaagccgtctgcgtaaaacgatgtccgccccgtaacggccgacggtgccattgtccgccaacagaaagtacgagtggcggtcgttaagtacaaggccgccggacgaaccacgccgggcagagcggaggaggacggactgccggacgaatgtctgtcgtagggcacttggacatttcggccgaggaggcgctcgcggtgctgaagaagtccccatggggcaatgccaacggtgacaatccgcgaacgcattctgaacgaatgcgaactttgtctgaagcgaccgttcaatgggagcgaacctcgccgaaatgcccgcctcgtcgagggcacgcccaatatgtttgactacgcccgagtccacctgaaaaggcctgtccatttggacggacaaacccaaaaaccccagcggtgagcacccacgcgcccgttgtttctgccgctttgagcaatccttcgcggaacactttgccaactctctcgggtactctgacaattttaaaagtcccgaaaagcaattggccggcaaagtcccactcgaagtcggccatccctccgtggactgtgatgaccaaccgcggcatactcagtccccattcgcgcaccaaaagacggaacacatcggcaggctcagagtcaaaggacaagcgcacataacgcgctttgtgcacgtgaggaccgccctaatcggagaagggaccgttcacttgccaaaggcattctttccacggcatttgatttgctcattcattcatttggcattcgttcgaatggcccttcaaaaagcaaaaaacaactttgcccaatcacctgaaattgaatgactccgtacgcatccgttgggtttggtgcggtgcatccgccaatagtccaacgggccctttcttcgtttgggcctttctccgctgagcggtccccgtcagtgccgcgacgaacgacaattgaagtggtaaagcgcgaaagtgccaattgcgaatgggaagcactgacacgtccgcaatggcaactgaaggcaatgaaatgctacaagagaaaggaaaagcaagggaaaagcaaaagccaagggaaaggaaaagctaaaggaaaggaaagcccaagggaacggccagcggaaggacggcacagaccgatcggagtgatcgccgacgggaatgaatttgatgcaatccctacgctgaaacactctttcaatccaagcgtaggaaggcggctgacggacccggcgttggaaaaggtcgcggtacttaacggcgtttgtctctctcaagtcgtcccgcccctcgcgactaacccccggcgacttttcttcgcactacgaatgtctctcccccgccgctcgccgtcgtttcgttcgtttctcttccaccgatcgttggttcccattgttgacttcggctgtgtttgattcctcccgaaatgctttttttgtgctgatggattggataaatggacgaagggattgaagcggcggaagccgccggcaaaatttggacaattccatcggaagacacagactgactccgagggcacaaattgacattcattcgatgcgtaaacgaatcaaatattcaataaaagtacagcggggaatgaatgattgatgggcaaaggaaggaaaatgtgaaaggggccatttgattgaaatggtaaggtttttggcggggggggggcgagtgattcatcgctactcaaagggcaaaaaacggagaattagcgcattttccgcctcccgtctttcccccccccctcccgcccaatcgcttcgtcaaaatttcgtcgtccaatgcctctactgctcattttcgtcccttagtctttccttatcaattgctcctttcccttctcattcattaacattttgttttcctcctctcaattttaccccatttctttgcttttgtatgtattcaattttagcaatgaacgacttggaaacagaaatgccagatttaagttccatttcggcgttagaaaacatttctttgttctaaggccagggtattttgcgcctattatgagtgtctttaaaattcaaaataatattttaaattcaaaaaataattaatctcattctcaaatttattattgtgagacaact

SEQ ID NO: 9982 - DNA, 1251 bp, Heterodera glycines
gcatgtcattacggtaaatggctgacagaatcacccaattgcaataaaacgattaattaattaactgagatggccaattggtacgcctctatcgctcgattaataacaaaccctccgtaatggaccacttttacaccaccgaacgactcgagcagcatctgatggcatcccaaggctatgtgatggagcgtaagagcctttgataaacggacagtttgagtttgacaacgaatgaaaggcttttccttttcagcggcgatgggctttttgggacggaatcaaatcgacccgaattgcacgtgcatacggcccttgtacagaatgtattccgaattcgcaagtgaattggcaattgtcaaattcccatgggttttacgccttggcattcgcagatgatcactttctgactgcctctgagcaggagaaggccattgcggagggactgctcggatatgtgcaccagcgcattttgggctattgcactaatgagccgggctgtggcgcgtatgtgccgttgtaccgctttttcagtgccgttaacaggggttgggtctttggcatttcatgggattcattcttttttagaacatttaatttatttaagaccatttttacacggcggatcaacaggtgtgaaacacgaaggaatggagtagtatcccatcatttatatgctcattaaggaaatgcattactataaaactcatgccgaactcacttacgcattcgaaaaaattgagtaagttttgcaacaaaaaaaggggggaaaggcaatgatcaaaaagctttgagtgattgtctgacccaatcaaaaggcattgatcattgatcggacccccctcaggtgctatgtgtggcaacacaattcctccgctagaggctgtcccgcggtgccattgctcggcgaaagggaacaaaggcgagacgtaaaaacggacgattttcggaggcagcgctaacctccaaaaacagagataaattgttaaaatctaagaagacaacttaatttattttttcctttatacggtattttccacttgaataaattttttttgtttaaattttgctattttcaaaagtcgcttaagcattaatcaaaaaaaaaaaaaagaatagcaaaactaaattattttacctaatttgtaagcactggcggaaaaatgaaacaaaaatgaaaacaacttcaaattgctctaaaaaataaatgtctttcgcggcgggcggatacaaattttgtaatacagtatgcaa

SEQ ID NO: 9983 - DNA, 1690 bp, Heterodera glycines
tttttgaatggagaaaaatgtgttttcttgagctggtagttggatttagtgcaattaaatgtttaaaggtttttaatgaaaaattgattgaacgcataaaaattttattggacgcataaaaaattgattggacgcataagagtcgattggacgcataaaagtcgattggacgcataaaagtcgattggacgcataaactgtacttgagccggaaatttttggaaatttcttttgaagttttgccaattaaaatgttttattttaaattgtaaatttatttttctatttactttctacttaatttttacttccaaataaaatttgaaatcataaaatttggtcattttgaacaaaatcttaaatttatcgctttttctttttgctaatcctaatattgtaattacttaaggtgcaaatgaccatttccatttttccgcgtatttgtccctcttttcctccttttctccggcattttccttcttcgtccgctaattcgctcgcttttcgtcgccacttttctctgaccggcccccgtcacagctttttcttcgattatttcactaaagttcgatttgaaagttataaaaaaggaaaagtcgctaaacgagtgaatccaaaggatttagcaccccaaggacatgccccctctccgcgactatttgccccgtccgacgtgggtaaaacatggcaatgaatttccgttgcgacagcttttaccaggacattatggttggttgtttgttgccatatcatcaaacgctgttgcggttaaattcttttccagatgatcccgagtggcaccccaaagaccgcggttacgccggttcaccgcgttttggcgacaaaatacccgaagacatgttcgtaaagatttactcaatttcaaacagaaatttcacccgaaaactgctggaataataataatgccatttgaattgaaccgttttcaagtggtagaaaatacggtttgactaattttgagggcaaaataagaccctaagaccgaagaatactttcttacaataaaacgaaactgcttattttctttgtctttttagcatgatatatcgtagaagtcccaccgaagaagaagtgccatttctccacaaggcaatgcacaaattgatgtccatggtattttggtgggttcattctttgtgtagagaaaacatttagcaactttttcgatgggctctcaaattgggaccgatttattccatgtcagtggtaaaaaagaaaaaagcgaattcaattggaggcacttttgaattaagtaatgcttagtatgttaatgctaacagattttataaatgctattgttagtctgcttcaaaatttaagcatatggaaatgtgagcttttttattggcacggaatggcagcaacaattatttaattgctgaccaaatcgctcaatatttacctcaaaaattcgtattttacgcatccccccagcgttgcttcttccagttactaattgttcaggtattgggttttctacacaatctattggcatcatcaagagcagtttacggtgagagcagggacggtttctacaaataaattttcttgatttcaaggagatttcgcaaaattttttgggaaagtttgggtgcggtagttttgaaggcggtaccaacaaggaaaaccgaacatcttcagcaaaaaaaaaactttattttttccttaa

SEQ ID NO: 9984 - DNA, 2255 bp, Heterodera glycines
ccccccccccctggccgtccctgggtgagacttcggttttcggttgtttgcccctcccaaaaaaaattctggttacggacctgtcccctccccttctgttggaaaaactttaaaagcttatttttataccgttaaatggattccattttaggaagtgcctaaagtttctacgcacacaaaagaacgaaaaagcttattccatttggttttgagatttttactagatttatggtgttttatttctaaaattggttacttttttccaatttttgtggttacgaatattttatatttgcgcattttcatataaaacatgcaattcttttcagggtgaatggtacttcccgtaccattacgaatggacggacgaggagctcggcgttccgcccgacgacgcgcctgacccggaggaacgccaattctggggccatccgggcgaactgatcggcacttaccgcgcatagaaagagccgtttacattaggagtcttcattaatgacgagttgatcgaaagcaaataaattgtttcggataggcccttttgcttttggcagtccgtaattttgtaaaaaaggagaaaaatggacattgttacgataaagttggatgtactttccgtttagtcatttccgtttgttcggtccttcgatttctgtcttcgttaaattgttaaccccataaatgttaactatttcaatactccgttcatttctttttgacgatcccccaggggtgtgccgagtttcgtgtcgtccgttttcggatttaaatttttaaaggaactatgtaacaataaaaaatgaaattcagaaaaatattgctccaagattgaaaaatcatagaaaccttaaaaaatttactcgatgttcaatttttccccggattcgcttattggcaccgaataatggcctggaccacctggatccaggacaaattcaggtccaagatgaattctataaattagacaaacaaaatagtttgttttcgtttcgtacgaaaatggttattttttcgttttcgtgtgccgtattcgtccaacaaaaagattttcttttttgagtttgcactttttgctgatccccttgggaagaggggcgattttggtcgcttgcttttcctctggggcatttctctccgtgggattaagcgtttgttctttgggttgcccttctctgttttctcctctcctcccacgctttgttttgtttacattcggttcctttggccaaatgtctcggctttgagtgtctctccgtgcgcattccttcgtcgattagcactctccgccgggggttgcataattttgtcttttatcggctgcggagcggaattttggcaatgcgcggaatttgcgcgccatggccgccacgcgatttggccgaagtgctcaaaattcttagggcgagtcctttggtcggccaacaagcgaaattctgatcagttgggacacgctaatcgacggattaattaaataattaatggacgagtgaaaaggatgaaaagaattctgacaatgaaaaggcatttgcatatttttgtttgccattgccttgcccgactctcattccttcggttttttgttcctttgcctttgctttccatgggttaattgccccgggtgttcgtcgtccttcgcgccgtcttttggcggtcgtcggctgcaaagtgcgcgtcccctccttcgccccccccccgccccctccccggggcactttttgtgcgtcgtttgccttttcataattaccctttggagatgagcacccacccgccctcctctttttcccattttcggctaatcaatcgcttttcgctgcttttctttacccccccccctccattctcatattttttgttctgtctctgctaatgaacgatcctttgggaatgaatatgaataaataattcatttttgtgccaatttctctgaattgaatgccgtcataaggcggcattgtttttggccaaatttgcaattcaatttggccacgctcatctcataattagccttcagcccttaaattcactttctcgtcaatggtttctcccctttaaaattcaatggatttttgggttatgtatcaaccgatcaaaggtattaatttcaattattcattctaattaaaaatccaaacaatttaattagaaagttttttggtggtaatttgttgttcggtaaggcgccgtgaaaattggcattccgagacgaaaaaattaaaagaaaaaaataattatcgagaatatcaaaatgacagtga

SEQ ID NO: 9985 - DNA, 3512 bp, Heterodera glycines
cctgttctgtgtgcgcatcccagcataaacaacattacggactttttgagcactgggcagcttggtgaagttgcaacgacaacaacaacaacaaccgcacttccgacaactgcggaggtgtcggcggcggcggcagaatgcgcacctccgcccgcgcatttgaccgcgtggatcgcggtgtgcacagcgctggtggcgcttttggtggttgcggaggtctgttaatttgagcatttaatcaatattccgttaaactcctatttctcaattaagcttgtgcgcgccgggttcaagttgcgccaatttttgaaggaccgcgccttcaaaaaagggattatgcgccgccatcgccagcgtgagtttctcactattaaatttttagcaaattaaatacaggaatgagcgccgcaaggcgcaaccgtcaaccggtgagcgcgccgactccgcttattttgccggcaatgttggccggagtttcgcttcgcccgacgggcgtcaatttgacggtggaccgggtaggaaattttaattaaaatctttatatattttaatttctcactcattaaaattacaatttaaatttaaaggcagaggggcagcgccgcgcggatggtacggacgaagagcccgtgtacgatgaggtgccgcttgacaccgtggaacaaaggcgtgatgaagaaaatggggaggaggatgaggaagaagatgacagtgatttttagtgaatcggcaagcgatcactcaccatttaaccaatcgatcgatttttcactttaaaataaaattttaaaaatgtttgaaaataggatcgctctacaaataaaataggaattcacaaaaataggtacaatcatcaaataaaatttgaaatatggaattagaagcatttaaagaatgtgggtgggcgctcgcgctatataaataactgcgcgtgtccccgtcggcccatttcactctgttcaatttttcaatgacgatcagcagcatgtcggataaaaaagcactgttcaagcgcgttatcgctgaggttgacctcactataagcacgggaggcataactttgagtgggccccgtctgtctgttccccgtttcattccgtttgaggaaaatgggcgttgccgcgcatgtaaaggaactgaggctgaggtggacacaatggtcaccaaggagggaatcaccttatggtgtacacggattgaaaaggcccagtttgtcccttttgacattgtctacgagcttcccggccattgtttctttcgcgtgaagaataaggcaagggtgttcagtgttccatacagcgaactgccgtcctcagacaagtgcgcccagtctctaccaccaccagtaaaacatcaacggacaccggacgacgaggaggagaagaatttgagacgtaaggcaaaggtggcgcttgacttagtggaagctggtctagcggcagacgcaatgatgcaggatgggacgcgttggaagaaagccaaaaccgcgatcaatgtgctggccaatttgcttttggcggaatcattaacagatgtctcaccaacttttgatcaacaacaacaacaacaacaacaacagctatcgtcaaaagaggaggagaaggaggaatgcataaacaacagcagtgctggagcagcaaccgaatctgctcccgatggtgatgtaatggacgatttcgtcaatagtattcaagcggcgacaagcaatatgcaatagcaaaaaagcgcaaaactcgctctgacctatatataaaagctgattgaccaattttattctccataaatattttcaagctctaactttataaaaaatgttaaattctcaaccgttcagtaataaagacatttgtttcaaattgccttgcggtataattatttccgggccatcctcatcgggcaaaacggaattcctactaaaatttattgctgagtgcaatgaactgatcgcacctagtcctatttctattctgtactgttttggtgagatgaattcggcggttccgccactgcaaaaggcgggagttgaggtgtattcgggcgtgccctcggaggagctgattaggcgccttcccaaaccgatgctgctcattctcgatgatctgatgttgtcaatagaggagcgctatctgtccgatttgttcaccaaaaaatcgcatcaccatcagtttgcggttgtgttcatcactcagaatttgtttgagcggaagatcaaggtggctcgcctttcggcgcagtatttggtgctaatgcgcgcgcccaactcactgctgtccattcgaaatattggagttcagctttttccgcgtcaactcgattttttccttgacgcctaccgcaaggcgaccgcccgcccctatggctatttgctaatcgatatgcacgcatcatctgatccagcgcttcgcctccgcaccaacatatttaaagaggagcaggaggaggacgagggaacagttgtgttcatccccaaaaatggagcggtataaacggcaacaacaacaacaacaacaagctaaagttagtcaactaataaaagaaaatgccaactggctttgcgcactgtcgaaagcaaaatgtgtgaaacgatgcgggagactgatcagaaaggcgaacactgatcagctgctgtcactggtggaagtgtgcttgaacattgttgcttcccgattccgactgacaactcggcagaagaaacgactaatgccctacgtggacacggtgcgccgcgtgagcagagcgaggagcgagaggggcgctaagcgagcgcttgtcatccagaaaggagaggggtttggcggactatttgcagccctcttaacacccgtcttaattgaattggcaaatcggttgtgacccgaaacacataaataccctcgtaaaattgtctcacacgcattcattcattaataaaaatggcaaaaaattcattctcgtaccacaagaaatttatcggggtctcacctctgtctcgcagacgggagacctcaatttggacgcggttcgccacgacctggaccgggccaggggtggacggacaacaacaaatccttcggcgaaaaatgtcaattataaccagcagctccggcgttatttacagatgagaaaggaacatgcggacagaccaactaaagttgagctgaccaagggaataagggtactgatgaatagaggtggcgaagaaggcgaggttgttgataccccacgccgtcttctcgctcctccagcacctcctccgccgcctggaagacctcctcgtcgtccaccgcccagtcctccgggtcccgggggtccttcgccaccaacaagtcccccacctcgtccacaacgctcctcgagaccgagcaggacttctcggagaagtggtcgtatggagcaatggaggaaaaggcgatacgatatacaacagcaacggcagccgccgccgctggtagtgcgagacctcctcgcataagctactgctgcgccactgtccgaaagtgacagatgatgatgatgatgatgaatatatgcta

SEQ ID NO: 9986 - DNA, 1772 bp, Heterodera glycines
  unsure (1)..(1772): unsure at all n locations
cacctttttgaggatgaaaacccatttccaaaagtcattgaaattgtcccacttgaattgtgtgccgaggtctgttcacaaattccttgctaattcttcgcgcttgtgccaatgcgtcggcttccatctgtgccttttgcgggagtgaaatgtcaccgaccaattgggcacaaaacagccgcgcctgcatttccgaaatgggcataatggagccggtgggttggatgaggccaatgatggccaaagtgttctgaactcaacaagccgtacttgtgctgccgtattctcaatcagtgctttttttgtcttttccatcaaaaaattagctaaaaattgccttaggcgataagtcgtgcggaaacatcaatttgtacaaaagtgttttgttgtcctgcacagaaatcaatctgccattctccagctgaggaaagaaaaagttgtagccggtggcgaagattactgtatccacaccgtacacagtcgtaccatcgtcaaaagtctgaaactttgtttggtcatccaaaactacaaaatggtgtccccggggggtcgtattttgttttttgttgggttcgatttgtctgccgaagttcgtcccgtcggtcccttccgtttctcaccacgtccttctccgccaacttctgaatgttcggcttcatcaccaccgttccgctcgcgattcgattgggcagttcgtcgttcactgtgacgtgcgcctccaaaaagcgatgcgacgggcgaaggccgtaccgttcgtggtcaaagcgaaggttcaacttgcgctctatcaatctgaaggccgaggggaaggaactgtgaagtgcccgccccggcccaattaatgccatcctttgcctgttttggacgctgcgcggagtgatcgcccgcagggcaaatgcgaatcggttgagcagtaccgcgtcagtggggtggcccttctcccacactctgttgatcacccacgagccggtccgggtcgacaaatacacctttagggacacaattcgaccgatcttaatccatgggcccacctttttggcaactttgctcagttccaccgcaatatcgcccccggactgaaagtatgttaattagtccattgaatttattcattatatccgggaaatttacattgccaatgcccaccaccacaacagtttggtcttcgaatggttttgcggtgtgaaaggcgcgcgagtgaatgacttggccacggaagacagactgcccggggaaaggggggtttggccaccgttcggagcagtgatggccagtgcaaagcatgacgccgtctgaatcagttgcgaaaaagtaaaaatgccatgaaatccgaaacgtttaaaaaaagtgccggtgccttcgcccctaccgaaagtgtcgtccatcactttttgctcctcgtcctccgtcttccgataagtgactgtccatttgccattctgtgcaaattcctccacccgttgcacatttaacacttccgtttgaaattgaatgtgttttaaaagcccaaaatgggcggaatataagcgcaaataattgagcatttcccttcacaaaatgagagaaatggcaaattaattaattagagctcttttccaacggtttccacctgttgtgcatgtaattagctgcttctcgtgacggtggaaaatcactgtacgccgacatttctttggacgaattgatcaccgttgactgaccaggggaagggaaatgttttgggaaanaagtaatgcctttgccaaatcctccacttttagggcatcatatac

SEQ ID NO: 9987 - DNA, 3980 bp, Heterodera glycines
tcgctcccatctctcttcttcctccatccctctcgtgacccttcacctctctcttccttttctctccctcccctctctcttccccttctctccctcccctttctccctcccctctctcccttccccctctctcttcctcttttcttccccctttccctcccccccctcactttcatcactgtcccttctccttgtcccggattttccttgtagcgccacagccctccaatatccaacgacttttccatgcacaccgcgtccaagccgtattccaacgccgttttcagcgccggaaggcccgaagcgccagcaccaatgatcagaattttcattggatggaaagggcaaagaaatcactggcaaagggacagaagtgatttttgttgaaaatatcagagatatttaagagttaattttgcatttatatttttattttttgtattttgttgcgtaattttatgaaattttttttcttggcaattgaaaattataaaaagaatattaagccccaaaaatagaaatataaaagtcggaaatagcttttcattcttccatcattttatttggtccaattcagcggaaagccgaggcaattagcagcaccgttaaggaaacaacaacaagttattaattagttaattaatgtacataggcaaaaaagggatgacaaatggacgaccgatggatggaaatgatcgattgaaattgcaatggaattgaaaggaggggaattatcattatcatatcaaaacagcaaaagtatggccaaaacatcgcaaagagcgaaaaaacggcggcgattggtcaaatgggccaagacaaaaaaagtaatttgaaaaggcagcgccattaaaaatgaacaaaaaataaaaaagaaaaaacggacaatgcaaaaaaaagagtaaaatttgacaaaaaaaaataatggaaaatgaaaaagagagaagagaattgcgaagtttgtgcattgttatttatttccaataggtaattaattagtgagaagcgtggtttggtttgagtgaaggcaatgcgcgaaacgaatggccgtttccgtcccaatcatttcaatttggggacggaggaaagggccgaaaaaaaaataaaataaccaccgaaaaatgacaaattaacgacagaaaaaggaaaatgaaaagagaaatgggaaaacgagaagaaccgaagaagaagaaacactttgaaactgacaatttgaaatggaaaagaattgaaatgattggctgaataaaaagcaatgctttcgcttttttcccattgtttcgctttgcttttatttaatccctttaatctttgccccccccccctttcatccgtcgccgctcatcgctttatcttcgaccgattcgccacagaaattgagaaaattgagcaaagtttccaccgaagtcgcacagtgacaacaaacactttgcccatcaaatgtaaaaatattacacagttcttcgatttgcgccttttcatttaatgacggctaattgttgagatggtaaaaacgaaatgaaaaagtgagcggaaaagacaaaagacacttctcaaggggggattaattatgccaaaatgacctttgggatgtcatattccattgattccctttcgcatcacttcatttggcattttttgatcaacgattagatggttcaattaattcttggcctcctttgaccagtgaatattcgttagccctttgatttatcgccccgggcaaatcttcggcggggattggcccctcgggcaaaagcaaaatattttcttcggccaaatgacaaaaaaagaacacacgacagctgctgttggttgaataagggcgaaaacggtggcaaaatgtctctgaaaataacgggacacaaataaaagaaagtgggcacagtcttagctttgctttactttgctttgcttctgtcaggcaattgtatatttatttgttttctcttcctttaaattggccattttccgttcctttggccttttctctcctccgtccctttgaatatgtttctccgtttgctgctggttcatctgctgttcgtcctggtccgtcctcaattcgaccatggcgattccttcagtttttcgaattcggtggaatacgaagaagcgaatgaatcggacgaaatcaccgaccctttgcccgggctcagcttcgaactgaacttcaagcacttttctggccagtctttggcaccgttttccaataattggccctcttaaggctttctgcaagtgtcccccacccatttcctccattattggttcgtcacctcccaaaaagactcatccaaagacccattggtgatgaacagaagcaaatgaagccgtaatttggttggagctgtccttttgaaggtgttttggttcaacggtgggcccggctgttcttcgctggacggactcgtcaacgaaatgggcccttatttggtgaacccggatggacaaacgctgcgagagaatcccttctcctggaacaaatttgcatcggcgagtgctttgaactgttggaactgatcaccgtgccattctgtctctgtgttggttcagatggtttacatcgaagcgccagcgggggtcggcttttcctacgccaccgacggaaacacaacaacaaacgacgacttggtcgggttgaaggggtcggcagaccaatcaaataaacacatcatctgaagtcgggaggggagggaatccacgaagtcgagaaatgagtgactgctccgactccctttggttggccaatgctatgccaatcattctttcttggcacaatttgtcataaaatttgcctattaggccaatcgactgattctctgatcattttatccctttttaatcagacttcgctcgaaaattacgaggccatcaaacagttcttcgccaaacacccgtctttccgtaatcactccgtttttatcaccggcgaatcgtacggcggcgtttatgtgccgacgctaaccgcgcgaattgtggacggacaagcggaattccccataaatttgaaggtcgatccttttattaattgagcaatgcgttggcatttcctttagggaatggccatcggaaatgggtatatgaacgcgaatttgaacattgacacttccgctcggtttgcttatggccacggaataattggtaattggagagacggacaattggaacaaaatgccaaattggaaaacagatgagaaaatatggaacgaattggagcagcggtgctgtagaggatgcattggtgggcaatttggccaattaatggggagggaggggagagagtggcccatttgtgataattaaaatggaatggaattctctaattccccaccccccaaaaaaaaagatggctgtgatttgacggcgttgaaagactcttgcgaacggatggtcgggtcttttcctaaaaaggcattctttcgtttttcttttaggtggacgacattttcgaattcctttggcacggcggattgaatccctacgatttgttcgtccattaattgcccaattagcccggcccggcggcttttcctttggctctcctctccctttgaaggtaccgcgattgcgacccgagcccgggccgaaattccatccgcatggaagtgctcaaaaatgggctcgtccctccgaaaatgcttcgccgtttcttttccaatgtgacacgaaacttccgccggcgtctgcaagtattcgtgtcgattacaaccatttcaatacgtaccattcacttgaaaggataccgtacaaggagcacaaaacgttggcacaccgtccgtgccatgtttaaacggtaaaacgattgaaaaaagaattaaaatggtatttgaatgccttttagatacggatttgaccacatatatgaatcttcccgaaggttccgcacaataaaccaacaataataccaaatttattaagtgcgaaaggcactaaacattccggacagtgtgggacatgggacatttgcaggttggcat

SEQ ID NO: 9988 - DNA, 1627 bp, Heterodera glycines
  unsure (1)..(1627): unsure at all n locations
gcagggtgagcagagaatgcaattagggcaattaaaatgccaccgaaatgacatttccaaagaattaattcgattttatnggaataataactcattnnaagagaaacaaaattaattttattgcaaatattacacgtttgcacgtgaaaagtgaaattttctttttcagcatccttctgtcacattgttacaaaagtttgataaagtgaaacatttggaagtgccncaattaacgttcaaatttgcgaatttaaaaattaatttagaaattgtcacaatgccaatcagtaaaacgttgccttgtggaaattataatcatgaacaatttgcaaaattaaaaaatgaaattgtcaatgaaattaaagaaaaatttgtaaaaaattctcaatttgaagaaagcgaaaggaaatgtttcgaagaattaaaatcaaaacttaaagtgttagcaggtaaataaacaacaattaacgaaaaatgatagaattaaatcacttaaattcacagattattcattttatgcaaaaattgagggggaatatttaattgggaattggacggacgaaaaggaaaaggaaaaggaaaaggaagggccaaaaaaggtggacaaattccggcaaattctcgcctatttggaattgtgggcaaaaagtaatgaattcattaataattaattgagtattagagaaaaggtattatttaaatacatatttagacaaccaaattttggacgatttgatgggatttttgaacacgaaaatgcttttgacaatgctaaccaaaatattccttttgtacccaaatgggtcaatgccttttttggtcgagaaattcttcttgacttattccacctggtgagcaattattgttaattggcatcattagcgtttattactttcaaggaattggcctttgcccgtccaattagccgaaataaattatgaaagggacggcggatttttgagttggtcgccctttcgggaatggttcataaaacggcagacgacgcacgcacatttgcgcacgacaatttgccaacaactcacaatgccaataattacgccaacattcccggaacaaaacgttggcgccaatttgaacggggcaacggccaaagtcattttgaacgaactgagaattggtaaaatattaaatgagatttaggttaattatcttgatttgtcttaaaagctttatttttttagcttttgatcagataaaaaccgttaataaaaacaggacgaaaattattttgccgctgaagggaaaacaatttatagaaaaggtattaatttaattttttttatgtaaacaatattaataattattatttcaaatattaaattatatttttatttaattaattttaatttcccctttttctttccttttctccatttatttctctcattatctaattaatttctttctctcagttctcccatttccttttggtcgtttgttccgccccccaaattaacattaatcgtttccaaatgtttgtgatgcaacgcattggcgtcgaattggccaattttgtgctgtcttcgccccctttggccaaacgcgtgcatttgctgcacgtcaatccgacggagtgcaaaacgaagcaatcgctttgacacttcgg

SEQ ID NO: 9989 - DNA, 2598 bp, Heterodera glycines
  unsure (1)..(2598): unsure at all n locations
tgttggctttgtctgaaagtgcattcattgatcaaaataactgtntaaaaggagttcatctcccctttttgccacttttttccccatttccattctttttgatgttttgccgctttcccctccctttttccttcgcctgcccccttttgtttctgctgctctcttcaaatttggtgcttcgtgttggcggtaagattaacaaatgaatgatttggcaaatttcaaatgaaattcaaaaagcatgaaatattttcaatggtttttttggtccattaggtgtctttaaactgttggatagacaagcaaaacttgtgaacaaccctaagcatggtgtggtgtaccttttccaatttccgagaacatcgacaacgccaagccaagcgccgtacaatttgatggtcgagacttggctgcactggaagaaaatcccattccatgtaacacttttgtttgaatgagaatggttcggctgattgattcactccgaccaaataatattttgataaatttgccttcactttggtcatccccccccccaattcccttcacagcgaatcagcaaccaattgttcctcggctcccactcaaaaggtacggcaccgtttgcctatttcaatggcaaatacattgacggatcgaaagaaatcatcgaaacggttggcaaatataagccggttgtagatgaaaagaagttgatggacaagattctcgagatgttcaagtgggtttcatggcattttcaaaacaattctttcgttttacttaataaggtaaatttgtcacaattacagtattttgatggtcgatcgtgcggctggcttagaatggatggcccaagatgaagcacttgtggagatcattgtgccacaaatgctcacagatgaacggcttaaagcgcagcttgaagccgtcaagagtaaatacagtatgaaggtgtacgaaaacttctggagacgatattttgacgcgttcaacggaggaaaagaaaaagagcaatttgtgaaggattttttgaaggaggtgaacacagaaattgacgcattttgaccattcactatttgtctgttctcaggaaacggaatcgaatttgacggatgaagagcgatggaccgatttcagtgagtcgcttcgcaaagtgataaatggcacaatggaagtggtactaacggagaaggtgaacggaaaaccgaacagttccaatcagacgggaaacagtcaagcgaaggtaaacggacagaaagaaaggcataattaacagccaaaaaatgcttaaggcattttgcctatcaaaaagttttgctttctttttctcttaattaaaaagtcagccgaaaaatcaaaaattaatatgcgcaaatccgttaataaaatcaagccaaattttccataatttttctggcgtcggctctctctctctctctatttctctctctctttctctctccctctctctctatatttctctctctctctttctctctccctctctctctatatttctctctctctctctctctctttccttttctctcccccctttctctctctctttctccttctctctctctccctctctttctctctctatttctctctctctttctctctccctctctctctatatttctctctctctctctctttccttttctctccccctttctctctctctctccttctctcctccttctctctctccctccctctctctccctctattttaattggatattttgtaaataagtgaagtgaaatttgatgtaaaatttattaattttttaattttaatttcattttatttatttttttccttatttgatgaaaaacaatagataggtggttaatatttataatatttcgctagagaaagtagcaaaaacttagaaaaaattttttgaaatttttgcgggaacggggaggagaatgcgaaaaatgggatttttcttcgacttttggttggggattcaaggaaggtgtcaaggcttttcagagtgtttatttatttccaaattaaataaaagaaaaaaaagggacacaaacaatatttggagaaaacgacttcatcaaattaatacaattaaaattcgaatgaatgaaaaggtgggaaaaaacggtcacaaataaattaacataatgccacacaattataaaaataaaaacaagagtcaaaaagtccaacagaaagggtttcccgcctcgcacaatttttgagtaaactgagaattttttgagcttttaaaaatgaaatagcaggcaggccccagggggaagcgggggtgggggaattccccctccctaaatgaaaattaaagttttttttatgaaaaattgcaatttttgattactattttattaacaaattcctttaaaatttgcttgactttccccggcgatctctaatggcaccgccggacgcccatcctactatatttcttgaaaatttaactccaaaacgaaaaaaattggtcacgtttcagcgaaaaacggcacaaaatttctactttttctctccggcgctgaaattttcgtacattaacattggagaaaagttttagcctgaaaaaaagaatctcttcagatcccctctccgaaattttt

SEQ ID NO: 9990 - DNA, 1984 bp, Heterodera glycines
agtagggatgtgcgagagtctcggttctcggttcccgactcgggaaatttctcgggtttttcgcttcccggtctcgggtttttagtctcggaaaacgataaatttttacactgttaaggatgatcctttcggggagtgggtcgccggtaaagggagaaacgaggaaaaattattgaaatttttaataagttttcttaacaaaactctttaaaaatcccaaaaaaaatttccggcggtgcctatcggcgccgccggcccataaattcccctaagatttcaaaatttgaatataaaagttaaaaatctatctttttttgttgataaaatcagcaaaatattatcatttttatttttggaattttatgcaatttcgtaacaaatgtcattaaaattttcaaaaattttcccgtcggggcctaacggcaccaccggaccccgattttattatatttttgaaaaatggagaccaaaatggcaaaaaatagtaattttttggtgaaaaaccgtttctcggggtcatttctcggtctcgtttctcggttcccggtaaaaatcacttctcgcacatccctaactgttagcccttatccaaattatttttctacaatttcaagtcatttgaaagaaaatggagtaatttcaaacaaaagtcattggtatttttcagcccgacgctgcccttttcggcattttgacccaattcttcgagacgccattgaacgtctttaaagggttttctaaaaaagaaggtccactttatgaattcactaaagaggtcaaaaaaactctgggttttgctgataacagcaaatgggaggcgctcacgaaaaggccgtggcaactgaacttcgacactgaatttatttttggattcaccggtgatgactcatcaaaatacaacggtaggcggggaatacggtaaagcatgcgtgtgaattttaatgtaaataaaaataaatattgtaaaattcttttaaagcatagagaaataattgcacttcccggcttaaaggtccctataaacttgaattgtttaacggtttggaaacaattgaccagtgcatttcgtccgataattcttctgtcgtcttttcggacacttgcaaagcacagtatccgcctgaggttgtcgagtcagcgaaagcgttgctgcacattgtaaatgaacagagaaactcatcatcaaaagcaagttagagtaacgggaaagcgattaaccaaggatgaagcccaattcgaactgcccgaccctttcaaaaatagtcataatttttctcaaattattcatatcttcgatatgtgttgggccgtttcataaaaattgccaacgtaggagtttcaataattcgcaacgttcgttcaattaattaaaattggtttttaaatttttttcaaacaattattttaatattcataactcttgacttcgccccaattggctgattttatgaaacgatttagcacctcttcgatagcgcccatcataaaattggtgtacgaaagtttcgtcagtgaatcttatgaattgtaaaaaatacaaatttgagaatgaaaaactattcaaatcaattcggaaaaatactttagaaaatttgtaaattatttatttgattccctcgaccctgccgggcgcacccgtacttttaaagcaaaaaaaagatcaaaaataataaactaaaagacagttttaaattggtttcgtgaagaaatatcaggtaccttcaaagattctgaattagcacgcaaaatttcaaaattagaccaagttttatttgaaaatatttgaaactggcaacatattcatctttttatgcaagtgtataatatagaacctcaagtgctaacaaatgctatgcctatttggttgattttgagaatagttatgatggtttttcgagaaaaaaaacaataggggcggagctgtgtgaattgtttcccccccccccctttacgaaattaaggcggggtgggggggggggggtca

SEQ ID NO: 9991 - DNA, 1738 bp, Heterodera glycines
ggcagtcagcgcaagtccggagaaggcaacggagttggccaaccggcccgatctgaccaatgagtactgatcagctaatcatgagcaatgactgatcagtatcgatcgactgaccggccgatcatcgattgagtgctcttagattctgtctttcctttcctaagttttcctttgcttgtttttttccatttcattagatagtctttcttttcattcaaactgcgtccattgtgaatgttttccaatggataaaagggtggatctgtcattgatgagcttatgtgtcaattgcttaattatagtaatttataatatgaaaccctttcttaacagggccaatgctttttagtttataattgcctcggccttaattatgttcgcggtttgtctccctatgcacgaaaagtgtgccgcagtggaggcagtccgccaattggtttgcctctcctcagtgccaaattcaattggccattcggctcttggccaaactcagtctcttcctccttttggcattccgcggctccattgttttggccgatgcctttcctttggctgtttttcagctccatcttctgctgttcctctcttcgatcatctgttcgactttgagccgtggacggcggcgtgtgactcatttcagtgatcaccgattgattgctaggggcctgtaatttgtgattgaaaattaatgattgtttgttaaataattgccaatgtttgcctggggcacttctcgctgattaacatttaacgacgactgatagcgcatttgtacgggcgattttgcccgagggtttgccgagccggcgtgtcgctcgcgttcatcggactgagaaacggtcggcggcccaatcggacgcgtgcgacaaatggaaaagcctaattaatctctttattatgaaaatcaaaattgataattttaccagtttcggccgagcgcttcacaaactctgcgcatcgcaattcggccttctgttgtattgaaattaggagagatttaagttttataaaataaaaaaaaaaaaatcgtaaatggtgaaaaaagaatgcattaaaaagtgattaccactaataagctgatccaaagaaaaagcccaaaaaggaaagcaattaggatcagatgaccgaccaaactcaatgcgccgggcttagcgaaaacaccgattaagcaaataatcaccagccaaacagcaaaagcgcaaaaaactctaaaaatatgaataatataaattattactattatttatttttattatttaaatttatttaaaaatgcgaaattcattgagtttattatcaaatattatcatgaaatggttcaataatggtggtgaactaaacatgaacttaacttgctgcaatgtgtgggatcagcagctgccagcgctgtctgcgaattccatagaaaagcagcaaaatggtcaccatttggaggaaagtccagcccagccacaacattctcaagctgcacatcgcattgtgcagcagcagcagacagctgaaacgaacgcatttatttgcttctttttaattgcaattttttctctcttttttgtgtccaataatttatttgtgttagaatttttgcgtgttaaaaatgcctcaaaataagtaataaaaattgagaaatattcaaaattctctttttttcaaatcaattaaaagtagagatcggaccggtcgaatcgaccgacttttttgacaaatcagttgggcatttttttacaaaatcattaaa

SEQ ID NO: 9992 - DNA, 3266 bp, Heterodera glycines
  unsure (1)..(3266): unsure at all n locations
attttgttttgtgtaattttgttagttcgttgttttatgtaatttggagaataatttggatatgtgctgtgctgtgcagatttgagttttaatattaattgacggagttggatatttggcgacaaataaccattggtcaaagtcttaaatattaattgtccctattcttccgacctaattaaaagactgtccccgtgtttccctgtctaattaactacaagcaattaaagcagcggaggaaagttactatttgccaaagggngcgccnnatcagaaactgctcgtgcggaacctaaatttgtattaagtttatcaatgacaagtgacaaaagtaccaggattgcccaagggttgctggccataatttggtgccaaagcagatgcacggaagtcggtggacgtgcggcaaaattagtgcctacaatttgtaatagatttatcacggataagataaagtgataaagtaccaggaagacggccgaattgatgttggccataattaaggccgttattgggattagctgccaattgctgtgccggaacagaagcgacggtaaccgaaggagctgcgccaaaatgaagaccaaagggttgttggccataattagtgccgtaattgggtgccaaaggctgggctggagcaaaggctgtagaagttggtggacgtgctgcaaaatgaaggcctgcattagcacttcatttatcactgataagagcaagtgataaaagtaccagaaggatggccgaaagcgtattggccataattaatgccgtaattgggtgccaaaggctgtgccaaagctgaagctgcggcagttggtggacgtacggcaagcatatttgctggaattttttacgtttattgataagattaatgaaaaggaccgaccagaagaatggctgataaggcaaaatttgtgccgtgattcggtgccaaaggctgtgccagagcagaagctgcggaaaacgggtgaccgcagcaaaacaactgtctgtaaattcatttaaatgccattttggtgaattgaaatgagtctttttaaatttgttccgatttatttggactttttttcatttcatcaaaatttaatggcaattttattattttaaaaattatcttttcgagtttaagttaaaaataataacaaaaataccataattcagtaattttaataggtatagtattaacgcctgtaatttaagaaatggtagttcatcctaactcttgctatttgcaatttttagtgttttttgccgatttttgtgccgaaaaatgtcattcctacttatcacttggataagatgaaagcaattactcaatccgtaattatatgcgtttatgtctccttgtaacttttaaattcgtcaaaagttttgggaattttgtgggccccgtccactccatccctaattagcatgtacatgtaatataaatattaaaataactttttatttcgactgatgggattcagtgactgtgagaaaaacccgtaaaatgtgaaaatgacaaatgaacacaaatcaaaaagcataattgagtagaaagtaaagtacaaaatcctaagatgacatacatatgtaaaacatttggaattttaaatctgctggaaatcgttggcactttttttgtctattttgaattcgttacaattgccaatgtttcggtaccaaaaaaatagtgtaaattgtccaaatgcttcgtgccacaaaagtgtgatgaagcatgtaaaaacaaagtttgtgaggggaggggcacttcgattcaataaaaaataaaagtgaaaagcattttgaaacggcgtgccattgctcgcattgttccattctctgatcacagtgtcccaaaaaatgccatttcaaatgtttttttccgttgccagtgccaccatttcgcccccgtttatacgttgtgagtttggcacagcgtttgtggtggtcgattctgtggaggatagcttcaaaatgttcagcagatgagacgcctcgtcggtggacggtgtccgaagactggacgattttctgtgaggaaatgccaaattagggagggcggagagtaatgttttggtaccgagaatcgaggctcgaatgagccaaaatgctcatcattagagaccgacttttgaggcatatgcctttttttctgcgcacttgtttcgatatattaagcataaataacgcattttccacttggtttgaggctcctacgttgactttttatgcttttttttgcctttttcgggatttccgtgccttaaatgccttttttggcatttttcctttttgatgccttttttggcgttttttccgaaaaattccataaaaaatgcaataaaatcgggaaaacacacccataagaaatgacgtgaaaatttttcagaaaatacacccctaagaattaaaaaattttctcaaaaattgatcgccaaaatttcattttttttttcttgataaaaaagttaaggtttaaattttcatattctaaaaacattataaaatatttattaatcatttaaataaccaacattaaattatttggttaagttttacctgttttgctccctaaaaatccttaataaaaaaattttaaatgccttttttcatgcctttttttcaattttttcgtgccttttatagtgcctttttcgcgatttttgctgcctttttagtcggtctctagtcatcatttaatggacacgaggaattagtaaaaaaaattggggaggcgagtttttaaaattgaccatgagaccagggtgccatcgccaaaactaaaaaagcgggcacaacaaattcaaaatccggcataattttaaaaactcaacaaatgccggttgctgtacctctgcctgagactcgagaccgaaaatagcccggcttgcccccgagacggggcggagtcgttatttaaaaaacatcataaatttttacgaaaaattatatataaaacaactaaatttttatttctgaatatcattcgatagccctaagtcttctctatcagtctgtaaaatttcaaaaattttattaagtttcaaaaaagttatgaccaaaagaattcaaaaacctcgtttttcaaaatttttggctataacttttttttaaattaataaaaatgtttgaaaaattgcaagctaataaagaacacttagttctatcgaattataccaattggttgcttttgagcaaagttataagcaaaattatttattttgatggttttttaaataacgcttataatgatggtttttaaataacaacatagcacc

SEQ ID NO: 9993 - DNA, 1212 bp, Heterodera glycines
ccatctgatatgtagacaaaatatgaaatttctccaatataatcattaacctaccgtaacccaggggtgcactttgatctaaaattaattgaaaataattcttaaaattataattgaaagcggttaagaaattttctaaggcataagcactcatttcgggtcggtcacaatttggctcacggaatcttttggcatcaaaatttaaaacgtcacaattttttttcttcgacaattaaattattatttttttctcggaatcattcggtaggtctaattacctaaactatatcaattaacagctgtaggctaatgaaatttgttaggcgctcagataaaatcaattaatttaatttggatggtaaataaacaatttttagcatttaacgccaaaatggcccgtctcccgcccattctgattgatgtgccgaggaaattttaacgaattttcatataaaaattgcaaaaaacaaaaaaaaattctggggctagtgctgtaaaatggctgtggcatttcacctgagtgatgtcgaagcgcaagccagggtctttcattagcattctgtgaaaaaatgtgaccccatttttggcattttaaactttttttgcttacccgagaattaattctttgagctgttcactgatttcggcactttccgagaacacaatttcctgtgttttgatctttttgtgcaatgcttaaatgataagcataaaaatatgccccatttttggcttttttgctttaccgatcacatatttatcccaaaatgggacattgccgatgaccaaagcgtacagtgtgatgctacaaaatgggcaaaaatgtgatgatcggaatgcaaaaactgaatattggaattttcactcccggaaacattgaaattttaagaaattttggaaaatccgcactttttgaaaaatgaaatatgaaaattaattaaggcattgataatgatgatgataaatgtttaattaaattgaattacccaagtgaccaaatgtcttgtgcccttccgctgtaaaaatgggacgaattctcggacaaagcctttaaaaagggacaatttttattacaaaattattataacaaaatattattattatttaaacttatttaaaattcctgtttaaaaaagtaaaaaatctaatttaatttttaccttttttatcttagcttattaaaatctcacagttttttttaataacaatttc

SEQ ID NO: 9994 - DNA, 1919 bp, Heterodera glycines
  unsure (1)..(1919): unsure at all n locations
tggacgtgtgttttgaccttgttcattttattttaaatttttgaatttctttcaaacaaaccatcaatttgggatgaaaaatcaatgccaatattttcaccatcctttataaataattaattattaggttttttaattattattttgcaatgtaatttatagatttttttaccacattttcgccaatttcgacacgacttgtgccacttttttgtgccattttgctgccaaacatttcgccaagactttcgggtcccgaaaaattttcaattaaatcaggattggctaataattctccgatcatgtccaggccttttgggtcttgtagtagagcaattgcagtctgagttcaaaatgcttgttaaataatttaaaaaagaattaaaaaaaacgaaaatattcatttacaaataaattaaattgcattttgaaaaaatttacctgaaaatttgagaaaaattcacttttccggaattggtctaatgctttgtaaatgtcggcacagctaagtcggttgcaaatgccaatgaatggtatttctggcaacggttcctcgtcaaaattgccacttttcgccttgcgcaataatgcatccaaaatttggctgaattccctgctggccttatctgctaatggatttcaaattttatacaatttcagtttctatggccactttttttttcgggtatatccaagaaattgtctgttgcttttggcacataattttttgtatataaaaattctcttagtttacgttgataccaagaatgtatgggtggttcaagtaagaaaagttatggccaaataaactgaagaattacagaatttaattcaattacctaagctgtctttcataaatttttaaaattttttttattagcaacttaatcctgctacctcaaaaatttatttaattaattaaaatcccccaaagaaataattgtcgtcacttttttgttattttgacaaatttcttaatattattgtaataaaactatcagaatcgacttacaaaaattatatggaaaaagccaattgcgtttaggtatattttggtatttcccctaactaaaaatccgcaccctatttcaaattcagtttatttagtttatgaattaattttcacattttaaattttttcttatatgcccaccgttcaaatttggagcggcttgtttcttggccaaatcctccttgcgtttatcgttgacaaaattgaaaatttctgtcaataagccacctctgccgaacaatgcttgtttccattctttacctacacattaaaaaaaaaaattaaattgctaaaaatatttttatgttctaacaaataccaattgcctcatgaaatgatggcgccatttcattgagttttgctgtttctgttcgtcgctgttcttctaaatgatcaaattacaccataattagcattatatatttttttcattttgggttttccaaaatggaaaaatttacaaaattatgtttgggtttatataatgataaataaaaaaaaccacgggtggcacaacccggaaacccaaacaatgaaattaaaaattttactcgcaattgtcatcggtcgagcatcgatgcttgatataattggtgggtcattagcgaaagaaggacgtcgaatggttggacttcgcacaaaggcagtgttgtcaaaatgggtctatgtattaaaacaaaattttacaacttttgttttttttatcattttattatttaaaagtgacagtgatttttgggcgctgaattctttaagaaattaatttttcatagtcagtcaaatacaactttttggttatcgntcaaaagctttaggccatggatgacccgatttcaaaaaaatgaaagtctggatgccgatttccgaaattttgcaaaaattcgggaatttaatttttttaaatttt

SEQ ID NO: 9995 - DNA, 2951 bp, Heterodera glycines
agtttatgaattaattttcacattttaaattttttcttatatgcccaccgttcaaatttggagcggcttgtttcttggccaaatcctccttgcgtttatcgttgacaaaattgaaaatttctgtcaataagccacctctgccgaacaatgcttgtttccattctttacctacacattaaaaaaaaaattaaattgctaaaaatatttttatattctaacaaataccaattgcctcatgaaatgatggcgccatttcattgagttttgctgtttctgttcgtcgctgttcttctaaatgataaaattacaccataattagcattatacatttttttaaatttatttattatttcatatttaataatgttttgattttgctgaaaatagacattggcacatctttttaattgccgatttttgtgggttttccaaaatggaaaaatttacaaaattatgtttgggtttatataatgataaataaaaaaaaaccacgggtggcacaacccggaaacccaaacaatgaaattaaaaattttactcgcaattgtcatcggtcgagcatcgatgcttgatataattggtgggtcattagcaaaagaaggacgtcgaatggttggacttcgcacaaaggcagtgttgtcaaaatgggtctatgtattaaaacaaaattttacaacttttgttttttttatcattttattatttaaaagtgacagtgatttttgggcgctgaattctttaagaaaattaatttttcatagtcagtcaaatacaactttttggttatcgttcaaaagctttaggccatggatgacccgatttccaaaaaaatggaagtctggattccgatttccgaaatttttgcaaaaattcgggaatttatttttttaaattttttgccaattcaaaatcgtttattattgtgaaataattattttgtatgtggctttctacttcgtttttgtttccaaatgaaactaaaaagcataaaatttgccatccctgctctaatgttagaagatatttataagcaagtgctgagctaagcatttaagcaattcatcaaaaaagttcgcggctgaaaatctaataagtcagaatttttgcatattttaatttacagttttttacatgcctgcaatgctttgtcatttttgagagcttaataatgctaattaagagcttccgggtgattccatgtttgttggatttggtaacgtgtgttatatttcttcggcacccatacggttgcgcccaaatgtctcaccattctgccaaaaatttccctgtgttgttctttcaaatttttatttgtagcacttcggcgctcaattcgctgtttttctttaaaaaaaattagatttcatatttaaaatgtatttatttttactttttttattattttcgcccgttcctaagccaattttttccatgaattgaacaatggactgaaccagttccattcgcccgatttgttcaatgaacgtcaatgatggcgtagaatctgcgatcagagtgatcagataagagagagagagagaggggggaatgcatttggatgacgtcagactggcttactggctttaagcaactaatttttgtgttattactcaacgctattccttctatttatttatgacctaaccaaactaattatatattttttggtggcaaaaaaaaatcaggaaaaaattggaaatattttgaaaaatatcggaattatgaagcattcattttcaaataaatattcaagtttttaaataatattttttgaattttccaaatctgataaaattcagtagaaaattgaaaaatattaccgagcataaaattccaaaaaataataaaaagcgcacaaaaaatgaaagttgttttaacaattttttcaaaaaatgccaaatctgacgaaaatggcactattaaatgagcatacagtagttagtatttttcaatgcttagctttccttacattcattgttggtgggttgggttgattgcaatttttgttgataattgaattctgtccgctgttgcttggcgctgctgtagctttcggccactattggcgctgccatttggccatgaataattgccataaaaatgattaaatgataataataaaaaatggacatttcgccagcctaaaaagcattcgtttttaaataaatatcgatacatgaaaatgctttccgtttggttgtgaattgttttcctcatgaattatgacaaatgtgtgtgtgcgcgtgaggattttcgggaccttgacctcattttgggacagaatttaagagccacgtttttttaatgatattattttaccgacccataaaatcaggggctcccaaatgtgaggctctaaagtttttaatttccaaaatcttcgaaaactgtcaagtttccaaatccattaataaatcgcatttaaaattcagaaaattttccccggctgcgcttattggcaccgcccctcgaacctccatttttttaaggttttccaaaaaataaactaaaaagtctcagtaatattttttttctccctgttgtcattttgaatcttttctatttatctaacacagaaacatacaactattttccccccttaatttatttattttttgcaatttaattcattaaaaattttaaattatgtaaattgggtggcaaaaaaaatttttttgttgtagccagtaaaattggtaatgatcaaaagggaaccgcccacttcggcgccggccttttcggcgccgttgctaacaacttttttcctgttcaaccaaattaaaattttttgttatcattcgatagctcttcagattctctattagcctgtaaaatttcaaaaaatttcgtcagtttacaaaaaagttatggccaaaaaacctcaaaaattaactttttcttggctttttcggcgccgcgtggcataacttttttatttttgaatcattcat

SEQ ID NO: 9996 - DNA, 1706 bp, Heterodera glycines
atacctaaaactgattttaattgtgatgtaattttaagccctctaaagtccaaagtttcctctcttttttaggaaaatttaatgttcacaaaaaacactaattatggagtaattaagaataagttgatcccattctaaccgctgacccacaaaatgtccagcccacgaaatttccaagtctcgaatttgagttttttattattcagatgggcctaaggttaggcaaggggtaatataaagggtatattcgtattcagcgaccccgaaaaccctaaaaatcctaaattagactcattttgtttttataaattttgaaaaattttggacatttcgtgggtttttactcttttggacatttcgtggcttggacactacgtttttggataatatgaaaacgaaaaatttggctgccgcatggcgcccaaacggcggcgcccaatcggcggcgcccaatcgtacccgcgcccaatcggcggcgcccaaacggcgtcgcccaatcgacccccaccgtgtgggggtgccattctaacacactatttcattgatttcttttttcttgtaatttctctcattttggaggcgtactttctcttcaatcgaaaaaaatatttacttttttactagcctttttccctacgataaatatgcaccaaaatatgcaaattgatagagaataataaaacgaaaattttttacgctcgctttttatatgtacatatctccaactaatggacttttattaattccataattaatacacacaatgcaaaaaattacattgacttttagcatcattacaaaattatttaagcattttggttggattatatcctaataggtatgtacagtttggggtaatactaccgatggtaggacccctttttgaaaaaatattttaactttttaaaagtcactgaaaatatttttctaagggttttcggggtcgctgaactcgaatctgacattcatttgaccaatttcgaaacccggacccgaacccgaacaaaaagtcgaaaatctaaaattttcaaaattctcaatttcgttagatcctacatagaatgaattattttaattgttagaatagttttagactaaattttgcatgttttattcatttaggaacaaaattgagattttttgaaaattttagattttcgactttttgttccagttcgggtccgggattcgaaattggtcatttttgagatgatcaattttgacaccctctctaactctgtggatagacccatcattcaaaaggcaattcggtagagaattttgtgctctttccaatgggcctgctcaaattttccataaaaatgttcccaaccccctaggaatttttttgaaaaatttccggatttcaagccattttcgggttttcagatcaccatgaaggagtgatctggtcaagttggtataagacttttttgatcagcatcaaaagttagcctagcaggaattgtttcagaattttttttctaaataaaattgatttttcattgcttaaacattttgatgcaatacttttgcaccgccgccaaaaaggggggttgtttgggtcatggactcatgaccgattttctcgatagcgtagaaagtaatactaatgtcgtttacagaccattaaaaaaatagtttttaaatcatacatttaaacatttctagggggttttcggggtcgttgattacgaatctgacat

SEQ ID NO: 9997 - DNA, 1830 bp, Heterodera glycines
aggatctaacgaaattgagaattttgaaaattttagattttctactttttattcgggtccgggtttcgaaattggtcaaaatgatgtcagattcgtgttcaacgaccccgaaagcccttagaaacatattttcagtgacttttaaaaagttaaatattttttcaaaaaggggtcctaccatcggtagtattagccagtttggtgcaaaaatatatggacaaaggaattcgatgaaaaaaaaagtcgtgtaaaatcccaaaaaaaaaaaaatggatgtatgttgccaaaaactctcttcgcacaagttgccattaatttattgatcatgtaaatagacgaacatttcttcattttcaatttcaaaatttaattttagaaaataatttcactaaaaatgaatgaaaaaaacacaattaacaccaacaacagtttaaaagccaaaggtggcactctcgatgagaaattacagccaacagccaacggagagacagaagtgttcattcagacgaaaccatccaggttctatttacgacattatttatgttcctagctgattttttgggactgaagctgggcacaccatattttgaaaaaattaaaaaaaaatgaaatttcgaccttttgttcgagttcgatttagctcaaatcaatgcactttttccctgcccagcgaccacccaaaataccttttttatcggcttaaattttttttcaaaaatcttttctacaaatggtggcaacctcttgcttcagttattgcctggtttttttttccatttttcgcggattttattcggtcattttcctgatattttggatttccctccatttttatagggccaaaaccgcatgttcccgtgtggacgatgtgtccctgctgtccttcatctcattttcttggatgttcccgtggatgtggcgggccttccgcggccaactgagtcccgtcgagtcgtctgcccaatggacatgctccattttcgactcggccaatgtcaacatgacaaggttttgttgttcatcagttaggtatatgaaaaaaaatgagtcgctatattttacgcaacagcgcctgatacaaaaattccggcgctaattaaaaagtgacagattttgaaaattttttcacttttttttggtcaattttttttttgttgtttgttttgatatagaatgatgaacacattaagcattgagcataatttggcgaataaaagcccccccccccccctttggttttttgataaaattcaaaatctttcacttttttttgttggtttttttttgtcattcgtaccatctgtttaaaaaaacaaattctgtatcaaaactaacaaaaaaaaaaattttgacaaaaaaaaagtgaaatttttttcaaaatctgtcactttttaactagcgccaaaattcccttaaaatttgactcaaaaattggcccgcaggcttttttgtgagaccagagcggaattttttttttttttttacctacttttgcaacaaattaaccttttcttgtacaatatttaatatatttttttcatagaaatgacgaaatatccgttttttccccgtttgaatttcataattttcatcccaggttggaacatttgtggaatgaggagatcaaaagtgccgctgcctttgcccgtccgccctcacttttccgtgccgtgcttcgctttatccgttttcgcttgatggtctcttttttcagcattcctaatttttgttttaaggatttcaaaaacggctgccataacttttgatttgttttttttgtttttgcgttgtaaaattatccacgatttggtttctcttcggatttttaaa

SEQ ID NO: 9998 - DNA, 915 bp, Heterodera glycines
  unsure (1)..(915): unsure at all n locations
tcatgacttttattttctttcatattgtcaaccttttcgccaatgatgcccagcgtatttttgtcgcgctcacatttgccccgcttgtactcgtcggtccgtttgtgctcattggtggccttgtctatttgctgttcgtcattggtgtgctgtcactgctcggcattgccgtcttttttgtcttcgacatcattcaggcaccttttttcaaaaaaaaaaaaaaaattaacaaaaaaatttttgggattccgaattttgaaaaaaagaaaaagaattttttttttttttgctaaactcttctcttttgctcaggctgtcctcggtgttaccatggtcaaatttcggaaccgtgccattgcacaaaccgagcgccggatggcattggttggtgaactgatccgttgcatcaaatgcatcaaactgaacggatgggaggagctgttctacgacagagtgcgaggtgacgaacaaaatatttaatttaaacaaaaagtttgctaaaatagactcccctccgttttttttttaaaaaaagcggcagtaaaaaaaaatttgaaaaaatccattagcatttggaccctttggaaaaaactgaaaaatttatcatctatttttttttttgaaattcttgaagatttttttaaagattttcctaatttatcagctgttcgtcgtgctgagcagcgttcgttgggctgggccggctatgcccaaagtttggcggttgcatccggcgccattgtgccggtggtggcaaccattgtgatgacgttggccattgtgctgaacggacacgacttacgggccagcgatgtgtgtttttggagggctaatttttttagaaatttttaatcctttgagcggattaagaattaatgccttanaatttgaaaatcgattaaaaaaaaagttttt

SEQ ID NO: 9999 - DNA, 2127 bp, Heterodera glycines
ttatctcatcactatagtaacataaaaagatttgtactatagctaaacgaatattttcagtgaatttttggacaaaaataaaagagaaaattgcgaattaaaaaacgcaagagaattaagaattgaaaaacaaatcaaattatttataagttaattaaaccaactaatgaatgaaaaatgggcaaatatatatgaaatttacaatggtgttagatcgtttcctaaaactgcaaaactatcaaaaaaaaaatatttaatcttttttaataaaaagtttacgccatttgtttgccaacactatcatcaaaatcaagctcaaaaatagtttatttttagaacttataataataataattttatatgcaaagcgtgacgccgccaaaataaaaacaacaataagataaagcaaaatggtcacatatgagagtggttcataaatgtgtaaaacgatccaaatcaattgagtcaagaagtttagaaaaaacagttgaattttgtaacctaacttctttaggtaataacctatagaagcgagaagcacgaacaaaaaatgaacggtatctaatattagttgagcaaaaagttggcttaattaaattacccagtctactagaaaaattgggttgaggtttattatatttaatttggacaaatccattagttatttaatggaaaagtcttagatcaattttaaatctccttttttggagagactccatgttataaattgaaagcaattcgtcatagttaggtatgtcaacataaaaatttgagcgtctaaaaacaattcttaaaaaagttttctgaacattttctatttttctaatattttcttcaaatgcggattaaaaacgggggatgcaaattctaaaattggcctacaataaacattaaataaattaatgagtattttagggttacttgatccaatagattttaatagcgcatataccgttttaatagattttttacaaataatatcaatgtgcttgtcccattttaaatcatgagtgaaatgaacacctaagtcccgaacagattcgttttcatcaactttaggaagttggcgatcagaaataaaataattattttttggatttttattgcctagatgtaataccaagcatttttttgctgcgattttaaggccatttgtttatttgtcaataaagaaaaagtccacaaaagggaaaaatccgcttacagtgaggacaaaacattaaaatgtcctcaagaaagcgcataaacaattaaaaacgagatcgccgccaaaaaataaaatataatgtgagatcaataaaaaaataaaaataatgaccaaatcactttttgtttaatgaattaataattcgacttttatttttccggtctattttacaggaatagagatagttttaattttatttttaaattgatttaatgaggttatttctataaaccttttatcgagttggttccaaattttagttacccgccctgcaaaagtataaattttttgccaagtttatatttcgaattaagtctaaaaaagggaatgttaaagcgttcataaggtttgaatatttcaaagggattcagatctgttcggccataaattattttatgagccatgaacagatcagacagctttcgcctgcattctactcgtgagtataaatgaaaatgatttatttaaatttaactgaatgttacaaaaaatcctaaataaagcgagagataatcaaagaaatataatcttaattcttcaatatagtattattaaaaaataaggggcgaactaaaaggatactactaatttttaattacctaatacaaacactatcatataaagaataagtaatagcgaaaattcaagaaaagcaatgttgtacaatttttacttgccaattttgtgggtttgttaaataacaaacttgtcaaaaaggtcaaaagacggcactgactcccaaaactcggaagatgccaggtaatccaaacaaaatacaaccattgggggaatataactaatcaacattttgtgatcaaacagttggccgtcgattcggacgaccaaatcactagggctgggaattcaattcaatcactaattggtaataatttctttattgtttttaatgaattagagca

SEQ ID NO: 10000 - DNA, 3517 bp, Heterodera glycines
  unsure (1)..(3517): unsure at all n locations
tatttgtgtgacatgatnggaaaatgcaaattatttatcaatatttatgcncaaatccctaattgtatccacaacatttattatatttccaccaattttatatatttctttggggtttttattccccaaatgaagtacaaaagtttttntaattgagattctgatctgccatttatttgcccattctgataaattatgcaatgctttatgcataatttctgtttcggttcttgctttataacaaatatacaatttaacatcatcagcatataatttaattcttactcctgatggcaaagcatcaggaagatcgttaatataaatcaaaaataataaaggtccaaggacagagccctgggggacgccagagccaacttttttactggaggataaatcatccccaattttaacacgaaaagtcctattactcaaaaagtcctttatccacatcaaaagtttgccccttagacctatttttttcaatttgtataaaagtaattcatggggcactgagtcaaatgctttttgaaaatcaatataaatactgtcaacattttttccatttattattgcctcgtaccaatcttccacaactgttattagttgactcgttgtagacctatttctaacaaaaccaaattgaaattccgaaatttttttgttttttaatagaaaattgtaaatatttttgcttaaaattctttccattaccctgcagagtgagcaggttaatgaaattggcctatagttttcgggattatttttgtcaccctttttaaaaagcggaaaaacaattgattctttccagatgtctggaagtgaacaaatgtctaatgagatcctaaacaagtcagtaataacagttgacagggacgaatggcaaatttttaaaattttatagctaatattatcgggagaagtgccatttttattcggaagttttttcagaagattttgggtctcgatgatgttaaaatttatatccgatataaagcattgatcaatttctataatattacccaagcatggattgcttgggtcggtttcactattattaaatgaattggcaaataaggtggcaaataattcagatttctcagcactgttatgatagcatttattttcataaattagattaggtatttcaaagggattgacattgaatttttggggtcggggtcacttcggcgcggccacttcggcgcgggtatttcggcgcgaggttttttcggcgcgagctttttcggcgcgggctctttcggcgcggccacttcggcgccctatataaaatggctttttcggcgccagtgtttaaaaatccaaaaaaattttcaaaaaagttttaatttgcctttcattgtgcaaacatgtataccgcattattatataagtttaacaaatgaacaacaaaatcacgggtccataacactattatttgaaattcccctgagaaactcaacaatattttgggcatcaaaattttcaataatgttcaaaatgcgcttgtcagccttccgaaacttctttttcttctttggaggttcttcgccgttcacgcagctcacatagtcagcgtcgcgcgcacgctgatccattcgaaggacatcgatgaatcgccaaattgacgggtagcgacagctgaagattgtttggagtcgacggtgcgctgcttccgcgatgtcgtttgttcgctgctcttcgttgacagtccgttcacttcgatagcgctaaacgggagacaatttctttttttttgggaactgaaacttacattttgaagtccttcggaaatcaggcgcttgtgcatgttgtgcactaaatgaaaaaggcaccctcgaagctgagcgcccggaaacactgcggccgcagcgtccatcgccgcttgttcgaagtccattgtgatggacgttggagagaaggctggccatgcgtcaatgatcattctgaacattttttcgtagaccatcgcaactttcctgtcagaagacatgtggcgattgggaaagtccattttccttttctgaaatttttctggaagaaattcaaaaaccaaacaaaacaaactttgaaaggaggacgtaaacttgtgaaaatggatgtggtgcgatggaaaaagttccatctgcgaacacttcgaccattgcatgcgtccatttgcgtaagagttcttggcaaaaatcagaatcctgaatataagcggaattttaaaatatgtcacattaattaataccgatgttgggaattgtcggcattaagtgaaaaaacgccagagtcagatagtaggtattgctcctcctcaactccttcaccgcgcttgtacacctgatatgcttggccaatttggaggtcgtgaatagaatttggagccgctggtgcagctacaatttcatggcgtacacgtttgacaatctaaaaacaaagcaaaaaataatagtatgtgtctgcttttcgttaccttcttaattccattggcacttggcaactgagcaagcaccggtgttgaaacgttgaccattgcatttgcacggagttgtgaaggcaattccatgcattccgccgcacgcctcttgatccccgtgacaattttttttgctttcacattggcaatgtttgcttcgtgtgtgtgttcggtgaccattttgacaaaattgttgttcatgtcggtgtgaattcgcctcgacattcgttccttcgttcgcatcgccagaatttcaaactaatatcaacattaaatttgtcgaaaatgtaaaggaatccatcgttaattaatttatccttgtgacgatttgtttcaacttcagacattattaataagtaaccaaatattgcttaagatataaagatagacaatatagatttaataaattatggtacacgagaagtataacaaatttttttttaattatggcggcgaaatggacatttttcttcgggcggcgaactggccgcggcgaaaaagtccgcggcgaaaaagccggcggcgaaaaaaccccgcggcgaaaaacccgcggcgaaatggccgcggcgaagtggccgcggcgaaccgggcggttcccgaagtaaatgttgtttttcctaataataaaaatattagatagtacgccaaaaggagacaaaaaattagagaaaaaagataatgtttttctctggcactctctatttattggtacacatctcgttttttcggacggtgtgtagcacgaacattcccccgctagcaagttattaaaaattttttgggtaaaatataatctacagcacatcttcgaagctacagtaccactgaaacatttcaaatcgataattgggtcaaatcgagcgcaaaaatgaatttatcgattaaattaaataaaagcacaaaagaataaataatcaagaaaatttaaaggaaatgaattaaggttaaacgacggagacaaagtgattataacaaaaattaaccaaataaaacgtgagaaagtaagaccgaaaaatataaatgttttgtttagttatgggaaagaaaatttttgtaaag

SEQ ID NO: 10001 - DNA, 2096 bp, Heterodera glycines
  unsure (1)..(2096): unsure at all n locations
tgttacnggtattattgcggaatcgaaaagaaaacgctcatttgagattgggtacggtattggagggcgagtgttgtgacattatgggttactgttgatacgcattgactgaccgtcaaatcgcaatgggctcgccgcgggtgccgtcgcaccgttgtccagtgaaaaggcggccgtcgcgctttgctggccgctccgtcggacgcgtctgtgctggtggtggagacggcgacggaggaaactgttttgcaggtggtggtgctgtagctggcttttatagccgtgctaaacataatttggccattcgattgtcggcattcccattggcacggccccaccaaagggaaaaaaggggggcatacaaaattcatagggacggacagatcactgatcgggccaatgaattttttgttgttgtttttgcggaatcgattttctctaatccccgaccaatttgatcacatgtttgatggatccttgatcatttgcttctctctctctcttatcctccaatcactctgtctgcattttcccatttgtccacctttaattcctcgccgtcgtaaccgccgaacacgtgctggtcgtacgggtcgtcctcgttggggcagcacgagtagtccaagccgttgaagaagcacaccgacttggccgggcattggttcatacccggcagacacatcaccggacgcccttcacaaaatcaaagttggcatttccatggtcaaattcgagaatgaatcaccgtctttgtatcgcatggcactgagtccgttcggacacatcggaattgagtgtggcgattgttccgcttgattttgaccgttagccaacatatctttggagaatgactccaaaatgccgtcgccgaagccttaaaaatgcatttcaaatgccattgtgcctttccggtcacttttttggtcagtccccccaatgctttgctctttgctcgatggcacgtgatttggcagtccttggacagcaaccgttggagaagcagcaaccaccgctgctgatgcttctgcctctttgggctggtcaactgagtcggaatggacttcgtaattggattatccttctctttcggcttacatcgtttgcccgtttgataatcgatcactgcgggcggcgacgggccgagcattggcggcaaattgtcgggcactttttgcgggaattttggcaacggttgggcaccgtacgcggaggacagcgcgtaaccggcgctaccggccattgccggcggcaaaggtggcggcgcctgcggtggggcggagggcgcggcagcggagccggggaatgctgcgggtggcatttcggcactaaagagcaacaaatgaacttagtctctcccgtggctaaagtctctcccgtggctatccctccgcacatcgcttgcgctggtcccggcattcccaccgccccttccgcgtcttccgtctgcgcgatggaagcggctttcgcgagcggaaggtcattttcgtggcccagctgttcctgttgcgcttcctcaccaccgatgctgtgcctttcgttgccattttgcggatgttctccgtgcactgctccaacttcttcactcttttgccggtcggccgagagtggcactgtcggtgcctttgatgttccccgtgcgtttgtcaccacaacatttttgggccgaagaattcccggcacttgtgcaactgttctcagggaaaggaaagcatcgtcgactttggcattgcttttccgctgcttacatttgcacatcgcttcacattcttcgctggtgccgaatcgattttcattgcccgcctcgccttgccacacaaattgctcacaactaaagccaaaaacattttcaaattgtcatctttgattgcgccgactcgtgccaaggaggaataatttccattggcatttataaatggcactgaccgttttggcccggcacagccaataaatgcccttacaaaactttacaatggataaaaaacaactcaaatcaattctcttgctttaatttttgaggaaaacaattctttagtgccattcactgttttggcttcgctttgtcattgttcttaaaattgcttaccgtaaatttcgga

SEQ ID NO: 10002 - DNA, 2732 bp, Heterodera glycines
gtcgctttgtcattagttcttaaaaattgcttaccgtaaatttttcgacgttgaagtaccattggacatggtatcctccgccggtgccctcctccttctccaaggcgcaccgctccggcaacatttggtgactgttcgccaccgaagtcgtcgctcgactgcacttcgcctcgcacttgtcttggtccgcaaaattgttctgattgccatggcatccgccgaatgaaaactgctcgcaaaggccggactgagcattgaagaacctgcccaagggaaaaaaatttgttttgcctagggcaaaacaaacgcccaactgagcgctgaccatttcggcgcgaattgacggcatgggccggcatctggtggaagcgaacagacgacctcagcagccgatgagtcccgggcattgtcgagaatgtccggctgtggcaacattttttgctgatggaccgaagatggagacggcacagaaacaacggaggatgaggcgggaacgagggggaccagctcaggaagagcggacgaagtttggggaagctgttcaacagcagaagaagcggatggggttaagccaagcggcggcaaacgctggtgaggggggagaacggcaccagcaaaagacggagaagctaataagggaaaagcatcgaaccaagtgctgatcagcggagtgatcagtttgtgcgggtcgtgaaaggtggaagagtgggtgcaaaagcataattagcaagcttattgtgccaatagtgatcgaattggtgggtggggtgggtaaatgataacctgatcaataatgatcaaaatggatgactcactcgcgtgtccgtttccctccctccctggctgataattgatcatcaaagccttcccccgtttcttttttctcacccgatccgttgttgctcaccaccaccgtcttctcctgctgttccggcatggcctgtgccgcttctccattcggctgtcgttgcttcggtgggtttgtctccgcccccgcggcggtgccgcctgtctctttgtcgtcgccttccgtcggcatttcaccaccgacctcctctctctgctgcttttccgtggtgccgttctgctgcatatgttgctgctcctcctcctccagcgtcgtactgatcggctgcagttgcgaactgtcgtcgatcagtccgccccaaaccggcaccattttgcgtgccacctcttcccgtccactcccaacatcgctgctcccgcctgaccgtagctgttgcaaatggtgcatggtaaacaggtcggacagtgagccttccggagctccggccgaagcggagggcggagaggcggaagacgcggcggatggggcggttggaggtgcgccgccgttgccactgccctccaatgagacagtgggcggcgaattcggcactgagacggacggaacagcggcaacaactgattgatcagcggaatgaggtgagaagtgatcagcctcagcagttgttgctgttggaacaagctgcttctgctgattgtgagctttactttgttcagattgctgtggttgctgaccctcttcaacatgttgccgttgttgttcaatgatcggattcgatgggcgtattatatcctgatcagatgataatgactcatttttattcagtttctgttgttgctgttgttcttccacattctgttgctgttttccttcttccatagcaagcttttgagcaggtacttcgtgctgatgaactgttatcttttcctgttttttctgctgtctctgttgttttcccccgtttacgttttgcctttgtttctcttccatccattggatttgctgcggttgttctccctgtactgcttggccttgatgtgcttgtttcggttgtgtgttttgtccattttccatttgccctatatttaggaaccctttttggacttggaccggttgaattttctgcggttgttctccctgtactgcttggccttgatgtgcttgtttcggttgtgtgttttgtccattttccatttgtcctatattttcggccccctttttggcttgtaccggctgaatttgctgcggttgttctcccagtacttcttgaacttgttgctgctgatgttgcactttttctctgttctgctgcctctctttttccttttcctctctgccttcactctttccttccgtctgtccctctctttctctgttgtttctcgctccttccttctctgctgccggtctctcttccgctggtgaaatgtagacttgctctggctctgtctcctccccactctctttccagccctctttttcgtctggctccaactcggtcagtgtctcttccaactttgtctgtctgtccgtctcttccgtgtcccctttcctttgctttccctttctcttttcctctctgccattgctttgggtctccaaaaagatcatatcaccgtcatattccacaccttcttccatctgtccctctcggttcttttcgctctccttgttcactgttgtcttttgctcctctctgtgtctgtcactctccgtctgtcccgcactctttctgcctacctctgtcgccttttcaatttgtactcctccgacttggacaggtatctgcacgtgctgttgctgctccatctcctctgacgacttcctcaatttgctcagttctattgtggtcactcctcccggccctctcccccttttgctgctccattttttgccccattttgggccgcggcatttttttgcc

SEQ ID NO: 10003 - DNA, 1040 bp, Heterodera glycines
  unsure (1)..(1040): unsure at all n locations
ttggactgctgttngtccaagtacagcttggttttgctgtcgtgaaattggctgatttattgtttgtacttggattacttgctgttcttgtggctcatttggtttttgctcttggactgcttgctgtccttgaatcggccgatttgtttgttgtccttgtactgcttggttttgatgtccttgaattggcctatttgtttgttgcccttgtacagcttggttttgcagcaattgaatttgctgattcatttgttgcccttgaactgtttgctttccttgctgctgtccttgtacagcttggttttgatgtccttgaattgtttgttgcccttggactgcttggttatgttgtcctgtttgttgtccttgtactgcttggttttgatgttcttgaattgcctgattcgtttgttgcccttgtacagcttggttttgatgtctttgaattgtttgttgcccttggactgcttggttatgttgtcctgtttgttgtccttgtactgcttggttttgatgtccttgaattggcctatttgtttgttgcccttgtacagcttggttttgcagcacttgaatttgctgattcatttgttgcccttgaactgtttgctttccttgttgctgtccttgtacagcttggttttgctgcccttgaatttgctgatttgtttgttgcccttgtacagcttggttttgcagcacttgaatttgctgattcatttgttgcccttgaactgtttgctttccttgctgctttccttgtacagcttggttttgctgtccttcagttggctgtacatcttgtactgcttgtggtccttcgtgtgggtcttcttcagttgactgttcaacttgttgtccttgtatagttttactttgttcagtttggtgtcgatgaccttgtctaatttgttgctgtcctggattagtttgaacaatttttttctcttgttcagtttgcatttcttctccttgtactatttggtgtttctgattttgtccaaccatgttgtttcccttgtacggttnntggtttggct

SEQ ID NO: 10004 - DNA, 2258 bp, Heterodera glycines
ggtggcgaaatttcggccagcgaaatttttgggtaccttctgagtttcggtgtttccgaaacaaccaatcaaccaccttttggcggcaccactttctcgtctcggcattttcttccgtcttttagagggtgttgcttccgctgacactgccaatgccgtggcggcgtccgccgccgccggtggcccgtgcgttgcgtgcaccaccgacacccttgcggtgttgaccgttgttgatgcgattacggcgggactgaccacctcgtctaccagcgcgccgaccagcacgccgggcaccgacgcaagtggctgcagaatagtgacgcccacctgtcccggcgatcaagtggtaagcagcaggggacatcggcatggccatacaaataagggtcgtatttgtacgggccgttttcgtgcgagcacaagtttttcgctataacttattttctttgccaaccaaatccaataatcttggtatcattcgtcggaggaaagatggaaattttgaccatttttaacagattttcaatgaaaattggccatttttatgtcaattttgctctatgaaaatcatcatttcaaaaagtaaaattcattgatcccccttgaaataaacgactgagagaacccgtagaaggagcgcccatagctcagttggtttagagcatggcacggattgccggggttgtgggttcgagtcccaccgggcgagttaccttttatgttctacagtatgcaagctcattgcagagggttcaaaacccacagataaacaatttttaaattaaaataataagcttttttttactctttgggccaagggccaaaattttttttaaccagcatatgtaattgaaaattataggcgccggagagcaaaaacaagaatttgtagccgcctttcgccaaaaaaaacaactaatttttgcaatttttggggctaaaatttcaaaaaataaagtaaaatgggggtcaggcagtgccgacaggcgccggcgtgaaaaattttgaatttttaatgcattttattaagaaattgatttaatataatttttttaattaccaattttttctggaaattttttttatttttcattgggttggggggcaactgccctcctgggtacgagtctgcatgttctgcatttcatttgcttaattttaaatccactccagctgctcatcagcgttccgatcacggacgggacgggcacaacagcaaccgattttgaagtgtacatgtccggttccctcacgctgatttgcgacgcgcaaacgcgatggctggagatgaacggcgggcgggccggcacggcagtgaacggatacgcgtgtgtggctgccgaaattccacctggagcactcgtcggttggtggtggtgcagtagtgatatattcgagatcgaaatttgccgagactcgaggcttcgtttaccccgagactcgggaggagaccgagaccccacaaaaacagaattttctcgggtccgactaatatagtgggtgggaaatcaagccgattttcttattattttacgccattcattggattttgagtgcttaaaaacgtggccacagaatttttaacatacttttttgtaacctcgttcattgttttagaagcaagtgaaattttgaaggaaaatattttgcatttgatggaatttctttcaaaatccagaattttattatgaattcaaaatttcttcaagttagaaaatttacgttttaatttttacaaaaagacggattttttttttttacaaaatttgtacgtgaatccccgccgatcgtcggcggtagagccatagaaaatttaagaaactcatcgaataacatcaccataccccaaacaggcgacgccgcgggagcaggcgcaccggccgttgcggaaagtaatttcaccatgtttgggtaccatgtagataatataagatataaccagggttcccaatcatatgggacataaaatcccaaaatatggaccataaatcgcgaaatatggacataaatttttccaaattttgagggcataattctcaaaaacttcttcattcattaaaatgtaatgtaagttattaaaaacatttcttaagaaaaaataataaaaaaagctaaaatttactaaattttagcgaacaaacaaactgaaaagcaaaattttggctttttgcttatttttacaaaaatataccattttttaagaaaattgatttaaataataatcttgggaaaatttttctaaaaaattaattttccgg

SEQ ID NO: 10005 - DNA, 1104 bp, Heterodera glycines
ttttccggaaatttttcagaccttaaaggccaaaaagacaatttagctgatgggggccgttctaatagagtttgtatgcctaaatatggacataatgtcaaaatatggacggataactatggtcaaagaataaaaaggatttccatataattgggagccctaggtacatatataaccatcgggccgggtttatatgccgaattttaaattaaaacatttaatataaaattaatatattttaaatttcaacaaaaaatgtcgctttccaaaacaatttttgtggctgaattttgttgttgttttttttcatatacaaactgtctactactgaactccttcaatttttttttcaacagacattatggttaccgctcctaccgctgctgcggacgtcgccgcgtctgtcgccgcgtctgtcgcctcggccgccggcggcggcggttcatgcaccgcgtgctcgtcttctgttaacctggccgtgttgaccagggaagaagtggcggcggccaactcgataagaaacgcacgacttgcagaggaaccggtcaaccaaattagcacgtcgggtggatgtacaacactgacgcccacctgtcccccgggtgaatctgtaagttttttttctttgagattttttctagtaagaatatttttcacttgtttcaccactttcaatttaattaaaaatctactaaaataaaaaaatctttattttttgaatgttaaaaaaattttcacggctttgaacagtatccttgttgatacggtgttatggcattagtcaaaaaccatcaaaaaaagtcacttccttctaatattttcttagaaaatattaacattttttaaatcaaaaattttgacaagaaaaaaaattgagggatgaattttttgcgaaaattttccaatttttaggggtgcatttttttaattttagctcggtcttaggggtgcatttttttgaaaatttttaggtcgattcttaggggtgtatttttcatttgtattgcattcttgttaataaatttaccaaaaatcgcgaaataagggcgaaaataggagcgaaacgccaaaatagggacaaaaacttattttaggggcgaacac

SEQ ID NO: 10006 - DNA, 1298 bp, Heterodera glycines
aaaacggaaaaataccgaaaaatttgaaaaaaaaacgaccggtccgatttttaattttttagggggcgacatccaaaatagggattcctagggtcgaataggggcgttaaagcgaaagtttatcatccgcgccctagtcataactttagttaattttgagcgaagttatgaataattttttgtcaaaatttttacatttaacaggtggtcgtccgcgttacccaagagaacaaccagcccatccttgaaacttacgattcccttcaaatcacgctgatttgtaacgcacaaacgcaatggatctctcagaacggcgtgcgcaacggtcgtccggtgaccgcatacgcgtgcgtaacgcaaaatattgcaggcggagctggtgggtggatttagtcatgaatagaggccagcgtgggacgggttcccagtccgcaatcccgcatttttggaaaatgcgggattaattccacgagatcccgtcccgcataaaaataccatcaaatgaaaaattgaaccttcttgctattattcggttgccctagagtagagcggtcatcggtaattgtaaaaaaaaaccggtaccgggacttttcgggttgaaaaaccgggactttttggctgggaaaaccgggaaaaacccgggactagtcccggtcaaaaccggtacttaggtactaagttgtacgtttttcagtaccagtaccggtcccgctctactctagattgccccaaaaattctctatcccgcattttttagaaattgggtaatttttatttaataatcccgcaaaatgctgtcccatcaaaattttgaataccaaatctcgtcgggaccagtaaatttggttgtttttttgtgtgagagcccgtgagattcgcagtgttattttttctgaaaatttcaaagacctaaaaataaatttgaaagtgcgaatttttgagaaaaacatttaaaaaatttcccatctttaggtgttgcatttacaccggtgacaagagatgccagtgccgcagcgtccgctgcggcgggccgatgcaccggctgcaacccgaatctcgctcgtgtgttgctgcccgaagtgatcaccacacaaagtccggccaacccaaaggtcgagctgtggagagccggaaaagacacctgcggaaaattgagcatttgtatcagggatgggctttcgttttagcgtttccgcaaatttgccttttttggcactttcgcgtttcgcattttggcgcgaaacgcgaatattacacccctaagaataagggatgaaattacaatgaaaattttcaaa

SEQ ID NO: 10007 - DNA, 1061 bp, Heterodera glycines
aagaaagagaaaatcaatttacattcattgttcatttttaatggaggcaatggggcgttggtcaaataactgatcagaagagtaaacacattaagttgattagattatctctaccttagttatcaattgcccctttttattacgtaaattttcgaatttacatacagaaggaaattaaaataaatacatagcgtaaatagataatatgtctgtacaacagctgcagttttggcgctgggctcgatagaaaaaccatagggggaggggtgcttattagttttattacagaaatcttttttcaaaataaataacatttaaatgatcaaaacagcggcaaattaaatatgtgcatactagaagaatgcatgtgcataaaattcgttgccctaatgatcagcgacaatacaatttagcaatttcaaaaaaaaatcagatcaaaaaggccccctttggtttttttattggcccataaacaataaaagtgcataagttttaatatttacgtagaaaaactcaaaagccatgtaataaatccgacgccaaaatacgaaatcaaaacaccgaagaaaaatgctctttcgattcggacttcctgctcagaaaagcgccttttcatctcacgctcattcttttccaattgtttgatctgaaatgacaaaattaaggacaaacgcaaaagaaaaacaattgaaaaaattgaccagaatattttttgccgcaattatttcgttgtttgggtcctgctcattgttaactgtgcccatcgatgcgattatggcctcaattgcgtagtttttgactcgttgacggttcaaaaggcaacgcgcacgacaaagcggacattcgatggaaatctgaactttatttactttgtccaccaaatattcattgcttctgacttggttcagtccgactcgattctccacagcgtttcttatcgcaatattttcaattccactcagacaatccggacaatgggaatgacctgaaacatgcaaacaattattattaatgttttgtatgtaagtaatgacagcaccacacggaagcacttcgggagc

SEQ ID NO: 10008 - DNA, 2416 bp, Heterodera glycines
  unsure (1)..(2416): unsure at all n locations
gtgatttccttttgcataatgncgcttctttcttcattcgctgtctccctttttgctctttttcctcctttgtcctccttttctcccaccgtttgtccattctttcgccggtttcttttttttctttttccattttattcctttcttttacatttttcctttttcagcgatggctgacttttggcttctctttttggcctgtcttctcgcctttttcgtcggtgtttctcttttgattgccttttgctgtttttcgtgctacgcttgtttttgcggttcttccgattgttgctccgccgattcaaaataaaatgtgtttttttaccatctttgtttttttttgttcattctctccaaattctatggcctttcttcacattttctgtttaattaattttgtctaattattgtgtaaatgtgacattttctcatgtgcataatgtaaattgttaattgttggattatcttaataataaccgaaatattttattctttgcatttcatggaaatgaatttgccacagtttaaagtttgagagattttagatttttatttgtaaatttcttgtcattgttttattttttcttaaacaagactttcatcattttccgccttcttttcgccctcaacaattcctcgtcaattctctgtttttcttaaatttattaaattatttgcatttttcattttgctttgcctctgaatatgcggaacatctcatgggtttgcttttggcattgcatcgatcttagtgccaactttttctcctccaatctcacgcgtctcgccagtcccgaagtgccaattcgattttggcaactgccgggaacaaatattcatttgtcagttcttcaaacggacctttcaaggctttcacaacatcgccccaattttgtgcagtgccggtgcaaaagggcaatgcgttcggagcactgcaaatggccgttcattttcggcgaggtcaaaacggacaattcctttggacacgaccccttcaatttcaatttgagttggctattgtgagccgggcatttgctcgtccgaccttcgtccgtgttgtgccttcgcgcactttttcctccaggcattgttcggctccatgctccaattccgcgcgtgccgagtccactctctttttatttgttaagtcgaaaagagtagagcattttcacctcgaacaatggcaaaagacgcgcgttgcatcggccgaagcgtcgccgcggcggacccggcacgggacgacccgtctcagcaggcgaaggacggcacagatcggactgaacactgcgcaggagaaacatgcaggagatgaacagttgacagtggttggacgaaggcggagactgtgaaaaaaaaattggtgggaaagcgaaaggcgaaatgaccgaagggaggggggaggggtcgacccgtctctgctgcttctccaactgacgcaccaaaagctcgcgaattctttccatctcttttttatcactaaaaatacttttggctaccgtagcgaatgtaccgtagtacaacgaagaaagaccttgggaaaagtgtgacaagttggggtggcgggcgcttaaggggggacaaaggtcggattttggccattcctttgattggcgaacgacggattgacgacggcagaagagacttcttctgacaaaaggtaaatcagtgcaaaatgtactaaaaacgaacgaatgaagtgacccccaatttgggaagagagtccgagcgaagtttcatttggtgggccataaaaagaactttgccacgatagccgagggaactgcgaacagaggacgaactgtgaagggacggccgaccaacactctgagagttttgcagaattgaaactgctgctggatatttataagtgaatcgtttttttttttgctaattagtgacgaaacgccaaaagggcccattcaaatggatggaaattctgcataacgttttccccactcactttgctgcccgctaactcttctgccaactttccctgctccgcctccattttcggccgttccctgcgcgtctcccccacgtgcttcggcaccactccgtacacacggctccgaacgcgtccgctggaccgcgacttccccccgaatctttgaattggagttttgatagttgccactgcagttggtgctgtttctgtggttgtccgtgttgcgcttgtcgtgtcaatctgtcaaagggtgcgtttggttgccaatgcttttcctcaaatgccgtgccttttccgtatgcttttcctcgccctttttgtcctccttcgctttcctttccatttcgaatttcactttagtttccgatgtctctgctatctttgccgatttcgatgtcactttcgctccattgtccacgtccacaacagtgccgttctctccctcttccattggcttttgctatgtttctc

SEQ ID NO: 10009 - DNA, 1991 bp, Heterodera glycines
  unsure (1)..(1991): unsure at all n locations
ccgtccgttcgttttttgcttcgcttactttgctgctttccgatgccattcgccttcctccgtcgtcgtgtcaattgtctgtgtcattgcctggggcgtgctcagttgcgcttccaattcgccncacgtatttggccctcggggatagggtttggtccaaatttgcggaaacattgccgcgggaggtgtggaggatggcacagtcaaagggatgagagaaggagagggcgcgagagggaggggagtcgttgacacggaggaagagagcggaagagacagagagagttccgcctctcttaatcggggccataagtgccacagaaaatcaaagcccccacaccccccccccggcaaattctaacatttgcgacagcccaattcggtctttttccgctgcttttgctccgtccgtttgctttttgcccctgccaaatgcatccgtccgaccgcgcaaatgccaaaaacgcgcgcgtcttcttgcagccaatgcaaaagagtgcgacaatttgggacgagcggaatataactgagggaaagagagtatgtgagggaaagatggtggagagagaaagagagcgggaggagagagagagagaaacggagagagaaatgagggaaagaaacagtcgaatgtcagcggccccatttttcgaaaatttactcgcattcgatggaagtcgagtcgcgagggcagtgcgaacccttccggttgtcgatgagcaatcattcgcagcaccgaagtccgaaaaacttttttggggcgtgcggacaaattggacagacgcaaagactttttacggccaattttaacaattttcatcggagttttctgagcaatttaattgatttttattgccaaatttccaaaattaattccttttttccggcatttgctttttttcattttttaccgttttctcttccgtttttgtctgttgtgaactgtcaatcgttgacaatacggggaatacggtagtcgtagaagataggggcgatactgtagcagagggagggaaaggcgcggaaaaaggcgcaattggcaaaggggacggagaagtgggcaaaatccttttgagaattgatgggaatttaaaaaaaccatatccacagcagtaacatttgttactcgagaacaaacatttaaaacggtgcctaccgtattcctgtttgtaaaatttgcctaccgtatccttttccttggctttttctgccagaaaatccaatcgttttctgctgcgttttccttatgattgatttgtgtgcgagcagaatataactgaagtgaataattatcgctttcattgtaatttctgtatttttttatcattttcctttattttctgataaatcttcttctatcacttttgatcattttaccattttcttcccttcttttgatcattttccccctctcaccctcaatcggcttaaattcgtccgattggtccaatttataatttgctgctgtttttgtgcggtcaaatgcaatggaatggcgtctgttttgtgctcagatttcgtttttgcggctgagaaaatgccaacgggtcgatggtcggccataaattgggagaggcggcgactgaaaaggcggcgtttccctttggcattttctcattccttccccaatttcttttctcctccgtctcattacgttaatttgcgctgctttctcttctccgttttctgcccaaaaaaggcaatgttccgtccatttttttccaccaatcgtttttttgcgtgcgtttttgtgatgaaaacacgcggcaaaagggaggcggttgggactgaatgtacgcgcgcggagacgggcggggcgggtggaccgaccggtaatgggcctcaaagaaagcggagaaattcgggaagtgcccatttataaagaccgatgtccccaggagacaaaatgtccgtctcggaaaggggagacgagtcgacgcccgctgaattggttgggccaagcgngatgctgcgtttgacggcactgcaaa

SEQ ID NO: 10010 - DNA, 4754 bp, Heterodera glycines
tggacatattttccccgcccaataaatcggcagaatttcaaacgatgaaaaagcaaagaaaaagaacagcaaaaatagttggaagaagaagtaactcatttgtcagctttggcatttttattattctcaccaatcatttgggtaaccgaacgatttgtggttcagaagaattgaatggacaaaacggaggcctaacatttaaaaataattgcattattaacccattacattaatcatttttcatttgtcaattggtttctgttcggtctctcttaaaagataaacgaaataattaaatatataaataaatcaaaccagaaactgtttattaaaaacacacaaaatgagcacacacatccctaggctcaagtaagccgaagcctagacctaaagcttagactaagtttaagcctatttacgatttgtctatttaaaatgcaagcttattcccctcaaggtcgcgcgagaatgacgccgtttaccaataatttgggtacatttttgaattttagtgcattttgaattgaccaaccacgcccatcgcgggtcacttcacatgcgaatgtcgctctccgcccagcgaggcttggcttgcctttcccatgccatgccatcctccgccaaccttttcatccgtcccccaaattgtgccattcatttcctctgctttcgtttacatttgccattccgtcgccttttctctctgcgcatttccccatttttcgcgatgcaatcttcacaaatttgcgtcgctgctgctgctcatcagaaagagcactaccgttggctccccgccgaacttgtcactgaattgcttttgttcgtgccgagctcaatttggcgagcgagtcgtctgctgaagtgccactcgcttttccttcgtctgctgaccaatgccaaaattgcgcctaattggtttcgtccgtacaacataatggtaattaagtgggaagcaattacggaatttaatggtccggatttagcgacaagaattgcaattcgcctgtcaaaaagtgatgcctctcaacaaatggccaattcttctgcgctgccacgagcattgtatccccgtcgactttttgttggcacataattacgtcaaatccggccaaaggaatgggccaatgatgtaactcattctgttgttggatgaacagcattttgcagtgaatgcactccaacaaattgtaaagaaaaaccgtgccaagtgaacttattactaagatttgccctttttctagtgttgggttatttttggaaattggatttttcataaatttactgacggtgtccaaatgagaccgctgggctcaaaaagcgtccactttttccccttattttagccacaaaataagcaatttttgaaagtgctcaaaatcatatctgtgtttattaaaaaaaattatttgctttattttctattcatttcatttttatttgagtattattgaagtattgtatttgtcaaaaagtcattttaaattagttttaaaaaaaaattattcttttgattttaaagaaaatcaaaacactttttttgatttaaaaaatttctctaacaaataagaaagttttattcgacaaagacaaaaatgcgaaatcaaaggcaaaatgaggtcgacagcgtaaaataacaaatctcttaagaattttttggtgttttattctagtttttccggcttattactcaaaaaagaatttaaagttttgttttcaaataattcaatgaatttattttgatgaattctttacggcaccaaaggggaggatattatgtcaaaatatggtaactatgaaaacatggacataaatcgcgaaagtccaggaaaacaatatggattttcaaataccgattaacccgattaaataattttcgttttaaattagcgtcaacaatttcgcgagagaatgcctcacttttgcatagttgtaaacggtgctgggacgtttcttaaaaaccgccacattgggcgtttcttaaaaccgccaactcatatgattatgtatataaatatatatatatatatatatatatatattagaagtttacataacaataaaaaatttaaaatacatatgcatatctagtgacggtaaaataaaataattatttttatccttctttaaaacgttctccaaaaatatgaactgaccagcataatatattctaaaaaataaaatatttaagatatgagttggagaacagacttttgttagaaagcaattaggatattcattaaggcaattgcaaaatttaatatcacaatcgtaacgtttctgatatttatttatgtagcacacatcgtggttatagcaacaattatcaactgcaaaattttcgaatataaaattgctaattcgtaatttgttacttttttgaaagttgcaaaaccagattacaggagctattagacaagagtctaatagagaggtgccacaataagtcccacagaatttctttgcaactttcaaaagggaatgaatttttataaagattatcacagaaataaaacaaaataattaatttatctttgttggctgtttaatcagttcaaaatgtccatcattataatacaaaaatactgatgctgttgtttctttttgactcagattcgtaagctaaatttttaatatgaatttgtataatcaaagagtctaaccgattattattgtatatttaatttaacggatatacatacataatcatatgagttggcggttttaagaaacgccctgacggttttaagaaacgccctggcggttttaagaaacgcccaaagtggcggttttaagaaacgccctggcggttttaagaaacgaccaaagtggcggttttaagaaacgcccaatgtggcggttttaagaaacgcccaaagtggcggttttaagaaacgcccacctggcggttttaagaaacgccctggcggttttaagaaacgaccaaagtggcggttttaagaaacgcccaatgtggcggttttaagaaacgccctggcggttttaagaaacgcccaaagtggcggttttaagaaacgcccacctggcggttttaagaaacgccctggcggttttaagaaacgcccaaagtggcggttttaagaaacgcccaaagtggcggttttaagaaacgcccaatgtggcggtttttaagaaacgcccaatgtggcggttttaagaaacgcccaaagtggcggttttaagaaacgccctggcggttttaagaaacgcccaatgtggcggttttaagaaacgcccaatgtggcggttttaagaaacgccctggcggttttaagaaacgcccaaagtggcggttttaagaaacgcccacctggcggttttaagaaacgccctggcggttttaagaaacgcccaaagtggcggttttaagaaacgcccaaagtggcggttttaagaaacgcccaaagtggcggttttaagaaacgcccaatgtggcggtttttaagaaacgacctagcaccgttgtaaactctgtgctcatgtccaaagtattgcaagtggaatttgtgccgctcgacacagctgtcagtttttcattaaaatattaacaaaagaattatttcgaaataatgaaaaaataaattattaaaattaaatctgccacctgttcctaaattagccttttcgttttaaatttgttaaatgtgaaatattctaaaaccccaacagaagccctttgtccataaattggctcatttttcacttaatgtttccaatttttgcagccttatgtcattttgctgtgaagttttgcccgacttgtgatgaatattacttaatgagcctctccaaagtaattagcgacgttcgcaatttcatggacaatgttttgctcgaccaaatgaatcggcagaattaagcgtttacaaatccgccaaaataatcttacattatataaattttattcttattcaaacatcttattgaataatctattttttgttgtgaagaccagtaaagcattctaaaaatattttgtaaccaaattcataaaaatttattttataatgacgatcaatcacataaccatagcaattctgctctattaaaatattctatggaataaaatttacttatcaaataatgatgaaaaaattttgttgatcagtagagctgctggctgggacttttatgtgctaaaaaccctgaaatatgtaataaaatatgtgccaaaaaatactgaaatatatactaaatatgtgttaaaaatgggaaaatcaagtgttttttttcataaaaatctcagctctattgatgtgtctcaaaaaaaaaagaaataaattgacaccagtgaataaaatgtttgcctcaatttaatttattttcaaaaaaacaaataagaaatgtattccattattttgatattttttcgcccataaaaccggtgtttgaaatggaaacaaacatttatttaggattttaagtgcataattgaaatttatagacattattttacacgataatgaacaattggacgtaataaatagggccgcaacttttagtgaaaaaactttcttttttttgctcaattgatttgaagaaaggagctcaaaaaacgcatttctgcattaaaatttttcaattctgatgtcattatcagtcactagaaatcactattttggcgtatcgtcactattttttcactatttcgacattttttggaaaattccttaacaaaaatgcaataaaaccaaaaaatacacccctaagaatcgacctaaaaaaatttaaaaaaa

SEQ ID NO: 10011 - DNA, 3183 bp, Heterodera glycines
  unsure (1)..(3183): unsure at all n locations
ctgcagcctcgcctgcggttcttcctcaatttcgtcctattgacgcaccaagcaacaatggttgcaactcttcttcagctccatcattatgttgatgaaccctataattaaaacaaaagtcataaatctaaacaactttttaaaaaattgcaattctttgcttgccattaatgctgcctttcacgcctttgctgagctcctcgtagttcctggtcagcaccaatttataatattgtttctgttgagcggtcatgtccacgcgaagaatttgctcaactttggccggcagagatttctcgacatcctttttcactcgtcgcaacaaaaaaggctccaattttctgtgcaatgacgaaattcctttgtggtcacggtcttggtgtgcccgttcgaattcacaccaatcgttaaacctgaaaattagttttgaatatattccattcaaatctatgtaaaaatgcaactttttattaaagtactagtaaatgaaagttcatcacccacttttctggcataatgaagctcaaaagagcccacagttctctgagtgagttctgcaatggagtacccgtgacaagcaaacgatgattggtgtgaaaactgtacagagtttgatacagaagcgagtcgtcgtttttgagccgatgagcttcgtcaactacgagacaagtccatgtgaatttgccgagataaagctaaaaattcaaggttttatcttatgtttatggaagattaccttatccttaaggcagatttcatatgttgttatcacaacattggccttgcataactttgcatgttcatcaacatctaactcatggatgcgaatctaaaaatctgacaattcagttaattgtaagaatggaatttaatggaaaagccgtttgtttttgttatacccatatcaccatttacccacctgttccctggaattgacgtcgcccatataaatgactgtgttcaatcggcttccccacaaggtgaactcgttctgccacgatggtaaagtggataacggcacaacgacgagaaaggggccatgcatatcatgcagatggaaaagcgacgaaatgaaactaattgtctgaatcgttttgcccaggcccatttcatccgccagaatgctgctgttgcttctaaataaatttacataaaatgaatgtcaacttcagtcagctcacttggaccaagcgtaaagcagccaattcagcccctccagctgatagtcacgcaattccatttcagagtcaactggcctaaggaagtcaggcatagactcaagtttttgaaatttgggccgtcttttataggcctaaagtcaaagctttccatttcaaataacaaaaaccgacggttccaaaccgggtacgatttctttggctgtgtatccgattgttcgcgcacttcaaattcagctattttgtggtcgaattcgcgtcgaatcagcccttcgtcctcccaagtgcactccgaatagggcaatccattccatttgatcagatactcagtcgccgcctcgccgttatcgctgattttgtcaagggacgcctgctctccgataatacgctccacttgcttatattgctggaaggaggagccaattactcccaggaaacaaagagcacagtgttgtttacctcaatcaactcatcgttcatgccgagttcgcagttgtacagttcgatgtattctttgtcggccctttggcgcctatatttgggtttcattagtccgtttaactaatgccacaaacaaaccatacgtccacctccgcttcgcgtttgctgtaattctccacctaaattgtttattatatgaagacaaaactgttgaagtaagaccttcttgaagcccttcacattcgcggcctttaaactcgcctcggattcccatgtgttgtggaggtgggaccaactgcaaaacagcaaaggtatagaaagagcaggacattgaacaagggttagcatattatgtacatcgttcccattaacgagaacaattattgtcagtgcttttgatttttgacccccctcccccaagtcaatgtcgatgcaattaactcatcttaataggtcccttctttcttgaagagattctattattcatttatttttacttaaaacggttacaatttccttataattttattgtgttttgttttaaaccagtgtaaacaaaaaatattaggcggaaaaatgttttgaatgtcacaatgtttttggcaaaatacgaaatgcatacccaagccatttgattaagtactggcgctccaaatgtccgctctcaatttctaaatattatcttcatccactcaatcaatttaaagttccatgtctcaccggaaactctctcattcgggtcagctttgtcttgcacattataccatgtggtgccagacccggtagcgccgggcaccccatcccgatggcgcaacacgcgctcaatctgggttttaaaaagcgcctttaaaacgaataaattaattatccaagcaacaaaggagtggtcggtcctatcgcactttaagtttccaagcaattttttggcgtccattgccaattcattcggaaatgggcgctcataacttttttcttaattagctaaattaaatgagtttggtatcattcggaagcttaaagattagatgtcatattgactagactttaaccggtcaaattattttcaaaaaagtttgaaaattttttattttttcgcgttgtgtttgggcttacgaatgatagaaaattcgttttgtttggttagctaatgcccgtagatttacgaaaggaaagttattggacaactaaagtgcaatagagccggagtttcaaagaattacacttttataccgtatcagattcggggcggttgttgaagattttcattttcaatcaatgacatcattttttaatcttataaattcaatttttactgcttgatttagggttttcaggtcctacgaattataaaaangggttgggtacgtatttcgaacgaagaaaaaggacaaaaaggcaaaaaacaacaaaattgaccgattttggtaaaggaaagggctgacatttgttgttacattgtttgaattgtcagaatgttcgtccgaatagcccatttggcatatgaaaatgtttttttttgttcattaacagacccgaaagctaaatactctacagaaaatggctc

SEQ ID NO: 10012 - DNA, 1263 bp, Heterodera glycines
gaaaatccgatgtaaatccgaaatgtttgaagtgaaactgtgcacagcagtaataaattacgcgtggggaaggtcgaacaaaacaatgattgagctcgagtcagaaacgaaaccgaattcggcttcacgggaatcgttgtcttttgagaagccaattgagagactgtttcatggtcatgtgacagcagcgaacttaattttccaagaaaacgaagacatttcaacaagccgagcaacgaaagagcgctaaattcaaatactaccccaaacagcccaaagaaaacgagtccattcctttgtccaataaattattctttatttcctttacaaacaaattgaaaataaaattacaattgaaacggcggaaaataagtcaggggacagcatgacaatagccctcaattgggagttgggagctttataaggcacaacaacggatcggattcacaatcccatcatgccatgaagagaaagcaattcggaattcagattttaaaactgcgaatgctgttttactatttctaaaaccaaaaagaagcatctcttcatgcgcataatgtttaagtaataaaagaaaagagccagaaagtcaaataaattaaaacaattttggtgtacgagctgcagcattgattaacattaaaacgagaacccattactaagccccaacgatgttttaacacgtataaaatgcacaccgaccaaattttttaatcggcacacattaggggaggagggaaaaaatcactggttgttcaaaccatgcaaatattttgacccatcagagttcctcagcctttgccttcttcttctttttcccgtcacgcccatagcccttcagagggtcggtggattgttcggcgatgaacttgatgaagtccttcacttcacggcctccttgataaggaaccgggttggccttgtccttctttggcagccagaaaatggtcggaaatctaaaaacaaatattaaatgccaaagcatagataggaaatttaaaaaaaagcaatcacccgcgaacttcgaattgtggaggcacatcatctaaaaaggtgaattgtaaattaaagaataatagcaaatggattgagtattcacttgcagtcgcatcaaatttagcgatgacaacgtcctcatcggccatctgattatcaatagtaatgcaatgaaggttctttcattattccaaaattcactcactttccgagccaattcttcgaaaaacggagcgagggctttgcaatgcccacaccatggagcat

SEQ ID NO: 10013 - DNA, 1305 bp, Heterodera glycines
aggtcatcattttgccgaaaattagttaaaaatgaaggaatggtcatttatttttatttctctttttattctttgtcatttattcaacagaaacatttttcttataaaaagataaaatataagcttgttttatcaaacaaaaatgtcatttttgaccaattcaataaattatggagatgctttcacacaagcagcagcaaaaggaggtcaaaaaagatgagaaaagtggaggaaaataagaaaaatataaaacccaaatttttagaagtgaatggcgatgcaattaatttggataattatggacaattatttgacggaaaaaacagtgaatcgatcactgatcaacgacagcttaaggtgggcgaaagaaaaacaaacaaaaaaacagacagaaacaattgggaaaatatttttagtattatgtgcaacccaaaagagattttgctaatttaaattcaggaatttcgtgaaaagtttgccagaatggaaatggaattggaaatggccaaattggaactcgaaactgtgagttttgctataaaaatattttattttctgttttccctatttgtcttaagaagacacttgaacaaaagttaaagcagcagcaggaactgattggattgaaggaaaaattggccaaaattgaacaggaaaaggagaaaaatggtaaaaataataaataaaggaattaataaaattattttatggaaatatttatttaaatattcgataaaattaatgaatttaaatttacagatgccaaatatttgactgttcatcatagggaaaaggaaaggggtaaaaagttacaaattattagggttgtaaattatatggattaatatcttttttctgcgcatatgctatggagaaaggggctcaaaaatagcatttctgcattaaaattttttgatttgtgaaggtttttagtccatataaatccatattttgggggttttcgagaataaatgcatatttcgccatttttgcctttttagtccatatttcggccattttggcaaattttcataataaaaatgcaagaaaagcgaaaaatacacccctaaagatggactttttggaaatttttaaaaattgcacccccaaaaatatgaaaaatttgagttttcgtcgtcatttgacatttttaataaatattttcgccattttttgcgaactttctctttttttaaatgagaatttttgaaattttggcaaatttggaaatattttttatacggtggacgacaataaaaaaaatttgcatttttatgttttaaatccatttattggttgtttatt

SEQ ID NO: 10014 - DNA, 1732 bp, Heterodera glycines
gaagaaagggaaactgcaataaacgaaggtaacaaaaaaaacaataaaaactttaatgttttttttgaattattcgacatttggaaaatattttggtaaggcaaaaattcaaatctgaaaacagacaatcatggttatatgtccaataaatatacaggaaattcaattgtaaagattgaatttatttttatatatctcatttattttgccagccaaagacaaaaaataatcccaatgacttttatgttttaaaattatctcaaaccttttattcttaaaaacacagtcatttgtttaagaaccttaagataaatttcaaaaacgagtattataggcatcgaaaattctgaaaaaattcacccgtaaagattttacgatttggaaaatatgggtcatagtcgccaactcatgcttaaaaacggtctgaattgatgtaaaaaaagttcgaaatgggttggaaaatagaaatattggcgttctccggggtcataagtgtcaaatccagccggtacttaatcgtccactttgtaaaaacggtttaaattattttttgcaacaaaactaatccgtttgcacgacctagccgagccctgatgattattactcaaatttaaattaacgctaaaaggcagcacacattcgaattttgagtatggcgactatgaccgatatttgcctgttatgctttttcatattgtgagcagtttgtgctatttcagatggacatagatagcaggggtgtgacttgtctcagaaaagacgagagcgagagtttggcgagaggcgagagtccccaaaaagacgagagcgagagtttggcgagaggcgagagtccccaaaaaaacgagagcgagagtttggcgagaggcgagagtccccaaaaacacgagagttggcgagaggcgagaggacgagaggcgagagtttttcaatttttttctgtagccttattttttaatttaaaaaacttcaaaatcgtatattaaattaggggtacgggcctgggtatttgggcaaataccgggtcagggtattgccgggtacagaaagccgggtcagagttctagtttttaaaccgagtccaagtcatgaaaaatccaaacaaaaatctttaaaaatttttcatgaaaattaaaaaatattttcatgaaatatatttattttagaaacaaaatttattatttgtccattttttccacctttttttgcggtgcgttttttaaaacttcggggacagttggggtcgggcggtgccggtaggcgccgccgaaaaaattttgaaaattgtcttcggatttgttaacagattttattcaaaaaatgaccaaaacttgttttttaaattttttgtttttaagtcgctttttttgtggcgctgttttttcaaaaaaacttttttggaacattgggtgcggggtccggcggtgccgaatcggcaccgccaataggcgccgccggaaaaattctaaaattttgagtgtaatatattaacagaagttgtcaaaaaatgatcaaagttttggttaaatttgcagttttaggctgtgtaaaaaagaaaaaataataatttttaattgaaaaattttttattaattaaaatttcgattgaaaaataatttatagaaattatttaaaaaatgctgtaccgttggggaattgaacccaagagaacagtaaagaaagggagaagggttagacagctgactctatttgaattggagatatccgaaaa

SEQ ID NO: 10015 - DNA, 2254 bp, Heterodera glycines
ggaaaaattataaaatttgtagtgtaatatattatcagaacttgtcaaaaaatgatcaaagttttggttaattttgcagttttaggctgtttaaaaaaagaaaaaataataatttttaaattgaaataatttttattaattaaaatttcaattgaaaaataatttaaagaaattatttaaaaaattctgtaccgttggggaattgaacccaagagaaaaataatgaaaggcagaaggtttagccagagaccatatttgaattggagctatccaaaaatagagaaaacattaaggaaggaaagaaagagatttaagattttttttcgcgtaaatttgaaaatttttctggatgctcaaaagttcaatctttaggggtgtattttcaactctcgcctctcgtcccaaaaaacgagaggcgagagtaccaaaaatcggcgagagttggcgagaggcgagagacgagaggcgagagttgtcccaccccctgatagatagtaatattttgcagaaaaattttaccaacagcctaggaatttttttctagaattttcccgattttcactgtattttggggtgtcccggtcactagtctttcagaatatttcctatacttaaattaggtattggtcgattaaacattttgttgctaaaaaataaaaacttttaaaaaaaaacataaaataacactttaatcaatttaaataaataattggatttatattttaagcttctgatgaggaacgattcttacaattacaaaataatcagaagattattttggaaaaaatcagtgaaattgaaaaacaacaaaaagaacagtcaaaaggcgaggagaaattaaaacaaaaataaatttgtcaaattttatatatttcatttaaatttttggttttaagccactgcggatcaattgtcaaaaattatggaaaaaatcagtgaaatggaaaagcagcaaaaacagcagcagaacgataacacgagcaaaggcgaggaattaagggtaaaacaaaactatttttattgattttatatttaagcaattttattttaatacaatttaatgttttattttaaggcacttttaaatttccaacagaatcattgggatgccaatgcttgtcatgagaaactcgaaatcattggcgacaaaaaactcattgtccattataagcaaaatgatattggtatttttccatattttacttatttatgtatttatctttaaaagattggtgttccgtctttgctaaatatccgattttgctgaataataattggtccgacactttttactacgaaatttcagtcaaaaatatgaaaaggtaagataaataatatttttaattttatataccaaatttaacagagaaatattaaaagtgaatgattattaataaaattgttatattcctttatttatactttttcagtttaattaccttcggattcgctgttaaacagcagaacaaattcgatggaataattcttagccacaagggcacttacgcatattataatcgtggcgatatttggattaacggaaaaggaaagggaagaaatggcaaatattcctacggtgttggcgataccgtaggaattggtgtcaattcggccactcgacagatcattttcactaaaaatggacttcgtttgggttggtaaataaataatgaatttaagaatcttaaatataattttttatttatttgattttatataaatcttttccttaactttttcacagattcctctgaatttttcgttgctcaatcttttgctgatgattcatttcatccatttgtttctatttggcattatggtggccaagatcaaattgaggcaaattttgggcccaatttcaaattcgatttggcaactctctgagggtgaaatattcaccaaagctgatcaatctgttctttttactgatcaatttgttcgtttaatcttttttttaagagtattcttggaatcagggaatataaatatcggtatgtacatgtgtatgaggtagagaattgatgactttgaaatagggttcggtccggtgggaaaaatattggaaatttcaattgaatagtaaataagttagaatcaaaaattttactcatttaaaaaaaattttcatttcgacgcgtcgtggttattaataaagcctccaaatttcaaattgcggataccgctgcgggattgtaactcacaatttttgcgggaaaggaccacgcgggattattctgttaacaaatttcactca

SEQ ID NO: 10016 - DNA, 1705 bp, Heterodera glycines
tgcatttcagaccctaggagctcaggaaaaaatatgccttctatgaatggttaatataaacatatgtatgttgttattgtaaataataatggttataccttccctaaaggaacagttggcgaatatttatgttttcgaggaattagtggtagagaaaaaaacacaccaaagagattatgtcgagagaagaagcacattgaatcactggtaaaaaaacatttcaaaatgtcaaatcagagaatgctttcttagtagcaaatgtgagggcaaaaagtttcttctccacaaatatttatgcttgttttaaaaatgcttaaaattaataatatacaacacaaattgattaattggccacatattcttttgcccatgggttcattaaaacgtattaaaattgggctgacttttggcaaattgcgcctgtcatctgaatttcgcagcccgcgtcgttccattggccatctgcactgaacatgtgcacgcactcctcttttgcgccggctgaagcatttgcaatttatttatacattaaattgttaaaaaaatgaacgaggaatttttgttttgttgtatattgaattgtaataattcattttttaacattaagtcaacccaacttgggtcggtgaatttgttggtacccgacggttgtcctcctccccaagggtatttgtttctgccgccagttgtcatcacagcagttgtaatctcgggctaaatatatttttcattttgtttaatttaaacatttttaacttacaacattgccaaatgttgctgaagaaccgtttgtccatgtgctttggtagcgattgccgacgtggacacggcgaagaccgatcatgaaaagtaaaaaatattgtaattagtaaaaaataaagtaaatatttcaccaaaatgtgttgaaaagtgttgttgccaaatgatatgttttttgtgaacgtgcaagcggccgcgtaatcattctgccaatgaaccgattctcggcttcgctctcgatactgacgagttgagctttagggtcttccgccttacaagcggccaccgcttgactaaagcgcgattatggtttattgggaggtaattaaaagcataattaggatagtaattaaaatattccactaatattttctcatggaaattttttttttcttggataagttcccactcacgtctgattcatcagtccttcgataactttgtaacaattgccattataatttgtccatccaaatccactgcacaccgacgcacaagactcggaaattgttgacgactcttcagtgactgatgataaaccttcagatgttgacgattcttccgtgactgatgataaatcatcaaatgttgacgactcttccgtgactgatgataaatcatcaaatgttgacgattcttccgtgactgatgataaatcttcagatgttgacgactcttccgtgactgatgataaatcatcaaatgttgacgattcttccgtgactgatgataaggcctcagatgttgacgattcttccgtgactgatgataaatcatcaaatgttgacgactgttccgtgactgatgataaatcatcaaatgttgacgactgttccgtgactgatgataaatcatcaaatgttgacgactgttccgtgactgatgataaatcatctaaatgttgacgactcttccgtgactgatgataaatcatctaaatgttgac

SEQ ID NO: 10017 - DNA, 1249 bp, Heterodera glycines
tcagatgttgacgactcttccgtgactgatgataaatcatcaaatgttgacgactcttccgtgactgatgataaatcatcaaatgttgacgattcttccgtgactgatgataaatcttcagatgttgacgactcttcagtgactgatgataaatcatcaaatgttgacgactcttccgtgactgatgataaatcatcaaatgttgacgactgttcagtgactgatgataaatcttcagatgttgacgactcttccgtgactgatgataaatcatcaaatgttgacgactgttccgtgactgatgataaatcatcaaatgttgacgattcttccgtgactgatgataaatcttcagatgttgacgactcttccgtgactgatgataaatcatcaaatgttgacgactcttccgtgactgatgataaatcatcaaatgttgacgactgttcagtgactgatgataaatcttcagatgttgacgactcttccgtgactgatgataaatcatcaaatgttgacgactcttccgtgactgatgataaatcatcaaatgttgacgattcttccgtgactgatgataaatcttcagatgttgacgactcttcagtgactgatgataaatcatcaaatgttgacgactcttccgtgactgatgataaatcatcaaatgttgacgactgttcagtgactgatgataaatcttcagatgttgacgactcttccgtgactgatgataaatcatcaaatgttgacgactcttccgtgactgatgataaatcttcagatgttgacgactcttcagtgactgatgataaatcttcagatgttgacgattcttccgagactgatgataaggcctcagatgttgacgattttttagggaccgatgttgaaacttcacataatgaaagatcttccgactgtgaatctttagatgatttggaatcatccgatgatgaatcttttgatgatgattcagatgatgaagaatgctccgatgaagaatgctgaataggtaatctaattaattcttattatcttaataggctcccggaaatgcgtcaggaaaaaatgcgtcagtagaaattgcatcagtgaaaatgttgatgtcataaaaacaaattccttaggtttagggctcatcgatcacgaatccgttattcatttctgccaattccgaactccggaccggaattcgaacaaaaagtagaaagtccaaattttagaatttagcaattttggttcaaaa

SEQ ID NO: 10018 - DNA, 2950 bp, Heterodera glycines
ttccaaatgtcgttgtgaaattgctcgcgccgagaagctcccgctctctaaatttctttgcgggacggattggctccgaaacaacaaaatcggtgggttcctcattcggctctcgcaaaatttgcattgcgtcgctgtccaatatgacgccttgctgtcgcgttcgctggcgagtttggtgcggcgagcgtggggataaccatttttaaccgtcttggttctcgaatttttcacacaaaaatctgtggtttaaccgtcttggttctggcgaattcaaaccacttttctcaaccgtcttggttctgctgggtttcactcaaaattggcgagtgttgttcccagtctttgggctcacacaacaagaaaataattcgtcgctccccagtctttgggcaaagcaacgagtaatggcactgttgatttcaattaaaattcaaaaccttcttccttgtgtcaaaaatgggacggcaatgcgcttgttcagctgaagtccaggagcgccatgtagagaaaagcgagagagtcgggggctctaatattcgctgctcaatcaaattaaacacacaagcaaatacaaacacaatttatttccaaaataaaatcaaacaccacaataaaattcaggaggagagacgataataaacataaaaatatcttcatgaattcaaaaacataaagtctgaaaaagaactaaaacaattcacaaacaataataagaacaaaacgccaataaatttaaaactaaaataaatattcgtcattatcacatcccgcccccaacaaaaaaggcgtctctgccgtcaaaatttccttgattcggcccgaaaggaagggttctcagctgacacattgccgtccgccgtcgacgatccaacaaatttagggattggccccgatggagtcgcataatagatggtttttctcttccatccgcctcctttctctcgattttcgtttacattgccaatttgtcgaaaatttgccgaaattcgatgcccagcttttcctaattccttgtacgatccaccaaaatttctgaagatcgggttcgttttgccattctttttaccagtggtcgactttttcgggtccaattccttcccgccctccaaaaattcaattgtccccaattgagaactccgtcctctaacatttcggcagacttttccatttttttgaacctctaaaatcgacttttctgttttgcattctacatctttcctactcttttcactccctttttccccaaattttttctccaattttcctcctttctgtgccgaatttttcccgttttttgcttgccacttcgatcgattcttttgttgtgacgacttttgctgacttttcggaattttggcaacattatcatctgcgactttttgttcttggctgatggctacatcatttttccgagccttttctgttcgttctttccctagcaaacatggcgtggaattttgaatcaaagtcaaaccataaatgatgtttactgccttattgtcattgttcgatgccggtttgaaatcgacaattgtgtcggacaattcgtcaaaaagtttaaaacccaggtccgaaagtgaatttgttccgaagagcaaatcgtagccgaacgatgtttgggccacgtggagacgaactgacacggtccttcccattcttctcaccggcaacgaaacaattccgtagcatttgacttcctccccatttatgtcgatgacgcgcaaggtctgacggcttgggttcaaaaattctttgctcgacgttgaaatgttcaaaattttgttcaaaaatgcagcagaaatcaacgaaatctgtgctcctccgtctaacattgcgttggcatgctgcccaagaattgaaacatttgctaacaaaattttaccgactatttcccttttctctttagcactctgcgcatcttttgctttcacgtcttcaaataatttttccaccttttcacttacagcacttattcctccaatcaaaacatttgagtgacacgccggcgatttttctgtttgttcgaccaaataattttgtcgaagaaaatttctcggttgttgggtatgattcggaaaattttgttgtgatttttggctttcattggtatagggaatcctgtccgctcccgtagccgatgcattatattgtggtggggcataatttgactgatcgcgtcgtgggtaccaacaattacgggaaacatgcccttcctggccgcaattgtagcatttgaaagaccggacaaaattctcaggttgattcgatgatcggaaattaaattgtcggcggtgttcaaaattttggcaaaaattcgtgtctctttgttcggctgcttttgctgcattttgggtgatctccgcgcgcgctgccatggccacgaattcgtcaaaaatcatgtcaggcttccgtgccatttccaaagtgagtgccaagttcggattttttagcgaccggatcagatgccgaattgaataatcgtcgtacaaatgttcgccatgtccgggataggcccttctcaccagtgatgaaacgcggtcggctaagtcgtcaatgctttcgccgttcattctgcataccccggtcattagctcatcaaatgcacacgttgatttggcatccgtcgagtcaagttgttgtttcatagcccttcggatgttttcataccgaaacgggttgttggcaactgcagaattgtaggcccgctctgccctacccgaacatttcgatttaagtgcccttaaacgcctttcgtttggccaatcttcgctgaccgcgtcaaattgtcggaagaacgcattaacttgatcagctcctgcgtttcctttcaactctggcaattggtgaagaatcattgagtaggaaaaaatgtcgagactcttgatggttcgagccattatcatgtttgggtcgattggcggcgctggcagattctctccttggtctt

SEQ ID NO: 10019 - DNA, 2292 bp, Heterodera glycines
  unsure (1)..(2292): unsure at all n locations
atacgaattgacgacacgatatggaaattcggcgggtaaatgctgtcccctattgtcagctctacccacattcagataagcatggcgacttgattcgaataacggtgagttcggtgatcgggcccaaccatcctcaaagtttccattgtctccaaaaagatggccattcggtggcaaatttcttatttcgacagcattccgttctcccatatttcttccaaaattttcgagatgccccgaacctgcattaaccattggtgccaccaacgctaagtgctcactcatcctttcttcgtttgctgccggttcaaattcatgaacattcacttccaaatgtcgttgtcgaaattgctcgccgccgagaatgctcccgctctctaaaatttcatttgcgggacggattgcctccgaaacaacaaaattcggtggttcctcattcggctctcgcaaaatttgcattccgtcgctgtccaatatgacgccttgctgtcgcgttcgctggcgagtttggtgcggcgagcgtgggataaccatttttaaccgtcttggttctcgaatttttcacacaaaaatctttggtttaaccgtcttggttctggcgaattcaaaaaccacttttctcaaccgtcttggttctgctgggtttcactcaaaattggcgagtgttgttcccagtctttgggctcacacaacaagaaaataattcgtcgctccccagtctttgggcaaagcaacgagtaatggcactgttgatttcaattaaaattcaaaaccttcttccttgtgtcaaaaatgggacggcaatgcgcttgttcagctgaagcccaggagcgccatgtagagaaaaacgagagagtcgggggctctaatattcgctgctcaatcaaattaaacacacaagcaaatacaaacacaatttatttccaaattaaaatcaaacaccacaataaaattcaggaggagagacgataataaacataaaaatatcttcatgaattcaaaaacataaagtctgaaaaagaactaaaacaattcacaaacaataataagaacaaaacgccaataaatttaaaactaaaataaatattcgtcattatcacaaattgagccaagagatttatgctacttaataggcaggtaattttgaatttatttttttctgataggatttttaacaaaaacaccaaatcaccaccaatttgttaaagattttcaccaaaaatgcccatttatttttaaaaatgctttatgagtttttaattaattcaatacaaaaataattatgaaataaaaaagcacataaaattattgatgaataaaaatatttttaagcaaaaattatataaagtttttgactatatgtcataaggcaaaattgaaaaaccctgaccccgaccccgaacgatttgtcaaccccgaccccgacgcttccaaccctgacaaccccgaattttccaaccccgacgtcggggtcgcaaccctatttatacttatggaaaaataacaagcaaaaagaatattttaataactcaaaaaaagatttcagaatcaaataattttcgtgatatggcattataatatgctcgaaacataatttttcagaacatattagcaaaattgaacgaaacgcataaattcgaatttttcagattttaagagtgttaaaaagcagggaaataaagactctaacagcagcctataaaacttttgtacgacctcaattagaatatgctacagaagtttggaaccctaacttaaaaaagatatagataaaattgacgagtacatttagaaaatgtggttttgtgtacaaataaagtaattatttgtaaaattagattttttattgaaattaaaaacagctcttaaagattcagactttgaacattacttttagattttctcaaattttttatatatttcagaaaattactttttattcataattaagtaaatttttatgattaactaattattaattatgtaaatctttttttactgtttatctatttagtttttactcatggaattggaactaaatttggtgttccttttataattttttgctcttcagtatcagcaaatatttgacgagtcgaactttacaaatgcaaaatatttgaagtaaaaaacagttattgtaattaaaagattgaaagaatattanaaatttttctacgatttataccgngagccatggtagattatgaaaaataaaataacggatcgcatcagaatttacctttttttggtatttagcaccaggaggtatgatataccaatataaattat

SEQ ID NO: 10020 - DNA, 1716 bp, Heterodera glycines
tcgtttttaaattactttcttcgaagaatgtttaaagcggattttgagtttaattatttttggctaatttttcaggacttttttggatttatttagtacttttttgccatttttatgtgactttttgattattttttcatgacttttttgtattttttgtgactttttcgtgactttttggcgatttttcatgattttttaagtcgactttttctagatttttcgtgacttaaattcccatccctagatattatgctcaatttgttaacggattttctttaaaaactgataaatatgtgtcaattaaaaataatatgaggaatcatattttgtcgatatgaaacctatgagtggtaaagaagattagccaataggccattttcacaattggtaatgtcacttttatataatatattaattatttttttcaaaatttttgcgtttacccaaattttcttcacaaattttcactgaaacccccatttttaccagtctattttaatacccggttggacccggacctgtcgggtaccgggtattggatattcaaaaccaggtccaggtccgggtattgggcaaaaaccgggtacccgggtctgggacccggtcgggtacccggacccggcctacactagttgaaattcgtgatcagcgagcgacccaaaaaactcctataaataatttttaaaaacaggtaagtggatttgaacccatggcccgaaaacccatttttaaccaatcgtttaactcagttccgtttttttactctgttgagtatgggaaaatttccggttttttgaggccatataattaatgaatttaaatggacagagtagagtaggttttttaattgaaaattttatcataatatttacatttttaataatcagtagaatagtgattttggaaaaaatttggcatttataaatgggaaaaaataatgatttcttatttcacctaaaaatttttattttatatatatttttaaaatttaatttttagttttttgtaaagttatgaaattattatatccattattgtttaaataagaaataagaaattcaaatattcaagtttctattattttcgtgaacagcaacatttttcggcgctaaaatttcatttttggccattttacaccaattttctgatataatgaaatttcataaaatctctttaatttttctaaaatctctttacattgtgaatttattttatttttattgaaaatatgtttattattttcgaatgagctccagtagaaagtaataaaattttatttaatcattaatttaccaattggcaattattttgtcattaagataaaattattattattatttctttgaaattaaacaggatttccttattttattaagtaaaataatgatttattcagttttttaatcagaaaaaaatcattaaaatgcctcaaaaaatgaattgccatttaattgaagaaaaataaaataaaatcatttcgagacgacaaaaatgaaattatttccgctactattattaattatattatttttaattgacaaaatcggatcagaaaggaaaaaattgcaacaacaaaagtcatttggcgaaatatttggagaaaaatggcaagaaaaagaagaagaaaaactaaatgaactcaaaaaaagagaaataattgcaaaatattataaaataaaagagaaaataaaggaaaaaggaagaaaatattca

SEQ ID NO: 10021 - DNA, 1981 bp, Heterodera glycines
  unsure (1)..(1981): unsure at all n locations
ggggctttcttttttggaaggattttttttctactgatggaaaaaggaattttttcgtttcgttggtcctttcctttggcccccttttgtcatttgatgaaagttaatcccatgttttaagtgtttgtcacaaaatctgtaaatggtcggatggaaatttctgggaatgtatgaccaaatgaaaaggacggcggccttttgcaaatgtttttttttcgacttttttgttcatctatggggcgacgacaaattcaaccattggcgtacgatgggtttcagcgggtcgaaggtttatgcatcggctcttcagcaacaccgaaagttggcgttctgtgcaaaagaccgtaactgaagggagtaatgaatcagtccaagaatctagttaatgcaaggggaaagggacatcagttagcacaccagcgatatggatggcatttagcaattaaagcattaaaaaagcctactttataccgtctttcacagccaagttcagcttgaaattggggaagtcggagcagtgaatgtcaaactcgaagctgaaaatgggagagtttgtacatgagacgattgtatagttttggcatttaactattggttcaattgaaagtccaaagaatcgagcaccatctaccagtgcattatcgccagaaaggaaataggcatgccatgaagaactattgccgaatacaacgaaaaaatccaaaaatcactgaaaaataattggaagaaacaatttgaagaataaatgattcgaagaacaattcgcttttttaaaattattatttaaaattgtaattcttttgtttacctttattttaaatattttatgcaaatttaaatgatctgggcaattttttgttaattttgagatttttaaacaaattattacatacaaaaatttttttccaatttatggaaacaaaggtttacacagaaaacattttttacaataatatatttgcttgactgatcacagatgccaataaaatggtgaatgacggacgattgattaatcgctcagattgatcaaatcgaaaaatattaagcagaaaaagctatcatgaaatatttatgattgggattcgggattccacatggattttgttttgttttcgagaattttggtcatttctcggaaaattggatatcgaagcgatcgatgggagtgaaaaacataagaaaaaattttgtgatcatgaagattttttcaagaaaaagtgctattttattattcaatacagcataaaaaagcatttttcgtgagtcaacgaattttcgtccaagcaatcatcaaaaaaaacagttaagttatggtgaatttttgtacagacaaataaaacaaaccggatgaaagtcttggaattttggattgaattccaggatcaatgattcagaatcccgattaatatttattgattattgatctgattattaaaaaatcattttgacaaatcaaaaaattaaagaaaatttgtacaaaaaaagaaagaaaagacagaccaaaagtgatcaaatgaggatgggatagataataccggaaaaatgaacaaataagcgactaaatagtgatcgacgaacaaattggtgccaaaaaaggcacacaaccatttttcaataacttatcattaggtttgtaattgggcaaaatggagttgaaattcgtgatcagcgagcgacccaaaaaactcctataaattgtggacaaataaaacatattaaaaaatggattaaagaattaggacttcatcaaaaattaattaaaactgattctcaaacaagtgaaattgtacaaaaattcattgaaatgaaaaatgaatataagctaaagggaaagaatttgtcaaaagaatggcaccaaaattatgccgaaatttgtaagaaaactggaattggatatgggacaattgacaaatgtaagagcaaacttggcattcgctgtaaactaacttgtgatgaaaaaatggaaaaannatattggcaa

SEQ ID NO: 10022 - DNA, 1170 bp, Heterodera glycines
  unsure (1)..(1170): unsure at all n locations
atctgggcgattttttgttgattttgagaattttaaaccccaccagatattcacaattttttttttctatttatggaaacaaaattttcatagtaaatattttttatacgataatatatttgctcgactgatcacagatgccaataaaatagtttgtggtaaattggccatggaaaatgggatgacaaaaacttgagaaaatgcgttttttatgtggttaaatggcccaataagaatgttttgacaaaatgcgtgctgaatgaataaattaaaagtttttttgtagcataaacatccaatgtcagaagcataaaaaatggattgggaatgacagaggatttattgatcgatcagactgatcaaaacaatgttatggagaaaaaactattataataattacgattgggattcgggattcgacaaggacccttttttgcttcccgaaaaattggacatcaaagcgatcgatgggagggaaaaacatgagaaaaaattttgtgatcataaagatttgcttacaatagtaatgaaaatttttatatgaatatgcaatttgattttacatataattcattatttattgaaaactttattaatttcgtaattttcttattttaaattaccaaatcaaaataaaacatcataaaaatgattaaattaagaagaaaaatcattgacactaatgaagttattcttttcaataaaatataatcaaatatttcaaaaaataatttgataataataaataaaataaaataaaataggaatatattcatgcattaatttttaaataatacatttaaaaattcttaaatattcattgtaattgtatttataattatcctaattaatccaatccaatcaacaaataaaaaattggaacaaaaatcatttgccgaaatttttggagaaaaacggaaagaaaaagaagaaaaattggaagaaaaaagagaaataattcaaaattccataaaataaaagagaaaatcaagcaaaaaaaaaggaaaaaaattattatgtcaaatgaatataatacaaaagggagaaaatattcgccaaatgaatggcaccaaaattatgccgaaatttgtattanaattggagtaagccatgtaacaattaatanatggaagaaacaatttggtattagcaagaanatgataactgatg

SEQ ID NO: 10023 - DNA, 1901 bp, Heterodera glycines
  unsure (1)..(1901): unsure at all n locations
atgataactgatgaagaagaaattgagaaaatgaaaaaatattgggaaataaaaaaagaaaaaccaaaaatgagtgaaaaggaaattgctaaaaaattgaaaattcatagaaatagcataagaaaatggaagaaacaatttggagaaaaagaacaaagatttgttgggattttaaatttgaaaatcttctttaaattattaattttctttatttgttcaaaatatgattagggctggaaattatacggaaccatatttgtttcctggactatggacggcctgaatttcatctttcttaaaaatcgatagatttctttagagttgtacgggaccgggacctggacacggacaactgagtacctagctcccggttttgaccagttttgaccgggaccgggaaattcccgttttttcccggttttcccagccaaaaagtcccggtttttcaaccaaaaaagtcccggtcccggtttttcccaaaattcccggtcccgaccaaccctagatttcttcataaatagtcaaaaaaaaagagttatatttctgttttttggtcttttttcacgaaaaaataataaatcttacattaattgttttgtttgttttttcttctaaaccgatataattcggaatatttatgcccatatttttgcaattttatgtacatattttgcgattttgatccatattttgcgattttattttatattaatatattcccagtcctaataatgatcattgaattttcattttttgtggattttgaaaaaattagagcagccaaaaatttttgattatgaaaataaaaacttctttgcaaagaagttatttgcttgattgatcacatatgcccataaaattctggtgatgatttggccatagaaaatgggacgcaaaaaaagggggaaaatgcattttttgaataacagaagcacacatcgcgtgaaaatgggaagattgataccgaataaattgaaaaataaaaagccataaaaaattaaatcaagcctagtcgaaaatgaacattaaatgttaaagcattcaagactcttggtccgagtgcattttgaaaaaaaaataggaaaattctaagaaaaaaatactcaaatgaaaaattaaagaatgacgaagaaagggaagaagcacagcctgggaaatcgatggccaaaaaattgtgtgatcacaaagatttattatttgaaaaatgctaattgacgcctcgtcaccgcataaatatgggaacgaaaaattagcataggcgaatgatgattgacagcatatttgtggccaaatggaccaccaaaattgggggaagaaaaaaaattccattagaaattaattggataaaatattaaagaaaaattaagaattatttaaattattaaaaataaaataaattaaactaatttttcattaaaattaaaaaagtacggtccgttagattttgtccaaaaaattataaatttttgtgaggttgggttggattttaattactagtcttgcggtgcaaatctgagaatgagcggtatcgggaaacaaattaacaaaatttcaaaagtcaaaagcatgtccaatattcggaaaaaaaggaattttcgactgcaaagattcagactcaccaaataaggacaaataaggaaaaggacatttggaataaggcccaattaattagcaaaaatgttttgattggaatgaatattgcacttacaaaaatgaaggccaaacaaaaatttatattgngtgggagccaattaaaaatgngattaattttttgaaagaaaatgggacacgacgggcagtggcaggggtggcggcgtcatttgcgcattggtggcgaagaatgnggggcggacaaaacatcgacggcagcagcgagcgaagcgcggggggggggggggggg

SEQ ID NO: 10024 - DNA, 2499 bp, Heterodera glycines
  unsure (1)..(2499): unsure at all n locations
cccccngtttcgatagattgtcacnncgctcctttcgggttcaccatgaacacggtgggcacttcgagtgcgtcgtaggcaattttgtcactttcctggttgccaaagccggcaaaaaacggcgcgagattgaacaattcctttaaattatcaaaaaaaagaggttttttatgccattcgaaccagccaatttcactactgtataaaattgtcgttttacattactgtactaactactgtaacctccttaacagcaatccatgtcatgatgctttcactgctgtgctcactttttgacacatacagtaacatcttccgcgttaattttgctcactcacctttctcgactgtagctttttttcatttgttccctactgtaacctctctaattcgcttactgtaatctcgacgatctcttggtgttgctctgttgagctcaccccttttataactgctgtacccctggcgccatccccccccccccccttcttcatataacatttccagttcaacctttcaactactgtatcccgttaagttacggtatttgtatatacagtaccttcagtcgctgcatgcatacaattttgacccgctgcgggtctttcaccgccgttttcactgccttttccaacggttcataggaaagcaaaagtgcgcctgagggcatgttcaattctttcaaaaaatcccttgtcattgtgccggccgcggcgggccgtgccgaaagataaaccagctgatagcctcgctctttgatctgttcatacaactcgcgcacacttttctgcatccaaacttttcctggatcaaaaatgtatttacgacaggacggcaggcaccaaaattttaaaaaactcactccttctctttctttcgctctctctcttttctctctctctctcgctcactctctctattttttctctccttctctattctctctcattctctctctcgctctctttctcactccttctttttctctctctctctttgtctccttctctttctctcgctctctctctttctcactccttctttttctcaatctctctctgtctccttctctttctctctctcttttctctccttctctttccttctttctctctctctctctcgctcctatacatatcaaatgtctgtcaactaactgttgtttctctgtctgtctggttagtatctaacactttgtcaaggcttgcctggggctcgattccgtgacttgtggcccaggtgaaaatttggccaaaaacaatcgatattccaaaatccagccggaaacctcatggcttaccaagtagcatgccgcgaaggtcacttttcgtcaccgtgccgtcaatgtccgagacgaccagcttcgcattgttgtccaaataatacagggtacagttcacactcagcatctgtcccttcgcatttttggccgaaaattgtaccgaatatggaccggttgtcttcaaaatgttgctcaacggtgccagtttggcattccgttcatatacatccccattttcgtccgtccgcaatcccatgccgtcaattgatttgccattgactgcaatttggacgggcacgccctcctcctctgccgccttttggtgcccatttttggcaacaatttctgtgccaaagtgtaccaggatgggcgaagatgccaatgttccgtcactgcgtttgaacacgataaaatcggaagcacctgaaagttgtggagtttcttcccaacctctgatgaggtgtgccaatatataatttcagtaagctcaagaattttcaaaaattcatgtggtgtcaaaaaagccgagactttgaaaatttcaaatgaaaattataatctccatgctttactaagaggcgatgtcgagaaaatccattatattttcaagttttatcaaaattgactattttgaaaaatttaaaaccgatgcgctaccaattggaagaagaacacaaaatcttaaagagcggagtagtcccgtatgcgggaaataattagatgatggataaccgtagagatgatcatggcgaatggtccgcggcgagttgggcggttccccacttacactggtaaatgccttttttgtattttttattttgatcagccataatacgcttcattcccaacaaaaatgaacaaatttggtatctaaaaaaagattttgaaaaggagaatctttttctaagtgaatgctaagcaatttgacatctcagaaaaaagttgtgagagtttcaaatgttcatcacgttataactcaagtcctaggcagctctttctaaccaaaatgctaaatttatttttttctattgattctaaatgttcaaagtgattttgtacccttataaccaaaattattagaatttgcgaatttcatgaattttaatgtgttagagacatgaaaatagtacgccaaaaggagaggaaaagaaattcacaaaatttttcaccacaataacttttgagtgagccttatttttgtattaaatttcccttat

SEQ ID NO: 10025 - DNA, 1971 bp, Heterodera glycines
  unsure (1)..(1971): unsure at all n locations
gttccgtcactgcgttngaacacgataaaatggaagcacctgaaagtgtgggagttcttcccacnctctgatgaggtgtgccaatatatatttcagtaagctcaagaattttcaaaaattcatgtggtgtcaaaaaagccgagaatttgaaaatttcaaacgaaaattataatcccaatgctttactaagaggcgatgtcgagaaaatccattatattttcaagttttaacaaaattgactattttgaaaaatttaaaaccgatgcgctgccaattggaaaaagagcaaaaaattttaaaaaacgctttactaccgtatgccgggaataattaaataatggataaccctaaaaataatgataccaaatgattactttacttgtatgctgggcttaattaaatctaatggctttggagtcaacatttttaccctgcaaatcgttcctacatttttttaaatcaatttttggtaattaatattaattattcgttaattgttttatagcttctcaccatgtattttcatatgtttgaacacttctgacattgtgtcatcaattagattggcgcaaagaattggatttgtatcaaaaattgttacaaaaataataattaaacatattatttttgtacaaattgggtttgggttgttgataagcaccattctgatcactttcaacttctaaaaaggtttaaaaaatttaaaaaaaggactgaattaaaattggtttaattattatttttttaaataatttaattgtttaaattaaattagagctggtcgggaccgggactggtactgaaaaaacgggtacaactgagtacccagtcccggttttgaccagttttgaccgggactagtcccgggtttttcccggttttcccagccaaaaagtcccgatttttcaatccgaaaattcccggtcccggtttttgtcaaaaatcccggtcccgaccagctctaaattaaattgaataattaataatgtacccttgaagaagggcctaaaaattagagagaccggaccggatatggtcttgccgcctagactcccggtcaatcccgagtgttttcgagaaaccccacgagtttcggcggcaaaaccaaatttttttttgtcccggaaatcccgattccgttctttccaaaatttctgatcaaatgtaaaaatcctaaaaatattgaacggaaggaactcgggttggatttttctgaaatttcgacaccaaatctaaatagggacaacaaaatattttcgagaaatttatgcttcaagtgtttaaaatccagtgaatatgactttttgtttttaaatttaggcagccttgtgctttggtggccattttttgattggcgccccggttggagagagctttatcaatttttttcaattttaaagcctcagtctatgggctatcatcggtgggtggcttaatttaaactaatttcatttttaagagtcaaaaatggatttatttgtttgcattaacatgaatgcacacagcaatgcaaacaattgcccgaggggggggggggcggcgatgaatctcaaaatccaaaatcacagcctaatcccaaaacttggccaagtgtttgcgtttgtttcaaaatttgaccatatttcctaatcaatcacatcactttttttaccaaattaataggcggcaaatttcgaaatgcgatggcgaaattttttgttgttgcacttttccatttaataatcttcacaaagtttgcccattccgttggatccagcgaaccgccaattccgcagaaaatcatgggggaaaaaacggtttttgagaccatggtttagcagtgatggaaattccaacgtctaactttgggaaataaatccgaggcttcaaaaaatttcgggaacggaattccgactccaaaaaggaaattggaattccgtgccatccctggtcacacttcattcccatttacgcgtcataaatttattgaaa

SEQ ID NO: 10026 - DNA, 3086 bp, Heterodera glycines
aattccctatttttcagtatgattgtaagacttcgttcaggcctaagaatccattcgtatctatggattctgaaggaatgggtggtgggtgggtggtcaggttcggatcctttcgatctaataattttatgcattttgggttttttttaaactttattgtgaatttttaaacaattcatctgcttcaaaagttacagtgccttaaaaaacggaaatatttttttggcgccgaaacgaccctggcgccgaaacggcgtcgccgaaacgaccctcgcgccgaaacggcggcgccgaaacggcggcgccgaaacgacccgttcccgtacaattggtatctaaatgttggggattaatcgaaggctttacttttagaagtttttgtctaactaattttgggttctcaagacaacagacaaaaagtcgggttctattcacaagtttacgggtccaatcaaagacaatactcagtttcttaggccatcacttttctcttacttgaccaatccaaacattcttggtgtcaatcgaaagcttgaagtctacataagcttaaatataaactcaattctgtggctaaaaccaacagacaacaattattcttgaatacacttgaaaatgcttaatttcgaatttggttttttttcaaaaatgcaagcaaatgttcttttcttgtttacacataaattcattaaactttaagctttcaattgaatataggtatgtaccacgaatgtttggaatgaccgagtgagaacaaaagttatggtcaaagaaacgcgtaaatttgcagtaaagtcgaagtttttgtctaactaattttgggttctcaagacaacagacaaattcttgagtaaactcgtaagagctgaatttttttcttattgtcagtttttgctcttgttttttaattcttgaggactacacttttgaatggaaccaagaaaaccgcatttgaatgagggatttgataaaaaaaagtagatgtgaaatattgggaatgtgggtcgttttggcggcgccggcgttccgacaccagcccgagttttaggacaaacttttttagttgccgacaaaatccaacaagcttggtatcaatcgcaacaagcgtatcatgttttggaagctattgcttcgcgatcaaacaatttcaaaaaagtcataaaatgagaattcaaaatagtcgaaatctttctttataacttttttgcatgcttaaaatagttacttgggttttttgtaagactaatagaggcatgtgaagagctttcacaatgatgtcaagattgttggatttggtttacaatgaaaaaagttgtaaatagtactttaagattttttttcgcgtaaatttgaaaatttttctggctgctcaaaagttcaatctttaggggtgtattttcaactctcgcctctcgtcccaaaaaacgagaggcgagagttgtcccacccctggtgtgtaccacaccaaatgctttttttggtctagcttttttgtacgaaagcaaatttttttgaaattaattcaggaatgagtagattttattttcgatcaccaaaaaattcgtgaaaatgtgtgtttttggcatggttgcaaaaaaactcaagaaatttttgtttaataaatttcaagaaaaaattctggtaaaaatgaattttttgcaaaaatttaccaatttttccattttttttttctaagttcgttattttttttttttgtaaaaaataaataggaaatctcaattatggaattatataattcatgtattaaaatgatcttttcctttttgactaaaattttatgggtttacaaatttttttcaaaaaatcaaactaattttctgaaattttttgtccatatttcagcatttttgccatattttgtccatattttgcgattttttcgtccatattataatccatattttgggttttttgtccatataaatccggtccctgttaatcaaataacttatttttttgctgacttaaatgaactcaaaaatacttaaaaagtgttcaactatttgactgttttttggtatttttatgacttgttttttttgttaaaactacgcgccaaaattatttcggaggcataaatgccacaatttgagctaagatctcttcgaatgggtctgctctgcgccacgggttttgacattttcgcgccagagaaattcgcacaaatacgagtcaagcatttggcgatgtgtgccgtgttgttttttcaccgccacagtcacatgcgcgctctctatggataatccccttttcttgtaggaaatgtgctgcggtaaattcatttgttgtttttttgaagagggttataaaattaaagctcattttattatcaatattgggggaaggatcgggttgggaagaatgaggggaagcacccttaggtaacgcgtattgcgctaatttattcataaaaatggtgggaaggcagaaccctttcgttattttatgcaatgggaataaagattatcacaattctacgcgcccgctgttgattttttaaaaattcaaattttggcctcaaaacggaaaagtacccaaaagacgaactaatcagaggggggagtagtatagaaatgcaaataagagaaaagaaaacaatgaccagtggggcaaggcataggacaaactaagccataaataaaaagcaaaaaataaataaaaaacaacaaacagaaagcactgcactgaatggccaattgtgcgacatgcgtaagcattggaaagaccaacagaacgaattggcaacgcgtcaacagcagatcgatacgttgagagaaaagctgacaaaatcggagagagaagcgcaaagagaaaaagtgcaaaagggggagagagagaaaatggagcaattaaatgcctaaattaggacaatttggaacgcaaattgcaacaatgggaagagacggcgagaagagaaaaggcgcaaatggaagccaaattaatcggagagaagaatgagcacagcaaagcactgatcagacgggagacggagaacaaagtgcgcgagcaaagggcggagggaatgttacggcaaaatgggcattttccaacaaaatatttctcac

SEQ ID NO: 10027 - DNA, 2881 bp, Heterodera glycines
ttttggtccagctggaagaaaaaaattttggtaaaatttttttttttatcaaattttttatgcaaagttagcattaaataaatagagaactatttaatttcttgtgccgagaaaagtctgaaaaagacaatgaaaatgagtaataaaatagaacataaattgaaatttcagaaatttagttaatccgctataaatttccctttaaagagcatatattcacattatgtctttgaatttaaaacttttttaaatggtggctgtatatatctagaaaatggaatactagcatgttgaatactgcagaaatgtttggccctcgacgaaaaacaatgaaacttttagccaagcattaaatgtctatttgactaagggtggaaattataaattacccaggaactacagtgaggtaaagtccgtatctttcagttggatgtgcataacgaaaataaatgcggaagtcaaaataaagacactgtgttttgtttctaattctgaaaatagggcatcaatggcctatgatattcattaataaactttagcgatattttaaaatttctcaattatattggccaattttataaatttgtttcattttggtcgggttattgtgggaagcaaaaatagtacggcttttaggcatttattattttggtcaactgagagaaaaaattttcggtaaaattttatttttatcaaattctttatgcaaagttagcatttaaataaatagagaactatttaatttcttgtgccgagaaaagtctgaaaaagacaatgaaaatgagtaataaaatagaacataaattgaaatttcagaaatttagttaatccgctataaatttccctttaaagagcatatattcacattatgtctttgaatttaaaacttttttaaatggtggctgtatatatctagaaaatggaatactagcatgttgaatactgcagaaatgtttggccctcgacgaaaaacaatgaaacttttagccaagcattaaatgtctatttgactaagggtggaaattataaattacccaggaactacagtgaggtaaagtccgtatctttcagttggatgtgcataacgaaaataaatgcggaagtcaaaataaagacactgtgttttgtttctaattctgaaaatagggcatcaatggcctatgatattcattaataaactttagcgatattttaaaatttctcaattatattggccaattttataaatttgtttcatattggtcgggttattgtgggaagcaaaaatagtacggcttttaggcatttattattttggtcaactgagagaaaaaattttcggtaaaattttatttttatcaaattctttatgcaaagttagcatttaaataaatagagaactatttaatttcttgtgccgagaaaagtctgaaaaagacaatgaaaatgagtaataaaatagaacataaattgaaatttcagaaatttagttaatccgctataaatttccctttaaagagcatatattcacattatgtctttgaatttaaaacttttttaaatggtggctgtatatatctagaaaatggaatactagcatgttgaatactgcagaaatgtttggccctcgacgaaaaacaatgaaacttttagccaagcattaaatgtctatttgactaagggtggaaattataaattacccaggaactacagtgagttaaagtccgtatctttcagttggatgtgcataacgaaaataaatgctgaagtcaaaataaagacactgtgttttgtttctaattccgaaaatagggcatcaatggcccatgatattcattaataaactttagcgatattttaaaatttctcaattatattggccaattttataaatttgtttcattttggtcgggttattgtgggaagcaaaaatagtacggcttttaggcatttattattttggtcaactgagagaaaaaattttcggtaaaattttatttttatcaaattctttatgcaaagttagcatttaaataaatagagaactatttaatttcttgtgccgagaaaaatctgaaaaagacaatgaaaatgagtaataaaatagaacataaattgaaatttcattctttcccctggttcaatccctctacagaaattagattattttcaattttttttttgtatactcgtgggtttcctataaagaaaatatgattcctcatagttttttttaaattgatacatattttatcattttttaaatgaaaatcctaccaattgagcttaataatcgcaaaaaccaacctttttttgttgaaaatctgttaacaaattgcacccaaatttttaaaatttccctcggcggcgcctatcggcaccgccggaccccttctttcccaaaagttttttgaaaaagcgctccgaaaaaaagtgatgtgaaaatcaaatctgaatttctattaatattcgatgatttagtccaaaaatgattaattgtttgaaataattgaagaaaatttgtttgaaaattttcattaatttaatttattataaaaaaccaaataattttgtattattttcacttgatataaattaaaatttgattttttttttaaatttttaaaatttttttgaatttttaaaatttcccggttggtcccggttcccggtttttcttgcggtcccggtcccggtcccgaaaaaaatagaggtcccggtcccggtcccggcttctcaggtcccggcaagtcccggtcccggttttggcaaaaattcccggtcccgtggcactctaaaataaagcaatttttgtaaaatgttttggcatttttctaatttatttatatctttttgtaagaaggattccaaatttcaggtgcatattctaaaagaggacgaa

SEQ ID NO: 10028 - DNA, 2720 bp, Heterodera glycines
aatgcttcatttaatttttttttttaaatgataatttttttaattccttttagcaaatggttaaaatttcaagatattccattattgattccaacaatctgccgctcattgcttttccaacattggacgatataaatttgagatggctttttttagcttcgttagactttgtactttcgaatgataccaaaaagataggatttgttcgaacatgaacaaagttattgtataaaaagcatgtattgtcaattgattggacccataaagtgggcaaaggtctagtttactggtcccgttttttttttatttgaaaagcctggaaacatttttctagggctattttatggtgctgagcacgaatccggcattatttttgacaaattctgaacccctaacccggattcgaactttgtggatccgatcaccggcgcccatacaagccatgtcgagtgcttttggaagaacttgaaaatgaagttcaaggcgatgtcggggactagccgcgaattgttgcccagttattgtgacgaatatatgtggagacagtttacggaaaaaaatcattggcggcattcgacaacattgttgatcaaatttcccattattaccccgtgaatgcgtgatcaaatgatcgcttatatgcagcaaatcacatttatttaggcatattatatgcacaataaaaaaaaattttttgtttgaaaatatgttcgaatccgggttaggggttcagaatttgtcaaaaataatgccggattcgtgctcagcaccataaaatagccctagaaaaatttttccaggcttttcaaataaaaaaaacgggaccagtaaactagtttgccgcaaatggtgccatttgaattggtgaacgaatggacgaaggaaaagctgacattggccaaggcaaacgaaaatgaattggacaattggataatgaaacgatgcaaaattattggggagaaagaggaaaattgggacaacaattgcaacaatgtgttcttttggcttgttggtggcattgattgcattgggtgagcaattaaaaaaaggcatttgattttgtttaaataattcaaattgcgcttaattaaggccattgtctccgccaccggcagaagaaacgggacaaagcatcacaaaagtggcgtcttctgctgacgatgaatgagtgacggacaaaagaacgaaacaatggtgattagtggaagaagaaatgattatttaagaatggccaaccgatcataattcatcagtgatcaaatgcaatttatgatgaaaacctctcaatttcggtaaataaatcggacatgtaaaaatggcaaaaaatatatgtacgaaacaaaaattttgagatttgcacaaaataatcaacaaaaattgacttttcaggcagggatttccgggatcactgatcactagggcttccaattatatggaaatccatatttttttcctggacacgcaagaaaaacatgtttttagcttggtttgaagcttctaggatggatttctatatccatatttttccatatttcgcgatttatgtccatattttggcatttttctacaaaacccctattagaacggccctcgtcagctaaattggccgttttgaccccaaagactggaaaattttccgaaaaagacattttttaacaaaattttgtcgaaaaaattgattaaatttaaattttcttagaaattggttatttatgtcaaaaataagcaaaaaggaaaatttcggtttttttttgttggttttcattaaaaatagctttttttcttttaaaacgagttcttataccgtatttagccattttagatgtattttaattgaatttaatgaatttgaagaatatttttgaaaatttacccctcaattcggaaaatttatgtccatatttttgctattttatgttcatatttcgcgatttttcctaggttttattgccatattcagagattttatatccatatttttggaagccctactaatcactagggctgggacaaatattttgataaaaaagccagaaatatttacgaaaaaatatttttctgtaagtttttggcgggccaggacgttttcgcgtggttgcatataaaagagaagtgcaaaagcaactctaagcacacttattgatgtcaacagaagttcaactaatataagaaaagaaaatttacaaaagcctaaacttaggcctagtctaacaataagccattgttcgagttgcctgtgtatgagttgtcatgataaccttaggtttaacaacgaaatttatagttaaaaactttattgaatacctaacaaaaaaaagtttttctcttagttattaagacaactataataccatgagaccagggatggcacggaatttcgatttccgaaaatttttggggcctcggaatgccatccctgccatggacacaaaatgtcatgggacgcgtaaaatgtcatgggacgcgtaaagtgttgttgggacgcgtaaaatgtcatgggacgcgtaaaatgtcatgggacgcgtaaaatgttatgggacgcgtaaaatgtcatgggacgcgtaaaatgttatgggacgcgtaatatgttatgggacgcgtaaaatgttatgtgacgcgtaaaatgtcatgggacgcgtactatgttatgcgacgcgtaaaatgtcatgtgacgcgtaaaatgttatgggacgcgtaaaatgtcctgggacgcgtaaaat

SEQ ID NO: 10029 - DNA, 1133 bp, Heterodera glycines
ggctcttatgcagtttaacccacataaattttttttctcatttcatgattaaaaatgccaattaataggttttcggggtcgctggtcacgaatccggcatccgtttcgaccaattccgaactccggacccgaattcgaacaaaaaaattgagtttttttaatcaataatagttttttcagggtaaaagcttctaattcattatcaactatttaggtgtaaaacaatgtttcaatttttaattaaataaaaataagcaatttgcgccgaaaattgacaaactaaagccattctcataatgctattttgaaaaaacgaaaaaaaacttttttatattgatcccaaatccgcaccgtccatataattttgcagaaatttgaattttattttaaaaaatatatttaattttattgtcgaaacggcattgtcgaaaaggtattgtcgaaacggtcattgtcgaaatgtccaggagccacgaaaagggacatttttctacgggcggcaaactggccgcggcgaaaagtccacagcgaaaaagccgcggcgaagagtcgggggcgtttgggcccccgtttttgggccccagggtcgtttgggccccagggtcgtttggccccagggtcgtttggccccagggtcgtttgggccccaagtacagaaaaatgaaaaatcacagtaaaaacaactttttaaatttcagcataaaaatgtaaaaattaacagaaattcacgggttcataaggtaatttggacaataaaacaaaaaatcacgggttcattcgatagttgcgagaaattccccggagaaacacaaataatgtgaaattgattttttgaactcgcatctccaaaattttgtcatcccatcagaactcattttagcgaacgtgtaaaagtggccttcgtaagacaattttactttttgttttttggttgcaattgggttagccatttctgaaaaatgtccaaatcagaatgtacatcaaattggttaactattaaaaaataataggatttggaataagtaaaattgtaaaaaatgagcgaatgttaattaaacctaacttatgccaagtggcgagggatccctcaggcttagtttttagaatcttaatttttaaaaaagcacattttt

SEQ ID NO: 10030 - DNA, 2169 bp, Heterodera glycines
cagcaactcgagcattctggggacagaaaaagaagaactataagaagtcgcgcaagcggaccagccgtcgctgcaactccgacattgtgcacccgtcggacgaagtgtcgtcgcagcagcaacagtcgtcgtcatcgtccaccttgtcgcagcacaaccaccacaacgactgtgacgagtcatgcccgtggattgtgtggaaacactgaccgccacgcggacaccggcggacgggagcagcagggagaagacaaaacaaccaaaaaaagaccatgttgtgttgctgttttgttgtttaggaacgtcgtgttttacccatggacatccctctttgtctcttttctttaatttattttagtcgctattttcaaacagacacacaaacacctcccctttctcggacctcctctctatctctccccctccacacacacacactccccctcgttttctttgccaacccaatacaaaatgctatctcttctcctctctcgttcgctctctgttgttcgtgcgcgtacattattacacactctctcgtcgttcgtttgatgattatgatttacctaattgtttttcttttttgttttgtttttttttgaccacatttaggcggtccacaaacatctcaagttgtataacttatgtatttatcaaatttgtctccgatcgatgtaatgttatttttattattttcttttttatttatgtaatgcctattcgattttttttactatcagtttacacacacactttcgcctctccattcctcctccacacattgtagcgcattgatcaattctctgaccgattaattgattgattcaaatgataaaattcaaaaaaaaatgctttatcatcattattgttctctcttcctctcgctcgctctcccattgaacacggatatttattttgtcttcgtttattagtttcttgacacatccatcacacatacaattgacggacaaacaaacacgggaataaacacttgtcatccctacaaaatgtgaatgaataaaatcaatcacctgaccaccatcgcaccgcttaatatgcatgaaatttgaaaatgatgctttttgttgttcctcatcatttggcaatcattcttgtcccaattctcatgccatggattgtcgaattggatgaacttgatatattttttaacatttaaaatgctttcagtgaaagtcaatttatgtggtattaagttcgacaatcttttggctggtttgacttagttcggtgtataatttactaataaattgagcatttggcgccatttgaccagttgaattttccttcaacggattcttggattgtcatgtaaaagaatgtggaatttttgattgccccctaaaatgcggaattttaaaaagtgtcgttttttgaatggccagacattggcttaattagggttaatccacatgctttgcatcgtcgatttgtacatccgaaaacccattagaagaaaggcctcctctttttctccatttttctttcgtttattgctgtaaaacgtgtcgtcgttctcatttgtttgtagaacaccttattctagtgcgagtcatgcaacaaaagtgaccatttttccttaacattcattgtacgattttgttccgtattttaattttcccattaatttatctaatttgtcatttttcacacactccatttcatagggattgttttttttagaattgccgataaaacaattttttatttgcttttttttgccttttgtttctcgaggccttttgcttgtgattgggtcgattcgttggaaaaaatgcgaaatttttcaagcgaaacgcattgaaacaggcattgttgggggggggggtgcaaataatacaaataaagcacttggaaaagcaatggaatgtttggaataggttagtgggattttcaaaaacaatggtaaattttttgtataattcagaatgaaaaaaacactgtgaaaatgccttccgccaaaaaacctatcggaaccatgctaaagactaaaaaagcttttctgtcagataatgtcggcggtaacttagtggacaaaatcctaatataatgtgaactaatttggatatatgatgtgtagcaaagtttactgatatgtcccgtcttcgcatgctctctactggcgggcctctccacgcgggggactgggtc

SEQ ID NO: 10031 - DNA, 992 bp, Heterodera glycines
caaagctcggtcaacctccagaacagattattcgtgtcaaggtgtgttgtattaggcattccgcagctcactttagcagaacaaataaatcttcaatgtcatttccctctgatcatacctccccgaagagattccctatgatcagatcactttccactgggggagctttatttttcaaccctaattttttcaaaaacccaacaaaatcggtttacctcagttgggccggcacgattgggccccagaacttgtttggctattttttctttgtcaaccaaattcaacattgttagtatcattcgaaagcttaatatgtttagaagctttttctaagctattgcttcaccattagacaattaccaaaaaagttatacatgaaaattgcgaaaaagtcgaaattttgaagttttttcttaataaaattttttccagtcttgaaaattgtaaggctaatagagcatgtgaagagctttcgaatagtaccaacaattttggattacaaagaaaaaagctatagtgaaaaagcatgctgggacccaacggtgccggcccaactgagcgagtccgaacaaaatggcgatttttcgtaaactttttgccaaaaataacaaatttttccaatgcttttaataaaaaatgatatatttttttcaatttcggcaacgatttcattaaataaaatattttcaacggtctgggaatagtgaaaatgataacaaaataataaaaatttaaacttggtatccaaatatttgtcgaagcatcgctttgttctcagctaatcgatttcttaaaattccctaatattctgtgtttctgattaattccaaaattcttgttcgtttaggaataaaacgaattttttgttggccgattcttgggacatgggagcacagcaacggaatataaattcacgaaaatacagatttttttaatcagttcggagttgaaagggcctcaataaccgaaaatttgcccattctcgacagagg

SEQ ID NO: 10032 - DNA, 4972 bp, Heterodera glycines
  unsure (1)..(4972): unsure at all n locations
ccaatttaacaaaaccgcttatatcaaaggcataaaaattaagtcttatgtctaaaccggtttacctcagtgggcaagcacgggttgggccncagcatgtcatacatgaaaatttcaaaaaagtcgaaatttttgaagttttttcttaataagatttttttaggctttaaaatcttttggcttttagtaaggctaatagagcatgttaagaactttcgaatgataccaagattgttggatttggatgacaaagaaaaaagttgtagaaagttaaagtggaaaaatatgctggggccttcagtcccaaagccattttgccacttcagtcccgggtctgtaactcttcagggagtggttcccgccaaaaaattctttcattagagaccgaggggagtcgattgatatataatttctatacattttcaatcccgtcagtattcttcactttttcctttaattttctttgttcttgagtggcacttttcaatattttcagttggaccgtaggaaagtgttcagaactttggcccgcgcgggcattgaccacccgcggcattgcgtgttggtcagaaacgaaaaaggcgaatgtctgtttgggttccaaattttgaatttgaaagcttgttaagtaatcggagacgaattatgtgaatttgccgatcacattgaagtcaacggaatgactttcaataagcctttcgttgaaaaacccataaatgcggaggaccacaacatttacatctactacccgagttcggtggggggcggttcgcaaaggctgttcagaaaggtggccgaatcaaatttggccaatttgtgacactactttcggttgaggtcaatgatcggagcagttggtattccccggtgagcaccgttcgcacgcagggttcttatatttacgaggagttcatccctgccgatgggacagatgtcaaagtgtacgcagtggggccgtactatgcgcatgccgaggcgagaaaggcgccgggattagacggtaaatttaattgggatacttttgataataaatctcaatctcttttctcagggaaagttgaaagagacgcggatgggaaggttttgtgtgtattttagcatttttaaagtgaaacaatcctctttaaggaagttcgataccccgttattctaagtgctaaagagaagacaattgcgcgaagagttgtgttggcatttggggtaacaatggcactttggccgatttgctgacgataattgacgcgacatacgctttttttagcaaagtgtctgcggattcgatttgctaagagccaacggctgttcgtatgtgtgcgatgttaatggattttcgtttgtaaaaacgtcgaccaaatattacgaagataccgctaaaatactcggcaataccattttgaggcgtttagcctcttcgctgagcattccttggcacattcctttccaagatggtcagcctttcgtttggtcaagtattaattaccaaaaatttccttcttcagacgacccgccattagtgtcgacgcccagtggcaaaataatggaacttcgctgtgtgttggctgttattcggcatggagacagaacccccaaacagaaaatgaaagttgcggtgagggatgagcggttttggacatgttcaaaaagtatgatggaccgagaaagcgcgaattgaagctaaaaaagccgacgcaactgatggaaattctcgaaattgtgacaatttaatatttaaagttcttttaactggatttattctgctaaggtgagacatttgcttcaagaaagtctggagaaacggcaaacactgctcacaattagcagcaaaaatatggcgcgttttcttaaagacaaacgcgacgatttggccccagcagaggaaacttcggtgatgaacgaattggaaaagtgcgaggaggtcatcaaaacgtgggagcaaatgcgcgcggttttggaaatgttcgtaaacaaggcaattgtgaagattattggtcccacaaaaaaaataataaaaaagccatttttaggggttatttgatgcgctgagcacgaatttgatcttttttgactttgtttcgagccccaaaccctgattcgaacaatttttaaatttattttttatttaaaaataaattatttttaaaaagtcatcgaaataaaagtctttcctgaggttttcaaggtcgctgatcacgaatcagatacgcagaaaataaatcacaggcagtgttaacagcaaaaataagtcattctatgcggatattttattgtacgggctgatcttgatccaattccccccccccaaggattcgaatagatgcaataattagctggaaatattctgattagcagagtgattgaaattattctgatggaccctaagagcggttatgagacgcgcaagattatgggtaattattctgatgtactataattatcggaattatatctgacgagaacctgaaaaatagtaattattctgacgtgtaccagaatgagcggaattattctgacgtgtaccagaataagcggaattattctgatgtaccagaataagcggaatgattctgacgcgtgcaagaataagcggaattattctgacgcgtgcaagaataagcggaattattctgatgtacctgaataagcggaattattctgatgtaccagaataagcggaattattctgacgcgtgcaagaataagtggaattatactgagaataagcggaattattctgacgtgtaccagaataagcggaattattctgacgcgtgcaagaataagcggaattattctgacgtgtaccagaataagcggaattattctgatgtaccagaataagcggaattattctgacgcttgcaagaataagtggaattatactgagaataagcggaattattctgacgtgtaccagaataagcggaattattctgacgcgtgcaagaataagcggaattattctgacgtgtaccagaataagcggaattattctgacgcgtgcaagaataagcggaattattctgattaccagaataagcggaattattctgatgtaccagaatagcggttctgacgcgtgcaagaataagcggaattattctgatgtaccagaataagcggaattattctgacgtgtaccagaataagcggaattattctgacgtgtaccagaatgagcggaattattctgacgtgtaccagaataagcggaattattctgatgtaccagaataagcggaatgattctgacgcgtgcaagaataagcggaattattctgacgcgtgcaagaataagcggaattattctgacgcgtgcaagaataagcggaattattctgacgtgtaccagaataagcggaattattctgatgtaccagaataagcggaattattctgatgtaccagaatagcggttctgacgcgtgcaagaataagcggaattattctgatgtacctgaataagcggaattattctgatgtaccagaataagcggaattattctgatgtaccagaataagcggttctgacgcgtgcaagaataagcggaattattctgatatatcgacgaaaaataccaaatttaaaatactaaaatgattctaagactatttaattaatttttatggcattttttgcctatttcatactttacgggtattttttccaaaaaataaccataatttttttttacatatttggcgttttttgtacatattttggggtttttctttcatatttatgtacatatttgggccactttttgtatatatttttggcagccctacttatttgaatcctaatgaaattttttgaaattttgcaggctaatagaggacacataaggatagcgaatgataacaagataaaagatttgatcagaattttttatgatcaaaataattttatttttaattaaaaaatttctgttagaaattatttttgttttttatttttttgctattaatcgatagccctacgtgtcctctattagcctgcaaaatttcaaaaaattttattgagtttaaaaaaagttatggtcaaaaatgtgtgaaaacttgttaccttgcgtacttttggccatagctttgctcaaacttgaccaaattttttgaaatttagatgacttgtagagaaatgttagggctatcgaatgataccaagaatgtctaatttggttgacattgacaaaagttttgagcagttttttgttgaaaatttccatggttttttaaataacgccctttttcaatgctaatgttagtcccagcgtaatataataatgaaaatatagaaaaaaggatggcatttacgtcaaacaatgatcgatgaatcgccattttcttgccatttatccaatatccacgttcttttgccaccctctatctactgctttacttccatcttttctctttttttgtctataaatttcgatttgcacaattacaattattcatttatgcaaatatttattttgttttattttatttcccctttttcattttagcattatgcttttcctcctcctctccgtttgcctttttgttggactttttctgcccgtccatcccacagattctgcccaaagttcggccagtagcagcggacaattatcatcgtcaaattttgaaaaattgtaggaaaataaataataaatgaataataattaatttccattaaaaattcacacattttatgttcatcggaatggcggatgccgtcacatttgtccaagcttttgaccacctttcccgttcaattcaaaccaaaagtgccaacacaccggtgagctatcagaaggaagcaaacaaaatcgatctgattttcaacatggctgctaataaaggaacttacgaaggtgagcaaattaaataaaaccaattaattaattacacggcgattcaattttgggctcccagtgcaaataagcttattattatttagtaatcagaacgccaaaactttgcaaaactt

SEQ ID NO: 10033 - DNA, 1568 bp, Heterodera glycines
  unsure (1)..(1568): unsure at all n locations
gggagggacaacgaaacgaagacgacacgacgaggacaacgataacgagacggacgacatggctttggaatgttttgtccccccgggggaaagcgccgatcgtacgccccccaacccccctcaccggatgattagggaaaggaagggggggggtgaccaaccaacagaagcggaagaagcaatgttagtcaaagaattacagaggcttcccagatgaactgctctgcccaatgttttaagtttaaaatatcaattttaaattgaaaaaataaaactaaatttaatggttaaaattgggaaacttttttaaaagaataatatttctttggatcttttgttattgtttgagaattatctctttcttttcttttcaattctcagttcattagaaattcctttgttgttttaaaatgagtgtaattctccaattctccatttgttaaaataatgaccgcatgaaaaattatttaaaaaagatttcaagcgattttacaacaattaaatatctccgccctttttaattcgagaaaataaattttttaacattttcatttggcttccccctgccatttgccttaatgatccaataagtcacgaaatgattgtccaccatgtcaatctatgcccccgcgggcaaattggcggggacttgatttccgcacctcccccgccccctcctcgccgcttttccccgcacttcgcccattgatcgataaccttccgccgccgtcgttctcgtcaattttagcccatcatctatctcatctcatctcatcatcatcatcttcgttcgcccgctaagcaaaatttgcataaataaatcattccctcgttttttgttgccatttttgcgctattcattttatgttaattattattggccaattaaatatacaaaattttctaaatattgtttttaaatattttcttttttaaatttatttgtggtttcaaaatgacccattgtaaaattgcaaaaagtacaatgatttcttgtgtctcttgtcgctgattaaaatccaattttgctaaaaggttgtcgcaatttggcaaattatttccagcagacgatggcatttgtgtggtagatttttggactaaaattttttttagccttttacaaataacaattttataatttttttttcattttttgacaatttttcaaattaatttttatcagtcaaaaaacagcaaaataaatttttaattgattatttgtaaatttttttaatttttttattttacaacattcattatttttatattctgtaaatatataaatatttataatatacagaaattttgttttcgttttccggcatttcccggaatatgtgtcaaagaaatgccaaaatattgtgaaaacatttaattaaatggactattatattttggatgagaaaacaacaaaagatggcacagcgaaattaaaatgaaaacaaaaatatttttgtttaattttttctccatttaataatgatcatttaaattatcaccccattaatccctaagatgcttataaatnttacggtacacaaattgtttttctttttttggcatttaaa

SEQ ID NO: 10034 - DNA, 4131 bp, Heterodera glycines
  unsure (1)..(4131): unsure at all n locations
cgaccagaacaataagtcaaaggaacgtccgtcaatttgcgaagaatcctttgtcattgacatcaccgccatcgaaagtggtttggagagaaagaggttggccggaaaaggaagaaacaacagctttgaaattccgtacaacatcagcgatggagcgacatacaatttggaaaataacgacaatttttgcctgttccgtgcatttgaatggcttcgcatgaaaaatgttttgcaacaacaacgattttccgaatacaaacgtaatgaaagaaggcagctgagcgacattataaccttatgtcgggcttgtgggatcaacatgagcctaccttttttctccattgaagaatatggggagagaatccaggtaattctaattacgcaataaatatagttcttcttctaaggcttattatgaccgacttcaccctggaatgtatcgccttttctgcttcggaacttttgggaaaatgaagccactgtggaagtccaaagacatcgtgtataaacaggagctctgtgtgcttttcactgaaggtgatgcggggcaagcaggccactacgacccaatcaaatcaacaggcagattatttggtgccaagacaagctattgttttggggtaatatatgtgtgtaaattgagtataatgcaaatatttagtgcgaaatgccatacacacaccagacccgtcacaacggaaattgcaaatggaaatgtcgcaattgtcaacgagtaggcaaaacctttcgtgggacctgcagggatagtgacttttgtttgtcttgcctcggctgtggaaaggtatccgcataatttaattaaataaacaaacccttgtgcagacctttgagagccgtgaatgctttgaacaccatgcaaaggttatcaaagcaacaatcaagaagggggacaaagaagtgaaaatagagaaatcaatgtgcaaaagctccagaaaatgcgtgaaatgcggcgttatttaccgcgcaatggtctcttccttatctttcgttttaattatgtcagttttcagcaccaggacaaagagagaggtcacgtctgcggtcataagttctgccgcgtgtgtctcggattccatgcacctcgtgactgctacattccgtaccgcccaaagaagaagacagagaagcgaatcatattcttcgactttgagtgcacgacggatttccagccagatcctgaaattgcccgtttcaaacatcaggtaaaaaaattcccatatttcagtaacatagacaagttttaggtgaatttctgctatgcacacgtgacttgcacgagttgcatcgagaagggaatctggaaccagtcgctggagcagaaatgcggaatctgtggcgactaccggacgtacgcgtgggcaccattcgacttctacaacaccgaagttgagcgccgcttccgtgttgacgacccactggcatcattcaccaaatggcttttgaacttcgagactgagacgctgggactcgatcacaacgagcgtggaaagaaacgcaagcgcaccgttaaacagaataacaacaacaatggacaggcctgtttctttgacaacgaagccgaagatgatgaagacagcgacggcaatgatgttgagaacaactacatgctcggatacgatgaaggcggagaaaaaccaagatccgtgaagacctacgcctacgcacatgctggtatttacgaattaaataatcaataaacaataattcaggctcgcggtatgaccatgtgctcatctttggcgagatgctacgcatgggtgttcgccctgatcttgtccgtcaaggaaaccatctgctggagatgaaggcacataagaagggtgccatcacgacaactatcttccgggacaggtaaaaattatggaaaaatggcattatttattatattgacaaatttcagctacaaactcattccactgaagttggcctctttcgtaaagacgtttggcttgaacatcgatggagtggaaaataaaaaatattttccgcataagtttaataaggtgaaaaaatgaaaaaaaatatatatatatcaaaatccaataaaattttaggccgtcaattatggaaacgtcttggaaactcttccaccgcttgaggattactcaccaggcagccacttcccagaggagcggatcaaattggagaaatggcacgctgacaacattaacacacgctttgacttgcgagagatcatcgcagactactgcaaaactggtaaaattatgatacatttcaaagtattctgcgaaacttcagatgttcaaatcctggtacatggtgttttgaaaatgcgagagctcttcatggccgagacaatgcatgatttaacagattcaatcaccatcccggtagctgagaaacgtgattttttccaataattttaaatttcagtctgcctgcatgaaatactttgtagcactgtcgtaccaggataatgaacgcattgccattgtcccccatcttggttatgaaaagaggggaaagcagagcacaattgctcgcaagtacctcaaatggcgtgcgggggaagagatgcgaaacaacggctggacactccgcttcattgaaagccccgggggcgagtacaaatatggcaactatagcctagacggaatgatggagcgccctggaatggcgaaaaacctcgcgatcgaagtgcaagggtacgtattttatttaataaaaataccatcaatgtccgattatttaagctgctattggcatgcttgccccaactgttttcctgatgaggaggcgattgttggcggtggagagacagcaggtgcgatccgtgcgagggatgccaagcgtatcaaacaaatcgccagggactttgaagtagagatcatttgggagtgccacctgatgcgtatgctggaggaagatcctgcaatgaaggccttcttcgataacacgccggactcaggccctattgaattccgggacgccttctttggcggtaaaattcggctagttttttgtaaaacattccaaaatttaggtcgaactggacccgattggttggccatgggcatgatgaagccaaacggagagaagctgaaccgcagcatcaagatcaaagacttcaatagtctgtatccatcacggtgagctttataaaaaaattaaaattatgtcaattcaaaggaacatgttcaccaaatacccgattggccaccccaccctgctcaaaatggacaaaaacgtggaatggaccaagccggagcatatgattgataatgatggaataccgattgaggggatcatcaagtgttttgtggtgccaccccgccactgcttgttagacatcccggtaatcccgttccgaatgaacaacagaactctcttcatgctctgtcggaggtgctctgaaatgtatccaaaaggccttgtggaccctgattacaactgtcctcattttgaggaccatgaacgaggtaattctgtgtaaataattaaaatataatgcctatttaggtttttcaaccaccattacacacattgaattggaagctgctctgagagcagggtaccgagtcacgcgggtcttcagtgcgtacgtgtggcgacgtgcatgtgattggagcgacacattgtttcactcgtacctcttcaaatttttgaagataaaagaagaaggttggttgtttgtaacataaaattattataaaatgcttaagcatccgggtaccctgccaaatgtttggtggatgggatctcggaggaggagagggaagaaagacaacagcagcacattgacagctgctacgcaaagagcaaagtgcgtcttgaggcagccagaattaagccaaatccggggctccgctatattgcaaagctatgtctcaattccctatggggacgcttcgcactaaggtaaataactcaacaaaaaacataaaaactactgcacaggaatcggctgaccanaaccgaaattgtcgacagcaacgcagacctcggaaagctgctcaacgatgataagattgactcagtagcctcgacaactgacccgatcgggtctggatggtctgctataagacaanggatnngacatgtgtcgagcatgacacaagcaacgtaaaacatattgacttttactttaaa

SEQ ID NO: 10035 - DNA, 1652 bp, Heterodera glycines
  unsure (1)..(1652): unsure at all n locations
aaattattattttgcgcaaaattgtccctctaaaatttatttttnagaaaaaataatgaaaaatttgctgcccgaacgggcagagagtgcgtgcccctcattaattagcgagttaagtagggctgttaatgagctgcagcgacactgggaagtgcatggaaccacttattttttaattaattaatgccagtggcatttttttggcatttttatttttttgcaaaaatttgtttttacgtaatttttaaaacaagttgagcacatttcagtgtcttgaagaagaattgtacacaaaatggacggacgaagaaattggcgaattcatttattcattgtgtatttaaaaatgggctaattagcgagtgatatttattttatattttattttaattagtattaaatgatatggattttgaaatttaatttattaaacataaattaatttaaacatattaacttatttaaatgttaactaaattaagaaatgattaaaatgtttgcattattgaataatataaaatctaaatattaataatcgcataaatggaaccaattaaattatttaaatctttactaaaagctattttaaaatgattgattattaacagggctgcaaaaaatattcaaatgaatattttttcctggcttctccatgctctaaatagtaagaaaaacactttcttttttgtgtttgcgtataaaagtcggaacttttatttgcatatttttgcatattttaagtttttatgcatatttaatgcatattttgccattttttgtacatattttcagattttttgcatattttgccatttttcgtcaaatattttcagatttgaatatctcttaggaaaaatttttgaaaatacctaaaattaaatcaaaatctgaattgatgcgcgagtggttaacagtgagtttcactgccgaaaacccttgagaaattttgatttgaaattgcaaaaacaagcgatataatttatgaggaataaaattttttatttattttttttgtgcatatttggcaattttatttgcatatttatgtacatattttggtcatttttcgtgcatattttttgcagccctgattattaataataaaaatttaaatctattatataaacgaacataactatcgcctttttcccaaaaaataaattttaaaaacacaaattttgatttttaaatttagcaccaaattttaaaaatggtgcgtctaacgccaacaatagtttttgttttggcattgtgttgtgcctggcttttaaccgatgcccaaaactacggagcgatgattgcaaaatcgcaaaacaagcgggagacggaccaggaggagacgagtgcaacaacagaagcaacgacgaaggaaacagaagtgacagttggcgagcagcaggacgaagtcattaattaatatatgctaattaaaatggaaaaattaattattatttttgggcattagggctaaatagtgtaccaattcaactaatgacaatcgagacttaaaatgattcgagaacaagagagtttgtttcgagaattcggcatcgaaaaattgacccacctgagacgcgagacagccaattaaaagaatttactaaattcaaaactcaatggatttgttatgctaaatcaaaatataaattttg

SEQ ID NO: 10036 - DNA, 2963 bp, Heterodera glycines
  unsure (1)..(2963): unsure at all n locations
gtccttttttcattatgaaaatgagttaaagcagaacatccgaaatgacatttgatcagcaacttttacaattgtttaataaattgtttttgacaaattttaatttaaaattttgaaaaaaatttaggcgacggaaagccaaacacaaacgaatgcaaattgaagccaaaacctggccaaaattacgctgaaccgttgcgaaaagctgtgcgaaaagaataccgacagttgagcgacgaggagaggggaaaatatgtgagaaaattggggggagggcattaaaaattaattaataattaaattgaaaaataataaaataataaaaattaaatacagtatgacacaaaattgtccatttttggctaatccattattcaatcaatcgtaaagccatcatccaaaggacattttgttgagaattttgtgctctttcatgagggtttaaataatttttacgaaaattttttccaacccccataagaattttattttctgaaattttcccggtttcaagtaattttctggttttcaaatcaccatgaaggaatgatctgaccaaattagtaaaagaatttttttttgattagcttccaaaaaataggctcacttgaattatctcagatttttggggcggctttttctccaatcttgtggttttttgaaagtgaacatatcattttaaatcttattcttttggcattctgcttggcttgcacaatttcaaacaaaatttgtccggtagaactgtttaatgcccaaattcaagggtgaacggtatcattttgtgtcatactgtacctttgaattatttatataattaaaaaaaataatttccatttaagcatgccgcgttgaaagccttgaaggcgagcaaacagtacgacacactcgcgatcatccacaaaaatgtggacgggtcgggcgccgcacattcggggcccgcctttttgccgtggcacagggaatatttgaaaaggtgaaaattaaaaaatataatgtatttaattaaaattagaatcacaaataattatttccccgaagaaacatggctgagaaatttcgtaaatccgccaaaatcgctttttttagcaaattgtcatataccttttcttagatttactaaatcacaaccttcatggaattatttgatagacctaacttttctcaatagtccgaaattttcaaaaactgaccaaaaacttaaaaaaatgatttttctttttccttaggtaattaattagattgtgtttttattttaaatatttttgtggacaaattacctaacttgtttacaagaaaatattgtgttcaactgatttaatagaaaatataattacaaactattaaatgtagcaattaaatccaattaaattaatattagcaataaaaaattaatattaaaaaaaaaattaaaaggtacgaaatcgcactgcgacaaattgacccaaccgtcgcattgccttattgggactcgtcgctggaaggccatttgccgacgccggcggattccattctgttcactgaaaatgtaaagaatttaattagaaatttaaaatttaatagtatttaaatttaattacagccgaaaaaagtcaataaaatataaatgttttaagtttgctggtgaaaacaacaaaaaaggcgaaattgtgagcggcgactttgtcaactggagaacctttgacgtaattaacccctagtgaatttaattaattaatcaattaatgcattaactttttttaaaagtaccaattttacaaattttccgagaaaaactgatcataacatctcttagacacaacaaaattaaataatcttggcttcatacgatagttagtgggttgctctattaactaaaaattttcaggaaattttattcaatttttaaaaaaaccatggcaattttttcaatcttttcgctaacaacattctggaaactgtctgaaattttctggaatttatttggctaatagagcaaaccaagagctaattttccaagaaaaatctgaagaaaattggcacttttacgaaacgaccgagcaccactttttaattaattaattaattaattaattaattaattaattaattaagatttatcacatttcagggaacccgaaacctgaagcgatttgtgggtgaaatgggcactttgcccaccgacgaagggtaattaaggggcaattaatttttaacctttcttgtattcaattaaaatatattttaattccagtgtcgaatcattcatcaaccacgacaaaattgagattatgtttggctattccgcgcctcaaagagtcatatttaaaaaaaattttttttttttttgagtttaatttttagggctgcccatttttcgaggtccgatacaacgtcattgaagtgaaaatccgttgatctaattacctaattaattaattaattttttaagtatttccacggtggcccgcatatattcgtcggaggagagtaaattatttcggactttttaaatccattaaacgttaaatgccattggttttaccaattttagaagaatttaatttttgaatcattgccaagaattttgggtatttttttaatttttgggcccaccgatgtttttgggggttttcggggtcgtgaatctggcactaattttgactattccctaacccaaactcgaaaaaaatatccaaaattctaatttttcaagttgcgactttttgttgaagtttggttagggattagaattggttaaattaacgtcatattcgtgatcagggacctcaaaagtattttttggggagcctaaagtaaaaaagtaccaatttttgantttgaaattttnaattttcatttaatattttaanttaactnatcaaagtttgaattccgttgattaaagtatgcatttaattatttttaattacctaattaccttggagagtaaagcgaaggcgacatgggcgacattccaaccg

SEQ ID NO: 10037 - DNA, 3484 bp, Heterodera glycines
gtcgaatttactcactgtcgaaatggtccagtgtcgaaaatgctggaaaacagtgagagtttttgaaatagttcagtgtcgaaatttctctatgtcgaaaacgtagtgtcgaaattacttagtgtcgaaaatactcagtgtcgaattagcgatgggtttgaggaaaacgggtgttacataaataaataaattaacccaattttttctttttattcagcaatgcgcaagtccccagcatttctctgccggaccaatgcatccgttccaggcattttttatatttaattttttatagaaaaaacgattattatttattttaaaattttaatcataaaactttaattaaaatattttttttcaatttagccttggcagaacattgacggattggtgaacaaatacacggacaacatgtacgaatttgcgccccgtccgagctgctcaatgggcccggactgtggatcgaagtaaaaatatttgaaaacataaaaatttattaaattaacaaatattattaaaattttgataaataataattttaatatttaaataaaataacaaatttaatatttaattaacaactatttttaaaatttgatagaataataaaatgaatatttaaattaacaaatattattaaaaattttcactatttttaggtatttgttctgcgaccgttcccatggcaagccccgatgtgcggccaaagtccgaccgaatggcaattgtgccggattcactaatggcacgaaaaatttgcatttaaaattttatttataatttaaattataaaaatgatgtttaattcaggtgaagatgtttgtctgaatggcgaatgccaatatgggaaatgtgtgaaaaaggtagcaaaaattaatcagacaaagtcacagcggtgaataagggctctgaaaattgcggcatttttgatggaaaaatcgcgaaaatctcctgaattttaatcgcaaaaattttagttttgtttttaaattttataaaaaatatttattcaattcttagggttgcgacaaacttcgtattgtgtaaaaatttcttttttttcaatccaaagcaaaacaaattatcgaaaatttcccctacacacgcaaaaaaattaaatcaaagaaaaatgttttaaaaaaaaaatttttttggaaaaactccctggtttgggttcttaattttagaattttttgagcctaaaaaccggcccggcaccggcaaaaccaaaacaacaaaaaccgacaataattaaattattttcagtccccaccgccaaccacgccaaaaccaccgccaattgtgacagtgtcacccattgaggtaggtggtcaaaaaaaaacccagagttattatgaagaatatatattccatacatagtctggcttttatttaaccaaccactaattacggaaaatccctaattatctccataattacaaccataatccgtcattatcatagcaccaagatgtgtacagcaaaaaatttgctggcggagatatatttttttaattttttaatccgtcccttccaaaatagaaaaatcccagaagaaattacacacatgtgtgctttgattttttggttttattttacagtaatacaattttcattttttgttaattttttaaacttttaattccctaattatttaatacgctaattaagtcgccctgctttaatgagcacgaatgttgcgcgaaatgggcagccgacggacagtgcgaatcgaacagcgaatacatgagccaattttgcaaagccagctgcaaaaaagtaaataaatgttgttcaattagtttttaattgatttttaattatgcttaattaaatgtaaattttaacattaattctttagtgccaatattcgtacaacatgcaagagggtaaaaattcaataatgataaacaatattaattttatttattattttatattgaaaaatttaaacccatcatttttatgcttaatttgatatgccagcagttcatattgttcagaatgtgctgatcgtcataaaaattgcaaagctttgtcctaccaaatgaaatgcgattcaagctggatggtatccgttttaatcaatttaaattttatgaatttttatttaatttataaactaattattaaaaaaatataaataatttttataaaattattccgtgtaattgcattttaaggctgaaaactgtcgaaaatattgcaacaaatgcatgtaaaacgtatgcaaacatgcgctggcggttccccggggggagaaaaacgtaaaaaaaattcggaaattaattttattaatttttattaaaatatattagccacgctttcatatggcggcaacaatggtggctgtaaatcaaaccaatgctacaacgaaaatatttgttgtcaggtgaaaaagaaaaataaaatttctaaaaataaaattttttgatttttttaaatttagaacttttaaatacaaaaaataataattggttattgtacttatcaaaaaatatttaattacaaatttataatcctttatttttatgggtggaattaattgtgcaattaattggggtaattaataataaaattattgtacagcactgggcaatgaacggtggatgtaagaagaattcggaatggatgaactgcaactgtaaagtgagctgtggccaatgcatcccacgaaactacaaatacggaagtaagtaattaatatatgaattaattataattacctagttcattaattatttattatttatttaattatgcataataattaaatgtgtatgtgcacggttaacttttcatcacttattcattaattatacatatatattcgaatccacaaattaattatgtaattcggttaattaagcgaatcctcaaatatgaaattttcagaattattaactaattgactaattagcaattattggcaatttgtttttagcgtgctccgactatcacccgaaatgcttcaaatgggcaaagcatggtcaatgcaaatccaacggatgggtgttggcgaactgtcgccgcagttgcaactcatgcgcaagcatttggcacatcaaaaaggtatttaaatatattttttaaaattttaattgattaaaagtttatattctggcagaaattcagtttttttaataatttaatataaatttaattatctttattaatgtttaataaatttaaagatgtgtgccgatgggagggggaagcgcagtgttgatgaccatcacttatgggcagacgcaatggaagagacggtaattaattaattaattaattacttaattaggccgaataaaaatgaaaattatgattctaaaatatttaaaaaatttcttttccattctcattagccaatttctctgttgcgcatggcgcgcgaggcggagaaggagcagaaggaagagaaaaaggaggaaaagaaagaagagggaaagcaggaagagaaaaaagaggaaaaaactgaagagaaaaa

SEQ ID NO: 10038 - DNA, 4414 bp, Heterodera glycines
attctttcgcccattccaaattgtttcttccatttttgaattgttccataacttactccaattttcttacaaatttcttcataattttgactccattcttttgtcgaatattttcttcctttttgcttatattcatttttcattgcattaaatttttgaacaatttcaattttttgttcatcctgggcatcgtcatgaacatgtttttgcggcagggcatccacagttattatgactgatgctttttgaacggcaaaatgactacgggagtgaataatattcacaatttaagatttttgtggccaaaaacatcagtcactttaaatcggcatgccgacacatccatatagtaaatgacttaccaattaccgccccgagttgatttaccggtacttccggatttggtcacccgttgaatgcttcttccattgtaaattactcattggcatactccaattttcttgcaaatttctgcataatttaaattctgtataaattttgttgctattcttttttcgaatattttcctcattttgtttatattattttttcattgccataaattatttaacaatttaaattttttgttcatcagtttttgatttgttatgactagggatacgatttataggtttttcactatttttttcctgtgctccacgtggcctgaaacacacgaaaaacgtgttttttcggctgttgttaaactacttttcgagttattagcaactattttgggggttttttagaaactaaaaactaatttttatttctttttcgggattttcgtgcctttacttttttcaattttttggtccctattatagtgcctttttcgagatttttggtgttttgttgcctttttagtcgtgctctagtaatcattcaaaaaaattaatttacaacatccccgatgttgaagcagcagcattcaaggtgatgttgagcttcattacgtagatgatttgagtgaattgaacgaagacaatactggcagtgctttacgccgatgaattattttgtaaattaaatatgtaaaatattatttaatttttaattagccaaaaagtacaatatccctaaccttgtcgctctttatttacaagtttccatttcaaaactgcgcaatgttttctttgcatatgctcaggctcgccttttcgacttggagttgcggccatcaatcgcttagcttctgcttaatcatctgttctaaacatgaaaagcattcgaatgataccaagttttaagaaattggccgactaaacaaaagttatggccacatcaatttaaaattgtacgagttgacattgacccatgtaatttaggactttgtgcattgttatttgagttacattgacaaaaatgctgacactttgttcaaagctgatgcttttttgcaaactgaccaaaatttattgtgtgaactttttggacgtgacgatttgcaaatccgtgaagaaatttcactttggaaagctgtacattaatagaaaaagcaaataattaattagggctatcgaatggcaccaacaatgttaaatttggttggcaaagaaaaaagttatagccaaaaacttgttctcgtacgaaaacggcccgtgcaaaaacgaccccgacccccctttttgatggtttttatataacgagtcgcaaatcagcatctttgattttcatcattttcacattttaaaagttctgaaaatagataaactaatttatccctattaaattttcagtgttatggcattttttaccttagggattttgagtctaaagccgacctatttttagttgggcattagggtccgaaacttggtgtttatctgtgccgaaataagcaagaaagtttctcgaacccaactttgattataaataatggtatttaatccttttgttgatttttaaataaaacctttaacgaaaaaggcagattcaagcacttttgatgaaaccaatttttaaatttataaaaaaatgaaatttttttttaaaatatatataaaaagcaaatcaattttttatcggaatggttaattaaaaatgcggacatggagctaaaattatctccttaatgttttaatccccattaaagaacaaaatgtttcttccatctttcaattgctctaatatttactccaattttcatacaaatttcttggttcgagaatttatgtatatattgaaaaatttaattttgctttcggccaaatcgttgtccaagctctaatctcaaaaagttaattattttttaaatacataatcggaattccagtttttttttagcaagaaccccgggattaatgtggaaatttttgataaatcagaaattattacacgacgaaaccacggctttttctctatattttataaagaccaagcaattttttagtccagaattaacgtaacatgatcagatgaagctggccatccactcaatattaaacagactgatcaaattgaaggactaagaaaaatcatatacaaaatgattaataaaataaacacaaacaaagagaaatgaaaagttcagttaatgaaaaaacatatgctgaaacaaatgccggatgaagctgttggtattggcaccaccatggcacggatattattggcattgtatggctcgtcccttctatattctctataccattcctactaatcatatacaaaacagggatgggctttcgctttcgcgtttcgcattttggcgcgaaacgcgacataagaatgagagatgaaattctcaaaaaattttcaaaattcaacctaggctaactttcagtgaaacctgtttaaaaatggtcaaaattttcaaattttccaccggcggcacctatcggcactgccgtgccccccaaaaaaaaatcgatcactaaaaattaattttatccaaccctaaaaacattaaaaaattatcaagtacgaagccgaatgggcttggaaaatttttcagaaaaaatattaagctagcagtcatttttcgaaagaaaaagcgaacagtgaaatcaaaaatcttttagcacacacagtgatgaacaatctcccgaccacataacattcttggagccccaactgcaaccttcacaaaaaattgggaccaataaaaattaaaaaatggctaaaagtaattttaattttctaaaaatgtgtaaaaagcatttaatatttttcataaagaaaaatgctaataatagaacgaaatgttaatctctttaatgtatccaatcctcatttattcttccccaaagcgtttcttccatttgtcaatggtccgtcgattaattttcaatatttttgcaattttctcgtcactcatttttgggttttctcctttcatttgccaatacattttcattttctccattttttctttctcatttattctttcattcattccaaattgtttcttccattttttaattaaatcatggccaactccaattttcttcccaattacggcataatttctcttccattcttttttcgaatattttcttcctttttgtttatattcatttttcattgcattaaatttttgcacaatttcaattttttgttcatccgttttcaatttgctttggtatttgtataatcccaattctttgatccattggtaaattttctttcgatttgtgcccaattttttcgctattttccattcaattttattccattcttttgttgaatattttcttcctttttgtttgatcctttctttaatctgatagtatttttgaacaatttctctttttttctgttcattttctttttctttttcttcccatttttctccaaatatttcttcaaatgttttttgctccaattttttcttttccgctgcaatttcaatttgacaaattaaaaatacaattaaaaagaaaaataggaataatttcattgttgacaatttttctttttcttaaaaattaaaaattataatttattcgatatgaaaaaaagaaataaataataataaaaatatttctcaaaaatgaatttttctcttccttataaatttacattaatggtaaaatattgataggatcactatatccattaaattgtaaagtgaattttttctctctactgaatgatcgaaattaataattttataataataataataatataaataaaaactgtttcaccattaattaaaattctaattctaactagagaccggacaagagggtcggtcggtcggtttcggtataaaacccgaaaaaaaaccgaaaaaaaaaccgaagaaaaattttcggtatatcgtttcggtttcggtttttttttgaatttttatattttttcgcaaaaaaagcaataaaccattcttattaatagagaccggacaagagggtcggtcggtcggtttccgtataaaaaccgaaaaaaaccgaaaaactcaaaaaattttcgg

SEQ ID NO: 10039 - DNA, 1318 bp, Heterodera glycines
aattttcgtcgctaccccaaactcagaacattcttataaataacgcactcttgctggcgctaacgaaatcagatgattaaagctaaaaaaaaggaagacgagcatttaaaaataaaaattgagtttttcgttaaaaaattttgttgatcactacccgatcggggtccccgacccccgacaattgagcttccccccccgacccgacccccgacatgtcgcccctgagggctcgggcttaactctagaagtagggctggccgggcacggattcccaacccgcacgcccggttttttaatacccgagcccggttttttgaaaatccaatacccggtacccgacccggtaggtccgggtacccggatatcaaaaccaaattttttaaataataactaccttattttaatagaattttattttaaaaaatattatatttttacaatagccccgtaagaaatttagaagaatttaaccatgtatttcttgataacatttttggttcaaattctgtaaacatattagctaaaatcaaaaaatttggtcattttgaataaaatatgtcaacaaatcagaagtaaattctcaaaatttttttccaggcggcgcctatcggcaccaccggatcgcccctgctctcgaaaagttttttggaaaaagcgcaccgcaaaaaaaagtggcttaaataacaataaaaattgggcaattaataaagcgtttatttgtgaaatattatattttttatgcttttttaaaagattaaacttttattttcatgcaaaaaaaattaaaaaagattttgggtttttttaatacccggttttaccgggtacccgacccggtaccggtttaccggagcaattccacatagttttttaaatgcctataaatgcactcattttacatttgcttaaacactttttaacataaataaaacataaatctgatatttattcacgaaatttcataaatagcagccacttgagaccaaaaattaaaaaaacaccacgtccttgaaatcgcttacgccatgaaaattcttccacgtatttttcgagaattgcacatccatatggatacttacttacttatcttttttgttggcgtaatacaacttcatttctagcccacattcgcaaattctttagtgtggagtaattgcattctcggatccattcttcaaattcagtatctggtttttgcaggagagtaaataagttacgaatattgaagtcttttaaaattccatgcttaaaaaattaactgtaaaatgagtatatttataggcatttaaaaatctatgtgcaattgctccggtaaacc

SEQ ID NO: 10040 - DNA, 4181 bp, Heterodera glycines
ctacctcaaaattagaatatttctgataaatcagaacaattgaagccatgtaataaaatgaaaatttgtattaataatgcgcaaataccagggatacggtgcattcactaaatagacatcaattgtgcctccaaatgtccattttcgcgttttgaagtgcgtgtcgacaagcccatcaaattggagcgaaaggagtgccaaagtgaggccgacttcggcagggcaaagccacgggaaaatgtgcagccaaatgtcgtggcaaatattgctaaaaaagcagaactaaatttttcagttgaacattgatgccgttggcgcaaacatttttatttgtcatcaaaattaaataaatttggtaagaatgtaaagcgctaacttgactattgcctgcgaaatttacagtagttttaaattctttttattatataattgactgtacatatgaattttttatatttaatataatttgcataaataaaacttatagtttaagtaataatgaattaaattgtaatttttgtcaagagatatatcgctttcactttttctatacaaatatttattgtgcactcaaaaacactaacaaaggaaggtcctagggtgtccgtggaatttccgaatgaaatttggtgggtggatagagcacccatgggttcttaagaaaagtgtttttattttctgctaaatgagcatgagtgccgagttatgacgtgccaaagtttttggatttttccaattaaataaaagaaataattgtttctctccgttaaaagtgtataatgatgtaaaggtagtgcgttagtcaaaattttttgggtcccaggttcgaatcctctacatgcaaatccattttagacttttatttttgttattttatgcaaaatcaattataaaaagaatttttaatgaaacaaaaactttaattttatttaattttaaaattcattaaagataatggtgcaataaatagcctttcagttaaaaataaattaatttttgtcaaaactttatgagtaacttatttgtcaaaattaataaaaaaaaaaaagaattttatgtcatattttatgataataataataattgattttggcataaaaagcaaaactaaaaatttaaaaatgaatttgcgtgtaggggatacgaacctggggttcagggaacgctgtctagagcactaccgctgcgccgctggacattgtaaagccatgcaaggaattatttattttgtttattcattaaaaaaactttggcacgtcataactcggcactcatgctcatttagcagaaaataaaaacacttttcttaagaacccatgggtgttctatccacccaccaaatttcattcggaaatcccacggacacccttaaggccacatttttgtaagtttcctagataagattctcgaatcgcgtgggaaagtcctgttaactaaagccgggtgtatttaaacaattagataaatttggtggctttacaataacgccctttttgtaaattagccaaaagcggtattgggaggggagtgcccctcctgtgaccgaagatggcactccctaatgatgtttgagagctttggtcaagcatttttgggtctcaaaaaatactaaaatcccacatttttcttgaacttttcagccttttcactgccgtcggtgacattttgctccacttttttgcggcgcttttattgcagaatgacaaacaaatttagcaaattaaaaaaaaattatttttctttctaaaaattaagcatttttagtcactataattgctatcgccaaagaatggcactttccaagcgcattaaggaagagaaaaataatttatgcgtcgatggacaaccaaaacaccaaaaccaacgaaaatgaacgagtgaatggagtcgataaaaagagacgcgcaaatggacaaatggaggaattgtggagaaaaaggcacaaaaaaaagatagtaaaagatggcactgaatggatgacacaaccgaaacatgatgggattgtttgtcaaaaatgaagacaaaagttgaaattgaaagaaataaaacggacggtattaaaaggatggcatttgaaaagcgataaaacggcacggaatgaatggcacagattggaaaggaaatgtatgagtatgggacattaattaattcgagtagagatggacggacgaccaaaggcggtacagaatggaattcgagtttgatgaatgaataaaaaggacaaaagtaggagtatcttttaatagctttaattgttctctatcaaaatataattttttttaaatttttcttaagtataaaaaaagttacaaaaaaatgctgacttatgattttttgaaattttatgaaaataattttttttgtacttaagtaaaaaatttttaaaaattatattctgatagagaacaattaaagctattgaatgataccatgaaatattaatttggtagaattcgagctaagttatgaatttatatgtgttaaccattttttgttttcaaacccattggcggatttaggaaacgcgcatgggtggcggtttttaggaaatgcaccagcagcacctgcaaaaagtgcgaatgagtgatgattcatttcagtacggaagagttattctaatgattaattaattatttttatttataattgaataattagttaataataaaagtgtatttggctctgtttcagtttacacgaccataaaaaattactcgaccatgtaataatttgacaaatttaaggcaccgtaacttttttaagaagcatcctaattaaacattcttggtattatttaatagccctagtgtcctttattttcctttaaaatttcagaaaatttggttgagtttcaaaaaaattctggtcaaaaaggttaccaaagcaattttttaaatttacaagccacaacttttttgaagcacaacaaaattttttgaaaccttaaaagcaaatagaggacacttagggctatcaaaagataccaagattgtttaatttagatgcttttacaaaaagttatggcactgatcaaaaattgataatttttatggtgatcaattattcaaccaagtataactttctatgtacaaatcacagaatcaccattccaaaagcaattcggtagcaaattttgtgctttttccagtggcttgcccattttctctagaaaaatttcccagccccctagggattttgaaaatttccttgagtcaagattttttgggggacactgtatttctctcacaaaaatgtttgtttgagaaatatttaaataataaattgaaattataattatggacagcaaatataattaatagattaaaatagttaaataacacaccatcccgaaaaacgagaagtgtaccaataaatagatagtgccagagaaaaacaatatatttttttctctaattttttgactccttttggcgtactatctatattttcattattaggaaaaacaacattcacttcgctatgtttagcttcttttctatatgttagatccacaccaaattttgcaaatcgatagagaaaaaaattctgcatcgatttctatgtttattatcatcgcttaaatgttgtcttaaaaagttataagataaaaaagttaaattattattctttttaaagatttaatggctaaaagaactttattacggaagcgacagaccaaaaatgcacgccatacgcgtgagaacaagcgggaggagagaaaagcgcagacgcagagggcgagacaaggccgatgggccaagaaaagtgagttttttcatcaattttatctcaaaaaaatcatttttttgtattccagccgctacacaaccaaatcccaatgccgaaatagcactgcaggacgaagcagggccgtcaacatctgctgcatcaacagaagaagcgatggagcctccgccaccaactccaggaccagtgccaacgccggagatggacgaggaaattttggaatttggcttttcgctgccatcgacatctgtcacaccaatcggcgatttggtgccgttttcgacaacaccaactgcgccaatggacaccggagagacgaccccgccaccgctggccattgacgagcgatcagagcgcatcgaacaactggagaagcagctcaaggaccgggacgacaccatcaaatttctccgcgagcaggtgcgcaatcgaga

SEQ ID NO: 10041 - DNA, 1376 bp, Heterodera glycines
ttctaagctattgcttcgcgattagtcaattaccaaaaaagttataacatgaaattgcaaaaaagccaaaaatttggaagttttttcttaataaatttttacaggctagaaaatctttttgctttttgtaaggctaaaatagagcaagtgaagagctttcgaatgataccaagatcgttagatttggttaacaacaaaaaaagttatcgtccgaaaacttgggctggcgccaaaacgtcggcgccaaaacggcctagtcccatttgcggggtccttttaaccaaaattcttaaaataaattttaaccgaatgtcagaaaaaatgaaggagttgagggataagaaataaaaaattttcagcaaaagtaaaaataatcagcctgtcggcacaccctgggatacatttcttaatttaaacttcttgcaaaaatttggtttttaaaaaattggaagataccaaatttgaaaaaattgtaattttttttttcattttttagatgttcacctcgtttatcgactcaaaaattctgtcagcccaaaatccgcgcacaaaaacaataaatgtacaaatatttgatgagaaaattgccgctttgtcgtcaacagaaagccaaaaagaaaaaacaatggaagccaaaaattgtcagaaaaattgttttaaaaatttataaattttacaaattttcagccctaaggctggcaaaattggagtttccgaggccaaggcctggcagttcgtcggttcagccacgaaaatatggtggctttcttccaattccggcacaatctgtgctcgagccaccggccccagctgttgtgccaaacaacagaaatttcttggcaaataatgccggcacaaaaaatgaacaacagagacagggcgatgaggaaatggtggaggaaccatttaatgacgaggcatggccaaccaaaccacctgttaatgaatgataaacagattaaatgattatttaaaatttaaggaaaatctgaaatctgaaataaagccccccccccaacctagatccccccaatgaaataaaaagccaccttttgtgggggggggggggttgaaatctctattttagaaaatatggtattcaaatattttttaaattgtttgattatttcctttattgtagaatcgtcaatctggcaatccgattatgcgccaaaatttgaaaaaaacggatgcttcagtggtgccaaatgccgttgttggtgaaacaaaacaagcgcagcacggtggtgcaattgccgctgctcaaaagagcgctccgatgaatatggcacatcaaaattggcgttttgttgagcaattgttgaaggagaccaaaggtgatcagagagacattttacaaagcatggaccaattga

SEQ ID NO: 10042 - DNA, 2236 bp, Heterodera glycines
acttatagttcaaaaactaggctggcgcgaaaacgacccggtacgaaaacgtcctggcccgatatccccctattaataattggcagtaaaactctaatgtcaaaaaatgaattaattattcaagcaaaaacgaagcgcattttggtggccaaaatgggcaatgaagcagtgcatttgggacatgggcacctccacctgggcatttcgggtgttgaagaagtgaatttttaaaaattttcataatattttattattactttagtaattaccttaatatattaataattatataattattatattccgattaattcattgtcagaatacattggtggcttcattttgtgatctgttggagcgaatttggtctcatggattgaagaaaaagcaggtcatcctaatttttttaaatctgccaatcaaacaaaaaaaaatcttttttcgaattcgaaaattatttggttcttttcgagagttcctgtttaaaaaacaaataattcaaaataatattatttcatatattaaacagttgtttaatgaacaaatttttatatttgtcagaagcacaaaagcttgaaaaatttaagcaatttcagagggctaaaaatccaaaaaatttccaaatttcagggaaaatcggccctgtggaattacattatcgcctaccatgaatgggagaagaaaagtaacagggaagcgagccgtaaagccagctttacagctggtgggacgaacggtgaatcacagtcaggtacagtaattgggcagccatctttaccactatcatactctaattaccgtaataaaatttaatctttggtaaaataccaaatggtctaattttaattaagaatctgtcctttggattgtttttcggagacgtataaaacgtaagggaaaatttggaatataccttcaagcaaatgcttttgtcgcatgagaaattccatttatttaaaatgcatttcagtcccgctttttcagtattattcttgtgaaattacagtatcttaaaccttgactcgtgtactggatggagtactgtattattttttccctagtcaaatgcctgaaaatttttcgagagaactcttttctgcttttttttaagtggtggtttattaatttgtgttttggcattatactgtaaatatatattatacaattttgtaattgttttcgttggtggtttgtccattttttgttgcaatttgtcacactgtacacaggtgaggaggaggatgaggacaaagtgtcgacaaccgttggaacagaatcggacgacaatggcacgcccaaggcggcattggtcgatctgataagttccatcagacggatggcgtccgcgggaggtgcagatgatggcgacgaagcgtcattgtcatcggcggcgagttctggtacagtcgcggcgacgacgccaacagtgccggactggtctcagtcgctgttaagagcggctaatgtgatttgcgagcgcatatccggtgccggaggatccgctagcagttccggcggcgacattggcggtgctagcgatagcataggcgactacagtaaaaagtcggcgacacttccgccacgcccgccaccgcctcggccaagcggcagcagcaggtcacgtcaggcggcgacagaagcggaaccgcatcctcaactgcaacagcagcagagaaggagcagaacgccaacgccaaattcaaaaaagaatgcgcaagtgccggcaaaagcgagcgcaaccgcgaccgggacggcagcgattgtggtggaaaagagtgcgcaaaaagaggagacgcgggaaaagaacacagagacaagcggcggcggcgacggaacgccatcaacctatcgaaaattcatttacaagggcccgccgttgaaggagatgaacaacaacaacaatggccggagatcagtgagcagtcagcggagaacggcagcgacttctgcacatggtggcggccttttgacaaatctgatcaccggtactgtgtgtctcttatcccgattagttaaaggaattattgtatggatcagacagtggtgctatatatatgtcgtacagtatgccgttctgactttgatcaatttaagagcattataatctgataactggtataatactcgtcactaattagttgaggccttatgtatttattttgtacagtatgctattagtgtaaaattttagtgtactatataataatttatgaggaataaaattttaaaaaatgaa

SEQ ID NO: 10043 - DNA, 4088 bp, Heterodera glycines
  unsure (1)..(4088): unsure at all n locations
tcctatttttagttttattttttatctattttaagaaggtatgttttaaaataaaattaaaataaaatagttaataaatccacaaattattcttcatttttattataaatttaaanaagaatcctttntagtttattttcttatatatntaataatacaattattatgttgaaatcttttgttgtntaaattgaatatttaaaaaattatatttgcttgatctcagccaaagaacatcagcacgcaatgccgttgatgatatttcgttaattagtaattttgcatttcgacttttagtatttgcagttaactagttacctaaaataattaaacgggattcctttttagacaatttactaataattattcgaaattttcaattttactagcacaaattttttttatttactcattattaaatattaatcttattgttttgatttaaaatttattatgcattaaattattggcaattagtaaacattcgtaaatagtttctcaaatcttgccttttttaccgttgaaattttgaatgcataaattttttttatgttcattaaagttttataatttgaatttcattgtgaattagtaataattgttaatatttagtttttttaattttattttttaaatatttaatttaatttatttattttcttttatattatattaataaaaaatgttgattagattttttaaacatattataaatatttttctcgatgaaaaattccgcaaagtttcataattctccgtagttacccatttttagtgcaaatctctctccgtctgtccctttctctgctcttagcttatgggtccgtctcagtgtcgtggcaattatattttgcctgtctttttcccccttttccaatttattgtttaattcattttattttattttttgtatgcttttaccaccacacggtcttgctgaaattgctcaattcgctcactcaattcaaccgtatccaaacaaaaaattagttttttttgaaaaaacgaccccaaatgttttgtatcctgggtttgggtacggtatcaaaatcttttgagtttggatacagtatcaacaattgaatgttaagaatttgctgttttttagatttccaaattccgaggaattaaatgtccagtccgagcgattcaaagttcgcctgctcaaccaataaaagttcgtttgggattcctcccgccgccgttcgttcctttctgtttgcttctgtactccgccccttcgcttccatccttatatactgttaccatttgccctccccattctattaccgtgtccccacacatatccaccgtatcccttttttgtgcctttctcccatttctttcatccattttctcaaaagttatttagtattactattatttttattgtcctttatccagtaaatttcaacaaaatttcattcttagttccttccaatttattgtgccttttgtatcggaacatttcaataaattgtcggtttcttaaaagggaaattaaaattccatttttatttccaaaccgacaaaagaaaagtgacgccattgcaccaatttaaacaattaattaattaattctctccaatactttcggggtgacaattacgtcactgatgcacatttcgaattgtttttaaagaatggactaatgagaatgaccgtagaaggaaaataaataccgtaacccgtcacaatttgcttgaaaattaatagccacacgtatttgaggaatgataaattcttaattggggttgcacggatatcccaaaattgcgaatgggtgggccgatttgggacgaagggacagtccgacactcattcatcaaaagttaattcgtcatttattcggcggaaatttacgtataaaacagtattgggggtaattagctacagattattgggttggtcagagagagagagaggcataacgcgcaaattcggacatccgatggacgaatggccaaaatggcgaaatgccatgcatttgtcacatccgtcattcaatccaatccatttgatgacctgggagtaagcctatataacaacaaacaataagcagcatagtcgaggattaaatttttgacgaagtaacgattttttgcttttgttttttggtggattcattcggtgatcagagagagagagaacaacgcatattcacagagttagcagagaaacaaaaaaaaaggaggaaagagtgtgaggaaaagggagaatggtagagaacaagagaaattctgtttaattaaaattattaaaaaaaaacaaacacaaattttacagaaattaacaaacaaacaacgagtcagtggaaggacaagcgtattaacaagtggtaaagcccggggaacggacatagaacagaagcagcaattccttccttgtgggacaccgtgccaattaggcacgagaggaggcggtaattgtgctgttcatatgtgaattggttggacaaatttacactgggcacaagagagggaccaatgggagaaagggataacaaacggtggcaaaacaaaatgtgatcgaattcggccgaaatatcgcgctagccttatcaagcggttcaagttaataatgtcaacaaaaacaaacaaaaaagaaaaaacaaaaaggagtaaaaacaaatggttgaacattcgcaaaacaaaagacgacggccgacgctctgtgcccattcctagtcgattctgatcagaactacccgatttgctggtatttgtacagatacagacggtaatccttgctgcaggggagggaatgtcggacaataaaatgcttaaattgggacgacaaaagaacggaccttgccaacacaaccgaatcgtcgatcaacgccacgtcgtaacattgcgcgtgcttcaccttcgactcaaaggcactcagcagagtgccgtcctggcggggaaagggaacggttaatcaattggttgttgctttcgagggactacctgactgaagacggtcaagttgaaattgttatgattatccgcctgaatttaaaagagcaaataaaatcgaactgctgcccgtggtgtacagaccaccacaatctcgccaagttggttgatgccgaccccaatcggataattagtcaccccctcgccaccgatctgacgcaaaaattggccctcgtaattgaacaccttaacaaatacatcaacaattatattcatccattgaagcgccaacaaaagtgcactgactttgatggaatgtgcccggttgtcactgattagaatttcttctttgtcggtggtgcaaacgccgttgggaaactccaaatagcctaaacgacgaaaagcaaattaaatggggtatttgcgattgctaattgtaaaagtacgtgaacagctgaatttgtgcagaatgttgccgaacatgtcgaagatgagcacgcgcatcactttgcactccaccaccacaattcggccctgactgtccacacagacgccgcgcgggtgttgcaggatggaagcgccgaatttgcgaatgaattggccgtattggttgctgttggaagagaaaaagttaaacggttggataaaaccaaaaatgagaaagagcatcatggcattttgtgaaggactgactaaatttgaatttggtgcgtcggggagcgctcagtgacgacaaaatcgccggtgacgcgattgacagaaacgcggtttgggtagaggagttggccatctgaaagagaaacaatgttcggattttgacacaatttcccattaatttaccgcgtttgccacattcgccgaattggaatttgaagcggccctcgcgatcgaacacctttaataaacaacctaaaacggaaaattgcacagttttcacctgaattcggtggttgttcgtgtccgcgacaataatgtcgcactgcgcattcaccgccactccgctgggttcggtgaattggccttcgatgaccccaaattcaccgaatttacaatggtaagtcatcttttggcgctgaaagtgccaattctattccggtgaaatgaaagaacgagtgagagtgacctttatttgggaccgcggcggggggagcatcggaatcgaagcagccaatccatcacttccgc

SEQ ID NO: 10044 - DNA, 2129 bp, Heterodera glycines
tcattgattttacggatttgctccagcgcatttttgaacaatgtctgattctttggtcgacgcgcctccgtcccgggtgagcgcaaagtgtcacgtttatgcgccgcagcagcagccgaagacgcgtggctcagaataccgcgcggtgtcccaccgctaagcgcagtctatgaaagaattcgctgtttacaacttccaaaactatttattagtcgtaatttctgtcgcaattttgcacaatattaaaatatccaataaaaatttcctaaaaaaaaatccacccaattttgtaataattttagaaagttgactccaaatgacaaacattggtcattttcatcggaaaatggcaaaaaaaaaaccctgctttttgcctgaatccatatcccaccatcgttttcggccaaatacgactcaaaatcacctgcactgacgacaacgaaggcatcggcggcggtggtggaggcggtggttgaagaagtgctacaaacaaaaattttggaaaattacaaaaaaatctctgaaatcattgcacaaaattattaccctgccagtcgtcctggttgctgctgctgctgttcgaatgatacccaaaggaggcgttgcgctgttgttgcttgagcaacgcggccggcgcgtacccagcggaaccgcctggcgttgggatgtacggcgtcggcggctttccggcgggcggcagtttgcctggcgacagcagcgaattgagcggtgagggcgcactgcgcttggcggtcggcagtccgcaagtgcgtcggtatttgtccaccagggccaacaccgcttcgtccgctccgtcaaatttgtctgcggaggacggctcgtgcggggttctaattagttaaattgaatgggattagcatatttctttattatagccaccaccccttccattagtgccgcactcaacagggaggagagcaactcgtttcacaggggtcagtccccccgtccggcgcccgaaagaatttttttttaaattgtcaagtttagaattttttttaaaaataaaaaatttttcacaatcaacatttttttgggtatttttaatagaaatttagtatttcaacataaagttttgaaaattgttagaaaatggcccaaaaaagtttttaaaatttttttataaaaatttttagaactctgtaaaaaacaaattttccttaaccaaaaaaatatgacaaaaaaagtcaattttaaatgtttttgggtttaagatttctttttggccggttgcgttttatttctaatgatccgatcacaagggcgtaggcaggggggctgagggctgatcagtttctgaaaaaaaagttaagcctaaactttttggcatgtttaaaaagcaattaaaaattttattcatctccctttttgatagtaaaagcatcacagagcctattttaacttgtacataaaatttgatgcagtttcagagcactttctgaaaaaatatttatgagttaattttgcaaaaaataaataaacagttaaaaactcagaatttctagaaaaatttaaaaccaattacaattgtcattttttcaggttaagttagtcctgtaccggggagtatgcctataaaatttggtacgattttattgcttattgaaagagctagaaccgaacaaaatctttttaatttaagcctaaactttttggcatgtttaaaaagcaattaaaaattttattcatctccctttttgatagtaaaagcatcagagagccttatttaacttgtacataaaatttgatgcgtttcagagcactttctgaaaaaatatttatgaattaattttgcaaaaaataataaacagtgaaaaactcagaatttctaaaaaaatttaaaaccaattacaattgtcattttgtcatgttaagttagtcctgttccggtgagtatgcctataaaatttggtacgattttattgcttattgaaagagctagagccgaaaaaaatttttttaatctaagcctaaactttttagcatgtttaaagcactaaaaaattttattcatctccctttttgatagtaaaaacatccaaaaagccttatccaacttgtaaataaattttggagcgtttcagaaaccctttctgaaaaaaatattt

SEQ ID NO: 10045 - DNA, 4364 bp, Heterodera glycines
  unsure (1)..(4364): unsure at all n locations
cttttaagccgcccgccttatgacgaacgaaggggggggggggggggtgtccgaggcctcttacgacgagaggggtgtgtcgagacaccccttgcgcatgtatgtcatccctgtaacggaaatataacactcaaaaatgtctaacttccggtccatccccgccttgccaaatggataggtccaatagcaaaaatgaaaaaaaaacactcacaatttctttggccttcaatttgtcgtaaatgcgtgcaaagagtggcgaaaatgtgttggtcaggtagaagtaggaagcctgcatcggtgtcgtacggctggttgatgaactgctcgatgatgatgacggggaggaacgcggtaagcacacaaataaatgcggacgccgcaacagcgtgccatggaaacgagcgttgaacaattcggcaatcggcgcatacttttgacagtcggcggacgtgaccaacaatttgatgtccaatgaggcggaactgaaacaggaagtggaaataattgtgaaacagtaaatctggggcagtcttggtacggcttcgaatgaaaggtcgacagattatctaatttttaaatttcgacttttagttcgagttcgggattcgtaaaaggccaccgaaatgtcagattcgtgaccaacgacctcgaagacccatattctcgatttgtatcataatttaaaaaattttgcaaaccaaaaggattgaccgtggtaaaattgatgaaaatgacttcttttttgaaaaaacctagtgcaaaatttcttaccacggtcgcatctctcattttttaccaagaatttacctataattcaagggacacgattaaattatatataatttgattaatgagccaaactaccctatttaaagtagccaattctattttttatattacgccagaaggcactttgccaacaaaaaaagaaaaattcaatgcaaaaaacatacaatccatttggtttggcactgtcacggaacggcgagtacagatcaacactttcaacagtttggtcttcaaatctaagcgagccggtccacacgttgagcggattacggatgggaggaacggcggtgcctctgcttgcggtcgaatcctttttgttgtcaacaacagcacgagatgaggaagcagcttaagataccaacttaatgctatgtaaccaaaaaagagcaacaattaagaaaccctattaagcgtgaggatataggaatggaaatgatataattcaaaaaactttacactaaagcattgaatgagcataattgttgataaatgaaaataaaataattaggtaattacattgggaatggttagggtggggggatttgagaagcaaaacggagaaattaaattcgattaaatgacaccaaattatcaagattttccaaattgtacatatatatgaaattaagcactacatttctgtaaactcgtagaaaaattttttagattcccttgaaatttccccaaatgttcgaacctatgagcttcgcttttgcagtttatttttcagaaaattagctaatcttaagatataaatcttccttttttgactatgactgagaccaaccaaaatatgtagtgggtatctaatccaaaactcaacatcaacattgtctcaatttccacaatcataaaattaatccttactcctagagagggcaatcgcatacattaacaattgacaatatgtaattaggcttggatgaaattggaatcatttccatatgggcaaactttgggaggcaaaactcataatgatgaacccaatcaaataaattttgtttcattcaccgctattttaatcgcttaataagcaatactaaacggtaaaatttagtaaattctaaaatgcatttctataaagaacagcataacacataaaaaataatcgactctctaactgcataattacacttagcaatgcaactttctataaggttgtctctttagtttgttgggataaatggtacagtatactacagtaatgcaaaaacataacaccagcaatgaaatccggtgagcataaattcaaaaattaatgcgcactcacatttggcgtcatcttccgccgtcgccgccgccgccccatgtctttctttcttcttttcctcctccgttgcatttcgacgctttggaatgacataaccgccgggaccaccgggattgatgacaaatgatgccatttctgtttgacactgactgtaccaattggaaagcaaaagcccaaggccgttgaatatgagaaaaaaaatatgtgtatgtgggagtgaagcaataaacaatcaagcctaagtcttaagagacacatgaaataagtcaaaatgtgtaaatgatatgtgatatgataatggagatgaaagcaatttaaaatacctaatttattattattacagaaaaacaaaaatgcaattttatatttttatatatttcatttaattaagagccatttttctatgcaatacaaagaaaagcagagttaattacataagaaaataataaatattaatgcattttttacatttcttgcctccatgcaccccacctgccccttcccttctcccctgaacactttggtcgctgttttttgggaaatctttgaatgaaaggtgcgcaaacatatgaatgaatgagtgtgcttgcatacagcagaagcatacctaattttaataagcattaattataatattcaaagcgaaaagcattgtggaaaatggaatcggaagacaaaatattttaatttttagtgatgatgtcattataaatcaattattgaataccaacgtaaaatatgtatgacaacaaaaaattttgaatgttaatatgtttaacttttttgtcggcaaatctcccccctcccccttaactcgtgtacatttatgttcatccattaccattaaatgttatgtataaaaatcgatggattaactaatgcgcaaccggtacccactgtttcaatttacgactttacctacataatagtcaaaatttaaatgcaaacctatctaatttgaaatgataaacaaagaaaatcaatcaaatttttaggaattaatactaaattatgcaattaacacaaaaaagaagagacaattttaaaaaacgggttaaatcatccaaatgactgcgattttaagcaaccactacattttttggtggctatttgctcatttaattgcaaaaaaaaaaaacgaaaatcgattagcgaagtcgattaaaattttattttgtaaaaccaccttatgcaaaggaaaatggagaaaaacaccttctttcaacacacgcaaaatatttaggatggcctaaaatctattgaatgttaggagaaatgaaaaagaggcaaaagaggaggcccaaatgcaaacgcgattgacgtggatggaaagcaatgagagtggagagaaagaaatcaaatgcacacaaagggcagagagagggtaaagatgaagggggagagaaaggaattcgcaagaaatacttggagaaagatagacatgcatggaaatagttaagggagaaaagaaaaagagtaaagagagaaaaaagaggcgtacgctttcttcacgcgtgtgcgaagagcagagaagaaaggaaagagaacaaggaaaaaaatgacgagagagaaagtgaaaagataggggaaaaagaaaaagagggcacacatagaaaaagagagaagagagagagagatacgagagacatacacaacaaaaggaaaaagcacgctaagtgttcatatgtattcgcccattagttcaatataatatgatgacatttgatgacatacgtacaaatttaaaagttcgaaaattttaataaacaagagcggaaaatattaatctgagggcccaaacacaaaagggattcgatttagaacggcttaaaatgatgagaaaaatgcaaattaggggagcgcttgccatttttcatgttaaaaaattcggatactgaagtttctattttcaacggggacttaatcgtccgacgtttaataatgcacgaagtcttaaatggcttaaatttattcaaatacaacaagcaagcagcatcttttctaatctgtaaaagttgaaatttgatttttaaattatctctgaaaaataataatttaatttttgacaatttataatcgccacttgaccattatttacctaattgattatttcgttattttgttctactaaaaattacaactttaatttgatcagactgtcaggcgtaattattacgcactcaatattacaacaatgcaataaatacatatacattacatacatacatnaacatataatagcatcattaaggatcatttttttgagcatcgttttttcctattagcgtttgctgaccatcgactg

SEQ ID NO: 10046 - DNA, 7114 bp, Heterodera glycines
  unsure (1)..(7114): unsure at all n locations
ttcatgaaaatcagttgtcgaaaaatcttttcagacttcaatacaaaggactcgtcgtcttccaatgactcactaattgggagcgacataaatcccggttaancgttcgaattagacgtttggtctccccgtaggtctttaaaagtaaatctattgcatcatcatacccactctcactaattggaataccctgaatgattgcactggctttgccttcaatgcatgagtctaaataactgaacttatcaattttgnggacatgagagtcctcatgaattattgtacgaaagtaatcccaaaatggtatccactgagatggactaccatcaaatctcttaagctcagtttttggcaaatttttacgcattggcacgctccttgagaggggtacaatgccggaggtagtgtcaccatccgtgttgtgagttatgtctaacctctcttctaatgcctcaattttgtccctcaaaattggaatgagaacgtcagctgccctttgtttctcattaatttgtaactcctgcattaattcctgcatttccgtttctttacggattgcattgtctcgactcagtttgccaatatactcattagccaaacccaaattatcttcaatcttttgtaccaccctttctaagtcattcagaaagtttctgaatttgtacagccttctttggcattgattcggtagggcatttattcccaggtcaggtggaatttcggtacccaataatgctcccaatttgctggcacaccccctaattaatgcctggatgggggctgtcattgctcaaatcaatgaccaaattcgaaagttcggagatgagactccaatttaataatcaataaccgaactgtgaccgaacaatttaaaaatttggaactgaaactccaatttaatcaataaccaaaagactctgattttaccaagtgcggatggtttggacaatttgggttacaaacaaaaaacaaaaaaacaaaacaacaaaaaataaaaaagatttagaccctcggaaatgagattccgaaaatttggactaaatgggattggacaaaaaaaaagtgaattggaaatgaaatgccgataattttttgacaaatttaaattgggcaatttaaatgtttgacttttcgaagatgagacttcgaaattttcagtccgaaatgaacttgattgccttttttaggaggaggaaggaacagaaattaaagaactgattaattctggatgagaccagattaatcagacctccccttgggaaaaaaattgaacccgcctgtgcacaacaggtcgccagttgtctggggcaggcacgtcttagtaaatggggatggcctgcgcgctgagacgtgcaccaagacagtgcactcaattggttctcgattcgtcaattgtccgatgcgtccaatgtccaattcggtgcgtcaaatgtccaaatgttcagtgcgtccaatgtccaaattgttcactgcgtccaatgtccaatttgttcagctcgtccaatttccaatttgttagtgcttccaatttccaatttgttcaacgcgtccaatttccaatttgtccaatgtcagatacttttcacttgtaaaaaggggaaaacaattatgaaattttgattagacaaaattaattaaaaaataatttaggctggaaccggttttccgccacaatttgaaattaagcagtttagttttgtgtggcggaaaacttgctcagaaaacctccggtttgctggttgcaaaacacaaatttcaataaaattccaatgaagaaatttaattttaaaaatgtgatgagaattgcaaaaggcggaattgtcgattaaaaacaattttttaagtgaatgatgtgagaggaggagatgggaaagaatgaatggcttaaatatggcggatgagccgccgtcaatttgcaagagatatgtgtcggagataataggagaggaaatgagaaatagaatttaacaatttaaatgattgaaagcatttaaaattaaagcataattaatgcaaagaaaatgagaatttgggcagaaaaaaaaatgaatgtccctgatcatcgaattaagtgataaaaaaatttgtcagattggcaagtcctccccattcgcaacttcctcctcatgtcctcctcactttcttctccctccattttcgccattcttctttcgttctcgtttgcactcgctcaactcgtccaaccgtgtggccctcgttgactgccttgtgccaaattcgtcgctcgcttcgctccgccaagttgagattggcttcgttgtccaacttctccccaattcgccgatcgcttccctccgccaagttgagattggctttgtcgtccaacttctcctggtttgggaaatgttgagttaattggtccgaaaatgggtgtgtttcggacatagagcatcaatcgcacttattgcctttgttgttgcaattggacagctaaaagcatatctatgccaaatgccgatgccattttgacagcattaatgattgcaacctttacatctttgttatatttttattttttttgtttgaaaattttcagttttcatttttttgtttaaaattaacttaattattacgagtgggtttcaatttataaattaatatggctgtctttcggcttttttgaaaatggcatcaagcatattcattaaaatgaaaccatattttggttttcagtagtttttagcacatattctggggattttttttttaattttttttacaaaagtagctttttttgcactcaaattcttgtcaaaatgtacaaaaattttcaaaaattttagttttttctctttttgcactttttgaccgttttaatgacttttttcatttttaaggcaaaatttaaattttatcaatgaaaacagaaaaataaataaatatttgaagcgagaaaaatatttacgtcacaaagaattgaaatgtttttgattagaattgtactagcgaaatggataaaaaatgtgatttttttgataaattcacttattttttgacagtttttttttcaatttttggcacatatgttggccttttttgagctttttagcacatattttggagcttttttggcacatataaatccattccctggcaattacaacaaaaaatagaacaaaaaaaacaaccttcaaacattatgcataatacttttaactcttacataagcaacaaattggaaaatgaatgaaatgccgaataatatataaatttttaagaaatttaaattcatcaaaacctaacaatgaatggccctgaaagcttaaaaatattctcagtcaatccgcgacaccttcactttttctcttgaattcagatttatatctttctaaagatctttttgtaatatttaaaatttccgcaatttggcgatcgttgagctttgggttttggtttttcaattgataagttttattttttccgttttttccgcaaatgtataatgcttctgccctgtaatatattaaataataaaaatttttaaatttaattaataaataacaatttgtttaaaaatttcaccctttgaaagaatttgatttaagccaattttcttgtcccatttttcaattgtctgaaaaatcacaccaaacttttgtttaatttttgctctaaattctttccattctttgcgtgaatgttttccaatttgcataaattctttctttattttaaaatatttttcaacaatttctcttttttcatcatcagttttttgctttttcaccatttttccactttttaattgtttcttccaataaaaaattgttctgatatttgtgtccaaatgttttgctattatttttttgcatttttctctttttccctccaattttccatttaatttcatttttaattttgcatatatttgatcaaattgctttaacattatccttttttcttcaactgaataatttttgttcttcatcattccaaattctcttttccatttgtaaattttcgtttgatttgttcccaatttttttgcaatttttctttcaattttcacccattctttctttgaatatttctttcccatttgcttaactttctccttaattttatgaaattgttccacagtttctcttttatttttattagtttcatttgaaaatttatcacaactttgtccattatttgttggcattggcaattggtcgcccaattcatcataatctgtggacatttcttcactctcctcttctttcacttccacattttcatcaaaaatctgatcaaattgtcgaacattttgtccaaattggttattctgatcagcaatttctccatgcattatttgatcattttgacagatgttttcttctgctccgtcgtcccatctttggccaaatatttcagcaaaacttttttcttggattattttgccagcctcaatttggttaattgcttttttgaatattaatgcgcataataataaaaatattaataatattttcatttttttgtaaaaatataatgaattatttttataaaaatatttttcgcaatgaattttgtaattattaattttatagcatggcttaatttttcttcaatcaatattaaccacatttagtcatctatcatcaatacgatacaacattttaataataattcaatttattattatattttcttttctcagcgaatattggaagtaattaatatgagctaacaataattaagcggggttttaagtctcttatcacaaattaacaattttttctcatcttatgtaatctgatcaaagattcaaccaaatggaaatgaatttgaacagattttatgcaatttattgccataactgatacgtttaatgatttatattttattacgtttaatgatatgtaattatgtcaaatttatgatcaaataaaatcagtgtcaaaataaatgtcattatattagtgatcagcgaccatgaaaatactaattttaaaatttattcgagaaacgagtttttattaagagctttcccatcaatttttgcagaaaataaatgatttaaaatcacacataattgtgtcattctgagaattatcaagaatcatgaggtctttctgagctgccgacaggcgccaccggattaaaatttggattctgcaaattttattaattaaattaaaaattaaaagaactaataataataaaaaaaatccatattaaaatagaggattgaacttataggatgtgggaattgataaaaaagagttgtattttttttggcaatttcgacgaacacgacaaattgctacaaatgtttcgataaaaattagtcataatttgtagaagaaaaattactcaaaaattatttaattcattagggtaagcaagctaaactctcaaaatgactaaggaagaattgagaacttaagagtttaaaccttaattagatgccaatattgataattttaattccatctacaaaaagtttatttttcacgaccctcaaactgactaccaaataaatcagtattttccattttaattattttaaatttaactacccaaatggtttattgtatatcccgatttatctaatgttatactgtataccattttgcgctttgaattttggcatttatttatgttttgagaaataaaattaaaacacattttcttctaaaatagagttgaattttaattaaacaattcatttcatctcgaaaaattgtggtggttttattggccttctgtcgtattcaaaacatttccactttttccttaaattcggatttgtattttattaaggacattagctcaatgttcaacaattcggcgattttcacatcggaaaattttggagtttcctttttcataaggtaatattgcttcattatttccattttttcgacaattgtgaacctttttcgctctgtaatatatttaaattgaaaaatttattttaaatttaaaaataaaagtttaattgaatttaccttttaaattattttgtttaattcctaatttcttggccaatttttcaatcgtccaataactcacaccaaacatttgtttaatttttgcattaaatgccttccattccttctgggaatgttttccattttgcataaatttaatttttacttttaaatatttttcaacaatttctcttttttcatcatcagttttttgatttttcaccatttttccaacttttatttctttcttccatctttgaatactgctgatatttgtgcccaaatgttttgctattattttttggcattttcttccttttccttccaattttccatttaatttcatttttaatttgccatatatttgatcaaattgctttaacattattcttttttcttcaactgaataatttttgttcgtcatcattccaagttcgctcttccatttgtaaattttcattttatttgcacctaattttgtggcaatttttctttcaattttttgccattctttctttgaatatttctttcccatttgcttaactttctccttaattttatgaaatttttcaacaatttctcttttctttttattaattgcttttgaaaaattatcataaatttgtccattatttgttggcattggcaattggccgcccaattcatcacaatttctggatatttcttcactctgctcttctttcacttccaaatgatcaaattgttgatcatattggttctgatcaactgtttctccatgcattatttgataaatttggcagatgttttcttctgctctcgtcgtatcatctttggccaagatatttcatcataacttcattctagacttattttgtacagcttatttctgatcaattgcattttcgaaaattaatgcgcataataataaaaatcttagtagacattttcatgatggtttgttattcaataaggtttaattttcatggcggatttcatttttccaatgagtgtgtaattattaattgtacaattgtctaatgtataattttaaggagttcaatttaccggtcccctccttgataggattggaaaacacaaagattttctaatattatttaaatttcaaataaaatttattgagttttaaaatcgagataataatgtttgtgcttgttatggatttattaatt

SEQ ID NO: 10047 - DNA, 4350 bp, Heterodera glycines
  unsure (1)..(4350): unsure at all n locations
ctaaacaaaaaagaggtaaaaatgaggattcgctttccattaaaagaatcgnccaaacggacatcgctgatccatcaattttatttaataagactggcaaaaattgaacatttttgggtcaaagaaatataaagaaattattgtcgtttccggaccccaaccaataagcggaatttgtttcaatttttaaaattttgccattcttgtggtatttcttcaaccctgaatttggatttaattttttcaataaaaatgggtaattttttttaattttaagcaattttcttagcaaatttcattaaacttttcctggctgcgcctaacggcaccgccaggaccccaatcggtaaacatcgaagcttaaacaattttatttttaagtgtttaataaaagccacaaattctcggttaatttataaataaaaattaaaatggaattaaacacggcggtttaaaaacatgcactaacttggccagcggaagcacttggtgcgaatgggttgtactcctcgatgaccgattgactcgttgaattgtttccgactgatgcagccggcgaaaccacacgctgaacagccgggtcctgagggaaaaatgatttgtaaaaacagaaaaataaaataaccactaacagaaaggtatttaaatgatcgtaccttaaaagggtcagcaaatgggtttccgtccaatttcgacattttctatgtaatttatgtacctaaattctcatcagatattatggtaataatgtaatggtgggctcccttttcgaaaaaaaattttaaattatgagttttgggccgccttgatcagtgatcatgaccttgaaatctagaatcccgactcaaattcgattatacaagtattgacatgaattcgaaacccaacccggtttagcgaaatttttacggcgtaaaaaagtcattttacacgggtgccaaaaggacacaccaaagcgaaaaaagttaggtatgcacctagtcgcttatttgttagccatattatgtaacaacattatgccatttttttggatttaaattccaacaaattaagaaatctttttaatcttaacaaataaaaaagctaaattttaattttttcgtcttagactaggggacgattaaaaattagccgaatgctttctggtcgatgatcatgataacaattttaatccctaattttatggtaaaaattgcatacaaaatgcatcaaaaaggttaaatttctctacccttaagctatggaaaagaaaaattgtaaaaatgattgaaaaacataatttcatcccatgaaaaacacttgtagaaatttcaccccattctcggttttttgtcggccctttctctagagaagtgccaaaatgacaaaatctaaatttttaagcgaaaacaaatttgtttttctacgagtaagcaatgggcaaggaaaagatccatatcaatattgtggtgatcggtcacgtcgattccggcaaatcgactaccactggccatctcatctacaaatgtggtggaattgacaaacgtaccatcgagaaattcgagaaggaggctcaggaaatgggcaagggatcatttaagtacgcttgggtaagtcgtaatccaaatcatgttcatgttaaaatatattttttttaggtgcttgacaagctgaaagccgaacgcgagcgtggtatcactatcgacatcgctttgtggaaattcgagacaagcaagtactatgtcaccattattgacgctcctggccatcgcgacttcattaaaaacatgatcacaggttctgttttgcaatacctttgtaagccattgtcgttataaccatgataattttcattgtgcaaattaaaatttaacaaccaatgatttgcagggacttctcaagctgactgcgctgtgctggtggttgcttgtggaacgggagagtttgaagctggaatttcgaaaaacggccaaacgcgtgagcacgctttgcttgcgcagactttgggggtcaagcagctcatcgtcgcttgcaacaaggttttgcttttgtattgtttcctgaaatagttctcctttccagatggacaccactgaaccgccattcgccgaggcccgttacacggaagtgatgactgaagtgtccaacttcatcaagaagatcggttacaacccagccaccgttccattcgtcccaatctctggcttcaatggcgacaacatgttggagccgtctgacaggatgccgtggtttaaggggtgggcgatcgagcgcaaagatggcaatgcatctggcaaaactctgctcgaggctcttgactccattcttccgccgcaaagaccaactgacaagccattgcgtttgcctctccaggatgtgtataagaattggaggtnttgtttgtttgacacatggctatttcatttgttgcatgtcatggcagttcgtataacagttcgtgcaataggcaatgcgggaaacggctcataataagcttggcttaattttgggttgcttggacttggacttaagtttatttatggtgctaactgctattgaccccatttgttgtttaggtattgggacagtgccggttggccgtgtcgagactggtgttctcaagcctggaatggtggtcacttttgctccgcaaggcatttccactgaagtcaaatcagtggaaatgcaccacgagtccttgccagaagcgcttccaggagacaatgtgggcttcaacgtgaaaaacatctctgtgaaggacattcgccgtggttcggtcgcgtccgactcgaagaacgacccggcaaaggagaccaagagcttcacagctcaaggtttaacattataatcttatagcagttgtaacacctatgcacttttagtcatcatcatgaaccacccgggtcagatcgctgctggttatactcccgtgttggactgtcacaccgcgcacatcgcgtgcaaattcgccgaactcaaggagaaggttgaccgtcggtctggaaagaaagtggaggacaacccgaaggcgctgaaaaccggcgatgctggtagaacaactctatataatcagaaatcagtctttaatttttctagggatcgtcgatttgattccaaccaagccgatgtgtgtggaggcattcacggactacgctccgcttggtcgtttcgccgttcgtgacatgaggcaaaccgtcgctgtcggtgtgatcaaggcggtggagaagactgaaggcggtggaaaggttaccaagtcggcgcagaaggctgctgcccctggtgggaagaagaaatgagaaacgctgataattggaatggattcgatttttggatttgttgttttttttggccgtgaaataggcccgttaactttgggttttgttggataaaatttgttttaatctgtttgctttttggtattggttttttccagcaatgttttgcaatacgtttgtccattgggtgggtaattctgttgaagatcatctatgttgacccgttccaggcagcaattgtgcgcaccttttcgtagttccattcgtcttttaaagcccagaatcggctgttattctgtgctcgctcaaatgtcaactgaggttgaaaaggcgcagaaagcgaagccgggcggagacacaatcttcgggaagataatccgcaaggaaatgccttcgacaattctttatgaagatgacgaggttctttcaaatcgatctattccttcattttgttgttttttaggtgctcgcgtttaaagacataaaccccgaggcacccgtccattttttggtcattcctaagaagtgcatcactgctctgtccaacagcgaagagcaggtttgctgggcattttatatgaattggattgtttccgctcttcccaaactcaggaccaagcagttctgggcaaactgttgctgacagcgaataacgtggcaaaggcacagggtctctccaacggatatcgcattgtgatcaacaacggtcgccatggatgtcaaagtgtgtaccatttgcatttgcacgtgcttggcgggcgtcagttgggctggccaccgggttaaacacttggaaatgtcaatcttatcgattgattttttgaagggacttctggcacttttctacacactttgttggggaaatttggctattttaaatgattactgaaatgacattaatttattattgcatcatactatattccccagataaaaagtgcaaaaatgaataataaaatctaatgatttgtaatatgacttttttcctgacaatgatcgttttattccccgttttgcggctgttcagtattttctttccanagagcatgttccatagtggtacttttccttaagtgatgaaaattcatattcgttt

SEQ ID NO: 10048 - DNA, 544 bp, Heterodera glycines
caatcagaaccaggatcagctgtctatcctgaattatgaactggtaaagttcggggaaagtctttccaatttgatataatatttaaagatatttccatttaaatccacagattcggtatgacattatgaccgacaaagaggccattcgcaaatagagaacgtacgaacattaacccggaatcaattcggtaattggacgggcagttttttattttacgggaaatacagtaatagaaagtcccctccccccctcagaccaacctgagcatgcaattgccatggagagaactttcgcaagatgggcatgtgaaggaaagtcggcgaactacgattggatgtctgcacaaggcgcatttcgacaggtgaaaatagttttcgagcatcggctcgagctcagcaacagcggaggggtgaagacggatgacgccactctctcgtgggtaatcgctccttttctgacaaatttttgtaacaagacatttacacttggaataggccgtcttcctcacctactaatttagaaatttagaagattttcaagaaa

SEQ ID NO: 10049 - DNA, 1979 bp, Heterodera glycines
  unsure (1)..(1979): unsure at all n locations
ccggggacctctagagtcactgaaaaacataagatttgccattctttcccatcagtttgtcttttccatccgccgaaattacctccactcctttcaaatttggcgtaacaaaaattcgatttgtcgcttcccaatggaaaacggagggcaaaattacggcggggaggggacgcttttgatcagagctaaattaaaatgagaaaaagcattcgggaaagaaagaaaaacgcaccaattgccaaatataacgaacaaattttggatgaaaattgtgaagagacacggcaaaaaccgacgcattggcaaattgggaaaagaaaaatggggaaaaggggaaaggaaacaaaatccaatggaagagcaaaaactaatgaacagtaaatggaggtaattatttgctttgctgttaagttgcagggctttattagaatttcgctttactaatcgttccttttggttcccccccggggctaacatcactttccgctgattctctggcatgtaaaaactttggcattttttaacccggtactcgtgctcatttggcaaaaattagaaatttatttttttaatgaatcgaggggtgctttatccgcccacaaaatttcattcagaaatcctacggctggggaccattctttgtcaatgcatttatccaatttactttcatcggatcagtcaataaaaaatgtaaaaagcatcagctgacgaaggaattacaaatggaagaaaataaacaaatcgaaggcggaaggaaggagaacaattagtgggggggggggattaagtttcttgacagatgaccaattaattaattagccgatgaatgaatgngtggggattataaacaaagtgaaattgcaattggtaaattaaaaaatgaaaattaaaaattaaaattgaaataaaaattgaaattgaaaaatggaaataaaataaaaattaaaaaatggaaattaaaaattaaaattgaaaaattgaaataaaaattgaaattgaaaaatgaaattgaaaaatggaaataaaaataaaaattgaaaaattaaaatgaaaaattgaatatttattcgctgtcgaccattgattaggaaaatgcaacagcagcagaagacaatttatgggaagaaattcatcttttgttgaattgagttgcgttttgttcgcccaattcattttcacaaataaatcaaccattttcactttttgtttacttttgcccaattttcgattgtggggacatttaaggaattagccttcacaatgaattgggaagggatgagaaaaaaggggggggggggagggattttggatgacgcaacggatgagagcggggggaaaagcattggagggggggggggaaaagcatttggggtgagtcattctgtgcttaatgagtgaattaatgaccattataaaaagaacagcaggaatagcgttggacggggaataattgggaaaggaatgaaataaatttaagaaaaaaggatgcaatggcggataaatggctggggacgacggaggggcggacggattgatgggggggggggaataaacgttgtaaatggcgtaaatggggggggggactcaatacgaccgttacctcccctctccgaataccccaatgaaagtccaatcgtgccgatcatatatgactaaccaacaatgaaacgaaaattcgcctaaccctgatcccaatatgcatgcaaaaaattgatcaaataactatgatcagtccaaagagaaccggctgggtcaattttactgattcgatcaggcaccgattgttctctctcgttattaaacaatgattctgatcaggataagttgccattaagatagagataatcatactatcttccatcgaataaatttatttcccattaattttttaaagtaattgcccccctaagcttttttaataccaaaaaattaagaaaaatctccaaaaaaaaaataggatttttatttaattaaaaaaa

SEQ ID NO: 10050 - DNA, 1602 bp, Heterodera glycines
ttcgtccgccgatcggtgtttcgtccgttcggcgatcacttcagtcagcttctcttctgccgaatgcttcttctgctccccctctctcacttcgttttcctcctcccattccgcaaaaagtgctttgaattcgtccggttccgtccccccattaattaaatgtgccgttgcgtccgatgcttttcccactgacttttcgaatgcaaattcctgcccgtaccaatagagaaaggccactttgagcacaaaagtggcaattggctgttcgttgtcggcccatagccaaaggtgctttccctggtccaccacaacgcaatcccttggcatttatttgcatttcttttgattttaatggtgaattggccaactgtacctcaaatccttttgggtgaaggtgaaattggcctgcggatgagcagtgttcatctcccaaaattcattgtcccggaaacgaaacattttcggtgcctttgtccattccctcggcttcgcaatgtcttcccccaaatgtgccacttctccggtccatttcagtccctccgcctcggctattttcttggccaatgctttcgaactttccaaaagtgcgtcggggcattgttcgcccctcaaacattcaatggacccatcgcaaattcgcacgtaaatgccctgagaacggaatttgacagggaagcgcatttcctgtgccaagtagcagttgccggagcttccgatcacgcaaaggacgtttgagccggtgcctaaacaaattgcgccgattttccgcgtgattggacggtctttggccgagcgatggctaaccccaaacgatcaatccgtccaaaatgtgcaaaagcatcggcgcttctttgcccgcttccactcgaatgtgctcgcacagttcggtgtccttctcgcgcagtgccaacgcacaacggctttgctccgcgggggtcgaacgcgggcccagccaatagaaaaagcatttccttcgccggccgcactctctccgcgccgcggcactcccgtccaatttgcgtattcctaaaccattgacggtcttttaccaccccaatttgtaagacctgtcctctcaattcggtactcccattcgatcacataacatttgtccgcttcgaattcgaccaatcccttcctccgctgccctttctctttcaattgctctccaacactttcgtaaattcgcaatgcttcagtgaacacattcttttcatccggtctcaaaatgttgtcctctaatcgcaattcgccgcttccgttcggacttttttcgctcattttcgctgccgtttctctgatcagcgctttttcactgctaatttttgctatgcttttggcctcacacggaacggacgaaacactctttggcctttgtcttcaaaattcaaattttaattttgtttcaattctctcaaattacgaaaggcttttccttctcctcgaattgtttggccaattactgaatttgtacttgaacagtgtgtcaacaatgccttcggaaattcttctcaaaatggtccattccatggttgaagaatgatcattttgacaaacgattcgtttggctttgacatttggcagacccttttaaattaatta

SEQ ID NO: 10051 - DNA, 1714 bp, Heterodera glycines
  unsure (1)..(1714): unsure at all n locations
ttttgttgtgccattcgccatcacttcgaatattttgtcctcctcagaagtttccactcctccgcagcattcgtttagcagattttccttttctatttttgtatccgcttcatcccttttcaaaagcctccaaaaaaggcactccgtcttctgatcatcattgacaatttccacccgaatggcactcgtaggcaattctttactcgcaacaatttcgtacgccatttgagcgatctgtttcacgcattcacaattaacccaacttcggaattggcaaaacctttgaacggcaaataatcgctgcttcgttcccattgtaaataataagccgcttttgagtaattaataaatatgagcagtgatcgttgatggagcagcagcttggcaaaacgaggcgaacaaagggagggttagctgaagggaattcggttgatggcaaatgccgagagtcttgcccgatgcgcggattagcattggcagtgggaactgttctcgccgtcttcgctcttcttcggccgagtccctcagcttcacgccgcagtgttcctcaccaattatcggctcttggtacttttggggagtggaaggcacagacagcgacataatgtgccgatgaaataacaagcggactgactgtgctgctctcgaccacactcacatttctcgaagaattaattaatgtaaagggggtggggcgagcgtcgtttcgttgttgctaagggaggggaggggggggggagggttaacagaagcaagaaaatgacgagaggaagaaacaggccagaaaataatagatggaggaagaagatgaaaaggaagagtaaaaggaaaatcgaacggaagagcaaaaggaaaaagtagcggaagaggaagtggaaaaggaagaataaaaggaaaaagaaacggaagaggaaaaggaaacggaagaggaaggagaaaacgaaaatgagagaggaagaggaagacgatcagtcaccaaaattgcatgtgcatttgtacaaacaatattattattgtgcttttgattggatcgacttccatctgtcagtttggtttttttccctccctttccgtcttcccttcccccccgccccccccccctctctctcttttgtcatccccctccccctcccctcccttccccttctcttctcccttctcttccctcctccctcttttacgatgagtctcctctctctcaacagccattcattcagccatccgtaattcatcatccattttcggaagaatgaaagaggccctttctgtccaccgagaagggaggactcgttcccacttgagcggtcttaaatttcaaacaatgttttgtattgagccaggaaagagagagaagaaacggcggattgtgaaaagagagtgaagaaggaaaggaaatggggagagacggaagggaaggaacagcagagagacggaagggaaggaacagcagagagacggaagggaagggatgcgatttatggtcctggatgggaaggaatgggatgggaagaagggactgaattggatgaacggacgaagggattttatggtcgtggatgggatgagatgggatgggtgggacgggacggactcgagggatggaattgggtgaagtggcgtcgtcggattcaccccccaccctccaattgcataatcgtcgttcaattagcgaccggtttttggcccattatttggcttgaaaccgaanggatga

SEQ ID NO: 10052 - DNA, 1256 bp, Heterodera glycines
tcgctttttcctaaggcaatcgccgggaaaagcgaaacggatgccatcgatgccatttttcacgcgatgattcctgacgaatcggacgacaaactgttacaaatctccgtcaatgaattgctctcgggacagcaaaagacccttctggggatgtgctggagactaatccaaatttactgggcaaaatttgcaccttcgccgtccaacgaacgaaaactgacggaggcattgaaagaatggtaagcaaaggcatttaaatgaaaaaacaaattaaaatattgagacaaaaaccacattttatttaaatttccgcaaaggtgccttgaggcgactgcttcttgtccggacgtgctcatcaacgacttcacctcgtccttccgagacggaatggccattaacattctgatcaagtcctttgacgagtcactgatcgaccttcgcgaaatcagcgaactgaggggcgaagaccgaatcgaaaatgctctcagtttggcaagacggcattttcgggtgccgcgactgatccaaccaaaggagttttacagcgaacatttggacatgaaaagcgtcgcgtgttatttgatgatggtttgtcggatgaagcaaaattgggccgagtattcgtttcccgcgtctcagctttatctgggcatgtgtgagaagacgggcacgctgcagcaacggcagccgacgccgctcagcaggagacggtcgaccatttcagcacatgcaccggccgatcagtcgccccacgcgaccgttccgtccatcggacgaccttcgctagtgcaacagtcttcacattccatacagcaaagtgatcaaacaatacagacagcagttgatcagttctgttcagtgccgcagtccgtgccgacaatcgttcacccgccccagcaaagtccgcctgcgcaagtgccggtttcaccagcgattcaaataccgacaatttcagtgggcactatcgtaagtgtgttcaataatgtgattgatttgttctttttctttgccttggagctccttcaatccaaacccaatcaattccacttaattagcccaacactttgctgacccctccggcgatgtcccaatgccccaaggccgtcgttccaatcagtgtccccacaacagtcatttccccactggcccagcaaacacacagtcaaaatgaactgctcactcatcaacaacaacaacaagccattattttccatcagcagatgcaactacaacaacagcaacaacaacaatcccaa

SEQ ID NO: 10053 - DNA, 975 bp, Heterodera glycines
  unsure (1)..(975): unsure at all n locations
tgaaaaataatattttacataattntggttccaatgaaagtgtcttactgcaagaaaaatttcgatatttaaaatattcttggctattaaataataatttaataaaaaataaattaaaaaaccgcgagattaatgcttggccaagtgcttcccgaaaattttccatcttccacctttgccaatgcttgtttccgtcgccagtcgctgtgctgttgccgtttgccgatcaatcgatgcccaatggccaactgggacagtaatagaagtaacaatagcaacagcaaccgtgacaatgacagtaaaaccgggatgtgccccatggcggaagcatactgtagtgccggtgcctttcttctaccctttttgtcgttgttgttattgtagttccgcttcttcatcatcatcatcattagcagcattatttttctgcaggcacacagagatagtcgctttaattgaaaaaattgcaaattttttaaattttttatcgatcaacgagtgcctattttttattgatcaacgtgcgccgaccgatcgatcgatgatcggtcggcggggcgctcatttcgacgaaaaggcgcaaaaaaacctttttggtcgccgccgccgctgctgatattttgcttattcagcatcagcaaaaagcagcattcagagcaataaacaaaacaaaaaaaaaaaccagcaaagaaatggggggggggggaatgcttttccatcattatgcatacgattaagggatgctaatgatgataattgatgtgatgaatcattaggcctctatttgttggccaattatgtctcccacatttagcaagcagtttgcattttgtgggcggcctgttgctgngccagcagccttcattattacatattttctgctaatgnctgtcgttttgtcatccatccattcttatccccgcaggggttttctatttttcgtgtgactatttttgtctttatattttgctgtgc

SEQ ID NO: 10054 - DNA, 3013 bp, Heterodera glycines
atctttgtgaaaaataatattttacataatttggttccaatgaaagtgacttactgcaagaaaaatttcgatatttaaaatattcttggctattaaataataatttaataaaaaataaattaaaaaacagcgagattaatgcttggccaagtgcttcccgaaaattttccatcttccacctttgccaatgcttgtttccgtcgccagtcgctgtgctgttgtcgtttgccgatcaatcgatgcccaatggccaactgggacagtaatagaaataacaatagtaacagcaaccgtgacaatgacagcaaaaccgggatgtgccccatggcggaagcatactgtagtgccggtgcctttcttctaccctttttgtcgatgttgttattgtagttccgcttcttcatcatcatcattagcagcattatttttctgcaggcccacagagatagtcgctttaatggaaaaaattgcaaattttttaaattttttatcgatcaacgagtgcctattttttattgatcaacgtgcgccgaccgatcgatcgatgatcggtcggcggggcgctcatttcgacgaaaaggcgcaaaaaagcctttttggtcgccgccgccgctgctgatattttgcttattcagcatcagcaaaaaaagcagcattcagagcaataaacaaaacaaaacaaaaaaaccagcaaagaaatggggggggggggaatgcttttccatcattatgcatacgattaagggatgctaatgatgataattgatgtgatgaatcattaggcctctatttgttggccaattatgtctcccacatttagcaagcagtttgcattttgtgggcggcctgttgctgggccagcagccttcattattacatattttctgctaatggctgtcgttttgtcatccatccattcttatccccgcaggggttttctattttcgtgttgactatttttgtctttatattttgctgtgcaaatgatgggaaagcatgggagagaaagtttcacacctcattgggaccggatataaattcgagaaaaagctttattaccatttatggcactggcaaatctctaaaatgcccgggacgaaatcagagaatttcccaggccatggtacaaaagccagcgagtctttgacgtcaagtttctcctttcactcaaagccttgggaaaatctatttgaaattatccaattttttatatgtataccgaaaatatgctttgaaaagacgcaaaagcctgtcaagcttaaaatgggttaattaactttaataattcattttctttttttggcactgtacactgaaatcaacacaaaaaaaaataatcctcattaatatggctttgttgtgttaatcggtggcgtgggtatttattaatgatgctggtgtggcatttagcaataataatactaataatgacaataatgaggcggaggacggcacggaacacggacaaaaccagcagcagcagccaaacaacttcagcagtttacatatcctgtgccatgaattaaatttgtcggcttcatcatcatcattaaaaaaaatgtcgtacgtactttatgccgttagagttgtttaatttgcgtgttcatcaacaaaatagtgcctttctttctttcttgcttcaataagaggaagttaaaatttcccggtaattgccaatggcaattacttgttaagtacaagggaaattagatagtcaatgacaattagttgttataattctgggtaattagttggcattagtcattatataaatgggaaagttaaaaattctgggtaattaggtaattggcaatggaaatagtcgttaagtacattggaaactctcgacactctttgtctcattggtcttgaacagctgaatttttttgaaatcaatgtaaaggggttcgcctttttgttttgcttggaagcataattcgtgctattgataatgagcgagattttctcgttgtcggtcgttctcgccgcccagtcgagtgtttctcttgggcagtcttttaattacatttaaaaaaattgtaattagctaatttaaaaatgaagcaaattatttggtttttttattttgttcaatttgtagagaatttggcaaaatatatgtgagcctctcgacatcgatttttgaatcttttaaatcgacttttaaagggaaaaaaattagtggggaaaagaatgctcgcagataaatgtgcgagagattctctttaatcggttaaaatgtccttctaaaattttacaatgggagacggacggtgcacgctaaaaagagatttttaaagatattatgcattaattaatgctaatgagtgagtgctgctgtttcgatggtttgatgggtcttgaccattaaaactagcattaagaccccacccgatgcgggaaaatttagtccccgacaatttctccaaccatccacgaaaaatttttgtcgggaaatttccaccccgatccctcgcccagtgtcgggggcttaaccctaattcaaaacatttttcggacaatttttttttgactatgtctttaagaacgaagaataaatttcgataatttgtactaatagtcggtgaagagtgagtgagagagagagggaaaagggcgggattatggtcattagtctcgaccatctccgttaattgctaacaataagggtgtctgctccttgacgcaatgccttttaaaggaagttttaaagtttaaaatgttggtaattatcgtttgctgcttgctgctaatgggtaagtgcgaagaagaaacaaatcaatgggtgggcgtcggtgttttaaaaaagggggtttttcgcgacaaaaaatgcttattaaaatttaaacaattaaagcgagatatgatacgcgcgcgagactctctctctctctctcgtccctcattgaatttcgacccatccccccgggcatcgtttccatgagaggtcgtccattcggcgcgcggcgatgcttttcctcctccccacctccttcctaccaaccaaatgctc

SEQ ID NO: 10055 - DNA, 765 bp, Heterodera glycines
gggttcgaaataggtcgaaatagatgccggattcgtgatcagcgaccccgaaaactctaggaaacatgtttttatgttttttgaaaacaaaaataatttttttcaaaaaggggggggggtaccatcgacaatattaccaaatggcggggaccagcagacgtttggggcatgggggacgaaacctaacagttcgtattaacaaagagatgaattttcaaagattaagtaatcatttagatgagatacccttacaaaaacgcagcaaatgaaacatatttaatgttacaattacaaaataaaattttcaaacttttatagtattgtttgggcttttaaaattaatatttggcgaaatgtatattatatttgacacgaaattgcattgaagaattgggctaaatctaaaattacaggggcaaggaacgcatgttaaaaaggtagccgggtggattcctggctgaaatagaattaggggtatctgttaattattgcccccggatttttcaaaaaaaaaaaaaattcaaactcgagattagttggttttaggggttttaaggtcgggaaaaaccgattcttgcatctatttggcccgattcgaaccctgaacccggatttttgaacaaaaaattgaaaacccatttttagacgcataaaagtcgtttgcacgcgtgaaatgcagtagagctagatccccccaaagtgccgatttttcgttatttttttaaaaattcttggctaaaaattcgattatttctcacagatcat

SEQ ID NO: 10056 - DNA, 1243 bp, Heterodera glycines
cattttttgcgctgcgtatcggtcgtaaatttcttctacgacttgaacttctccgtaatgattccccgcgcccaatgtgccgagctgagtttggcctttcatttgaaaatgctaaactcaaaaagacctgcggaaggccccgtttctttgctctcaaagaaacttttgaagcatcggcttgaagcattctgcctgataaaaagggttctttaattcatcctgcatttttttgcgaaatgaccatattcttcacaatgctccttgtcttccgcccatgagtaaccctcgcgaagcgtccaatccattccctaatttgttaaattggtgaactgttcaacaggtcggaaattcacaaaccatctcaaggcattcttcgaagtctctcacattgattgggataattccttttgagccgatcccaacgggaatataatcgaacattgtctgcgcaagctgttccttgtgaggctgaacgtccttttcgaagagatttgttctgatcagtcgtacgccacagtttatatcgaagccaacaccgcctaagaaaaacaatgcatgaataaggtcgaagcaatttcaacaatttgcctggcgaaacaacggattgtgggtcagctgaatcaaaagcggcgatgtttccaattgcgaatccgtagccggaatgaacgtcaggtagtccgatcgaatttttaacaattgcaggtaatgaggcaacatttccaatttgtttcactgcaggcagaaaaccagcagccgaacttatcgtgctgacttccaactcatcaaacatcagtttctccagcgctgcattcacataaaaacgaccttccaccttaattaatgaactgtttctgaacaagcgagcaaacttacattcatatttggcacgaacccttttttgattttaaattcgacaggagaaatccgttcaatgaaattgagctcatctttgtaagttctgggcattgtgaatttttaaaatataataataattattattatgtaatagtattttaaagctctaaacacatccaagtttatgtgagggtttttcctctagctcttgtctttgaaaccaaacatatctagaaatttagcggtctacctcagttgggccggcacggttgggccccagcatatttttccactataactttctataacttttttctttgtcatccaaagcaagtaaacgtgggatcattcgaaagctagacatttttataagctgtttctacgctat

SEQ ID NO: 10057 - DNA, 4035 bp, Heterodera glycines
ataaattttaagttttgcaaagttttggcgttctcattactaaataaataataaacttatttgtacttggagcccaaaattgaatcgccgtgtggaggagggggtactgaatatatttatcaaaaaaattttattggcgaaattattagaaattatggaactcactctgtattgcttaaaaattcaaaaagtatgaaaacttaaaaaagcagctgaaacaaattgtttggaccttggttttaatttctccatttttttaaggaatgtcgaaatcagataattcagaaactgcaaatattgagagtttttcaggcacgggattggaagttggcgaaccaacctccaagggaattttaaaagttttttccagaatggaatccttggttcggggggaacctggtggaaaaggattgaagcaataccacacaggccggcaacagaatattttggaggcatccaaacattaatatcctttgtagttatctttttaaggcaaccgcttttcttggatggcctgtggcttttttactactgttgggcaggcgacaccatttggacaagagctcatctgcagatactccctttctaaattactctccgtttgtgaaatcaccgtacttgagttttcgacaagcttaacagttgggtggaactaatttccgcttctcgtcggcttttcgaccatgtaaggcgtgttcagtccaatctggcagtggctgctgtgatcttcaaaaaagttttttttgccatcatgcggtattcgaccattttttaagtttcttcccatttttcgacgcgtatttgtccatgacactcaacaaacttcaacaataattccgtctcaaaaggccaaatacaaagatccgttcgatgatctctcgtgttcttcgctctttgattttatatggacattatttgtagccttacgaagtttgtttttagaaaagaagtttatacttcagattaattgattaattaatcctttgttatttcattaatcatgccgcttttacagaacaattcagccaatctcaagaagacttgttgtgttcgtttcaccttcttttgtgtttggttgactatgtttttgatgctcttcagcgcgttgggcagcagagactgttgtgttcttcgtttggtcatttgttctgaaatggttttggtaaaattttgttttagtccaatctctctgttccgatggtcggtcttcacttgagtttctctgtgatgagtttgacggagttattttggaggctaagcatttgcaaattcattggctgtacccccggcttaacaaattgtcggcagaagcggagattgttggttatggagcagccaacggcggattgttatttaacatcgaagagaataggtcttttggcatctttttcaatatattttgttctttgaagaagagtgtttgaccagctttacaccgaagcattgatggtccgttcggaagtcgatgagcgaatgtttttggtgcttttcctacagaattttcagttgctttatgatcctcaatttgatggtgggtgtacttttttgatcaatgttatctatttcattttgcagagcaagctgtgtcatttttattaaagtttggcgattttgaaaaacgacctataaacgcccaattaatgatcaaaaggacctcacaaaattgtttcgagaagctaagcaatcgcaagacaaatagcagacctccattcatcggcaaatcatatgttataacaacagaagtaacttatttttcatattcaaagcttttggaagaagtacggtttacgtcatttctcgagtgtcgttttgagactttatgttaacaattttagaatatctgcttataattctttatcattgtacgatgaaaacggtttaaattaacaacaaataaattaaaaatttggcatgatatgtgagacattttttgagcgagaaaggaaagaatcgcgataaggttttatgatattgaacggaggctcgttgtcaaaccaaaaagtatagtctcgaaacgacttacaatttatcccgaaacgacctgtagcccaagaagtcatttatatttctaagcataaaattgttaattttagacaatttgtccaagtgcattgtcttcggatgagcaaaacgaagcacaaaagattcgcaatttgttgtcgtcatttaagggaaacgaagacgatcttcttggttatttgttcgaagactgtttggaaaatccaaaagaatttgttgcagacaaaggcaaaaatcatcacatttagcatttatcaactccattttattttattatctaaatttcagttgaaacttggtctcggaattttgcgtgcaaagctgccaaagaaatcgctttgaattccaaatttgacagcgaatttcaatcagaaattgccatgcgaatagccgaagtagggaaaaagagcattttaagttagtaataaaacaatttcagatagaattactcttctattacctgctgcaaaaagttgtgaccaatgacagagaaagaacagtgaatacggggatggaaaggcatttggatttgggggtatgcaaaataaataaaaattaattggtaagggaacgaggaatctaatttatttactataatgcttcgtttaatttgcttatttaattttaggtgatctttcagaacttggaatttttggcttccgtttttctctgttcgtccgaattgattttgtttgcttgcaatagtcaacgacatttcccatggacaatggaactttttcgggacgccgtttcgcctatttctttttacaaaatctttggattggtcgttggggcgaacaccggacttagcagagaagcagtgaaccatctgaacagagtggggggggggggagggggagaatgccgtgccatttaggaaagtctcacaatcagatcgaagagagcgttttggaagaatttgcatgggcaaagaattcgcagctttggtccgtcctcaaccttagtcattcggtcgatgcctacggcgaaccttcgcctgtgcccgcctcactcattttgggcccttcttccgcctcgtacattcagcgcagcattgacctttctcctcccatcatcattttctttaaaaaggtaactttgctcacaatcagtgttttatggcgatgggcaatcacacgccgttttaggtttaccatttggctgcgatccgtctttccgatctttgtgaacgtttacgtgttgcggacgaactgatccggcacaaagcttggactctcttcgaggtccgttttccagaagaagggtcatggcggttgtccgatatttcagacgaatgatatttgataaatcttatgactaatttttcaaatagaaattggcaattttagcacgttttccgaacaaaaacccatcttttgatgggccgtcacttggaccagcttctgatgtgtgtgctgtacataatcgcaaaaatttgcttgttggacaccacttttcaggagataatgtgatgatacgaacacaaaccatcgaactttgcattaatttcaacatttcctttttaggtttcattatcgccgtcaacctcaagcgactagtcgaatttacagaacggtactaatggaagacggaaactcatcggaggatgagccggaaaagaattacgacgacttaataaggtggacggcggtgaagcatctccgaattggaatgtttgaatttagcttttacaatcgagtctttgtgaattgcgtcaaagatattgtcaaagtgttacattctcccgggtctgacggcaaagaggttgaatatggcattatggcatggcttaaccttggcttttgctccagaatatcggtccgttgatcccatttccgaaaatctcgctgaatccgttgtcccccgtcaaaatgatcgccgaccgagtcaatgtcatgtcaatgtcgcaatatgcacagaatgtggcccctcctcagcaaatttcggcctctgtctcgcgcggccgttacactttaaagcagtcaccttcgaaggtgtgcaaaagcattcaatgtg

SEQ ID NO: 10058 - DNA, 4060 bp, Heterodera glycines
tcctagagcaatttgatggcattttgccaaaaccattcaaattatgaaattaagacaaattactaattattttttgactgaaattatttgttttatttaaggaatgccgagaaaaacttgccaactccgaattgagggaaacgaaattgttgtggaataacggggagctgaatgctgagaatgtgagaaaaaagaaaacgatgaaatttcaaaagtgaaatttcagagggcgaggggcgaaaacagaaaatttaaacttttttatttcagagggctctcaaagcagagttggaaaagcagaaacggatgacggaacacattgaattgaaggcgaaagtcttcaatatggagcaggaaaagcagcaattcgagaaaaaatacggtaattttgaaaattaattacaaatttccaataccgtatcccgagccttactgttaaataagcatttaaaaaagaatttctttaaaatttcatattttagtttccgtcgatgtgttcaattcattggtggaacgcatcaaacaattggaaaatcaacagcagaagaaagaggagggcagaaatggtaaaaaataaaaaaacggacgtaaaatttcaaaatttacgaattcttaattaacatttaactaaccgattaccaaatgcaattaaatttcagtttctgttggtcaattggagacatttttggcagggcaaaagcagccaaaacagcaacagaaggaaagtgttggtcaacagcagaagaaggaaaacgttcaacagaaaatggatggaaaatgttctgtagtgaatgtcgtgggtgggcacaaaaataatttaaaataaagtcattaaataagcgattaataaacaaacattaaaatttcatttgttttttaggaacttcaaagggtggcggcggtcattcgccgccgctggcggttatccctgtgaaaattgcaaaggttgaaatcgtatttttcataaatgcaaattgaatttccaacaggagttgccaaattggattcaactaaatgtttgggatgccaccatttgtcacaaagacatcgaaatcaccgggcaaagccaattgacggtcaattgtaagggcaacggatttggtaattaattgtgaaattgaaataaataattaaagtgatttttgataggatggcattctgtgtttgcgaaatttcccatctccaaatgttgtcgtcccttaattttctactttgaaatgaaagtcaccaaattggaaaggtaaaatgacattttaagtaattcaatttacaaattcgcataaaattattatttttgtgcatttattggtaatttttcaaaatttacatttttatagttttgtctcgattggattcgccaccaaggaaatgccactggacggagcaatcggacagcatttgaacagttacgggtaccgaagcgatggctcattaggctgcaatggtatcagtcggccgtataaaatgggatttggcaccatgccaatgccattcaacgcggcggttggacaacagagggaccgccgctacgttgggagtgccaattggccatttccattggaatttgtgcccgtgccaatgccatcggacggcgcattggcattccaatcgccagcattttccaccggagatgtggtcggatgcggcgtttgtttggccactcgacagatctttttgacgaagaatggccgacgaatcggtgggccaaacaaaaaacaaaaaaagcaaataatttaaattcaatttgtcagatgactcctcttttttcactacaactcccatcaattctctgtttccatgcgtttctctgtggactggcgacaaaattgaggcgaactttgggccaagtttcaaattcaatttggccactctttgaagaaagccgaagaaacaacgaaagggcgattagcattcatttaattaattaattcaataatcttttttctttattttatttttaattttttatattattttatgatgtgtatttgttaatcaaataattttctgtttttttattcacttttattttctgtttttccttttttatgtaaagatttggttaaaaagagaccaccgaagaaaatcttgaagttgaagtaattagtaattttgaagaaattgctaaaactattaaattccccaaatttcctctttgttctttccactcattttggtgccattttattaatatttaaaatcgtttaatgggcctttttattaattttttcgcacttccagcagaggcaacaaataaaagctatttaataaagaagcatagatttttcacaaaatacaaagttataggaatatgtgatgaatgttaagcagataaattttaacaaaaaataattcattttcttacaaataaaaataaaaaagaagaaaaaagcttacaacaccttcgattcccaggacgtctccgttccaagtactaggaaggcccaacgttgcttaacttgccagatcggacgggatggcgtgctttcaacgtggtatggtcgtaagcgaaaggggtccatttgaaagcaattaaataaggaaaaaataaagagaaaaagtcgatgattttttaaataaaagatcaaaacatttgaatttaggcatcttttttaacaaatttccaaactggcaaacggcagagaaattgaaaattaattacaaattttgcgattcataacaaattcctttaaaactcataataaagcttttttctagacacattgattttttaattagaaaaactctataaaatcaaaattttgcttaagaaaaaatggttttgtggtgattttaagaaatcatccaccattcttagtggttaaagtcattatttttgaggtgccaatttcacattttattccgttaagaaatcttaaaaatatttcggcaaaattcaattaaagaaaaatgtatttgttcgattagtattttttatataattcagttttaaatgtttttccttttgtggataaatgcaaatgttgatttttcatttgggaaagcgaagatacttttaaatgaaattatggtaaaaatcataaaaaatattttaaaaattttaaattagcaaataaaaaatgacccgcggcagaataaaaatgaatttccaatttcttcatttttctattaattgactttttctattcattcattattaccacatttattgttgttatgaatgcaaaacgtaataatatcgcttaacgtaacccagaacaaggattgttaaagtatttggaattcatttaattaagtaaaaataaaaagaaaaattcaatatttttaaaaaaataaaagagcaaagaatagaaattttggtgttttttcagcaaatttcccaaactcgcaaatcgacagaaaatgaaaaaattacaaattttgccagtctcataaactctctttcaaaatcatataaaaaaatttcatagacgtaattaacgggaatttgaattttatgaattgaggaaaaatctaaaaagcagaaatttattaagaaaaattaatttgatgatgaatttttaagaaaatgaccctccattcttagtggttactgtcgttcttttgaggtgccattttccattttattgtgttctgctaagaagcctaaaaaatcatttcggcacaaaatgcccaaattggcaaaactggggattacacaagtcatcctaatagtttcaactaagctaaaaatgttttttcaagcttagctcgataaaaccagagggcattcttttaatctgaagatatgcggagattaacgcattttgtaagcaaatgtaaaattataaagttagcttgaacttttacagctgctctttggaattaaaaaagattctcttgacccttaggataaaagaaattttttttaagaaaaataattttaaaatcccgtaaaaaggatagaaaataatggctctattttatcactcacgcgcatctctctgcacataaatgttgcgaatgtcggagatgggtcgggagtcgagtacgagaatgtcagggccaaggagtaccaaattaatagaacataagaaaaacttatgaacgatgcacttct

SEQ ID NO: 10059 - DNA, 1377 bp, Heterodera glycines
  unsure (1)..(1377): unsure at all n locations
cttggataaaattccttcctcatccattttttagcttatcantttgcccaacaacaaaaccaaaaaaaggattaatttatttatttgaaagatatttaattgattgatgataatgacataattttgcctaattactttttgtctacaaatgccgccaccctataaaaggcgaacatattcagcacaaaacagcaaatgttcattaatatatttggcactgctgaattttatttcccaatttacatttctttaaagttttgctatttgtaaattttatttaaaaatttttaaaatatttcttagattgcacaatacactttctttaatttgaaaaaatgtcatcatccatcggttcgccagatacatttttccgttcagaaactgatcagggtaatagaaaaattttaaaagaattacgaaaaataaaaaaataattatttaaaataaaatacaaaatctctaaattttatcacaatcagaagcagcagcaggagcagaagaagtgggcaaatacgaagtgttcagttggcacggaaatttgagtgatcaattgtcagccgaattgttcgtcactgatcagcagttgctgaaggtgggccattttgaatggacaaatgatcaaacagcgggaggggaggggaggccaaaaacagagaaatattatgggaaattagcacaaaatttacaattcgttttaaaggttttctaatgatataaaatcaaaaggagaaagggccgacctattcctagagcaatttgatggcattttgccaaaaccattcaattatgaaattaagacaaattactaattattttttggactgaattatttgttttatttaaggaatgccgagaaaaacttgccaactccgaattgagggaaacgaaattgttgtggaataacggggagctgaatgctgagaatgtgagaaaaaagaaaacgatgaaatttcaaaagtgaaatttcagagggcgaggggcgaaaacagagaaaatttaaactttttttatttcagagggctctcaaagcagagttggaaaagcagaaacggatgacggaacacattgaactgaaggccaaagtcttcaatatggagcaggaaaagcagcaattcgagaaaaaatacggtatggagaattttgaaaattaattacaaatttccaataccgtatcccgagccttactgttaaataagcatttcaaaaagaatttctttaaaatttcatattttagtttccgtcgatgtgttcaattcattggtggaacgcatcaaacagttggaaaatcaacagcagaagaaagaggagggcagaaatggtaanaaataaaaaaacggacgtaaaattcaaaatttacgaattcttattnnacattta

SEQ ID NO: 10060 - DNA, 3733 bp, Heterodera glycines
aaagggagacaaaaaattagagaaaaaaagtaatgtttttctctggcactctctatttattggtacacatctcgttttttcgggacggtgtgttaacagattttcaccaaaaaattacttttttgcgattttgagatgcgaccatttttacattcaaaaggctttttttgcggcatttttcaaaaaaactttttttaggcggggggagtccggcggtgccggcaggcgcccggaaaatttttttataatttttattgcgacttttttgttaaaaaatatgttcaaaatttaataatttttcctcttttcccccttcgctggcgacccccactccccgaaatagtcatccttaacagtgtaaaaatttctcggtttccgagactaagaacccgagaccgggaaccgagagaagcgaaaaacccgagaattttcccgagtcgggaaccgagaactgagactctcgcacagccttagggacaaaccaccacagtattaccaaatatttcacaaattgtcatcttattttttttctaaaattttttttaaagaaaacaatataggtaaacacagcggcccaattttgggctccaagtacaattatgctggatttttcgtcttagtggtctgtgagttagtcaccaaaagggggggtctcaggttcgagtcccatgcatgctgaactgtattttgaggtttttaaagcaaataaatataagtgaaatgataacacagtatttaatgaagctcaaaaattagaaaaaaattttatttcctgaaaaaacgaagaaaaaccttttatcgaactgtgtctattcaaaatcgaattgttcttcttctccattgttttcttcgtccgtctcccgtcgaccaccaatttcttcttgctaaatcaccatcaatcaatgacattgataagcgaaatttcgtcagtttcttcttccggttgatcgaactcatcatgctcttccctctgatcacttcgtctctgaattattatatataaatttttaaataaaacaacacagtttgatcaattgtccggagttcacaaatttcgccgtcctgcaccaaatgatcacttctgcaactgcaaattggagacggaaatgttgtcactgcagaaccacaatgcccgatcattgaccaaataaaactgacgtctccgcccataaaccttttgaattcataaaaatggaaaaaaacaaattttaaaatttaccacttgactcgtttgcccgccaatgtgcctattccgtcaatttgttcccaaagtgtgcttccatagcgctccaagttttcgcggctatccttggtagggaaaacggcacagacgaaattgtttgatggagaatttgaccgagcagcctggctgaatgagacggtaatcttcgtacaactctggccatggtcgccgctcagctttatgtagatttcgtcgccaaatctgatcagattgtccttggcagatgaaagacgcgcctccagagctgcctcaacatcagtgcacacaaatccaacacctgcactagtctcaattggtgcgtattgcaatgacccacagatgcggcgtttgatgtcaagcagctaacaatattcaattgaatttttaaataaatataaatgctaaaatttgtttttactttttcgagtggcgggaacacatcaaatttggcattgatcaggcgaatagtgttttttggtcgtctgtaagccttctgtgtaccgacaagcccgaggatcagaagatcatcctctggatcaactgactttttttgtcttggcagttgttgtttcttcttctgtggcgtgtaatgagcaaatttgtgccgaacttcccgactgatccgttcgagggacgcccggctggctgagcgtgatctgtcccgttttattacagccgcgatttcatcagccaatttgcgacgtgaggtgcgctgcaaatgatcgacattcatcttggtcgtcctgttggagttgctaaaattaaaaaagagaaaattatttgaaaaagataaaaaggggattttagtttcactcacttttgctggtggtcggtgtctccatcggtggtgccatcttttcctccaactgccgccgaagcgcagtgatcagtgcgtctctgttgcggacctgctgtcgaagaaagctgatcacttgttcctgctccttcagctgtttgtccaattgctcggtttgtgtcgcggcgtcctcataagccaaatccacgtccgttgctttgtccatcattgtcaaatccatgtgtgttgcattgtcggtagttgtaaagtccatgtttgttgctttttcgtcagttttttgatggacacgcacatggcgcctgatcggagttgctgacaatggccttgggcttgaacgcgggccttaatttaagtttttcttctaaaatagtgattttttgacttacgaaggtccggagttgacgttgacggccctttttcggcggcctgggtcgatgtcccctctccatctgctgttggcacggcttcggtctgcttttgccctgaaaatgcaatttttaaaataaaattaattttggtcaattttcgccactttttggtgttgaaccaacactgcgacccagatcccggcgccattccttccgttttcgtcttgcctctacaccagaattgctcatattctttaaattttcgctttttttgcgcgtcaagaccatttttagcttaaaaatgatagaaatttattgaaatttacactagggtcaaaaaaattttcctcgggtcagattttcttgaaattttgcccaggctagttttttgaccccatctatcgaattctattttgttttttgaaagtatattttctaactcgagatcggctcttgtgcttttgcaagggaaaatccccggaaaattttaagttttgcaaagttttggcgttctgattactaaataaataataaacctatttgcactgagagcccaaaattgggccgctgtgtttagtaattcaatatgattttcgataaatcgttttttaatttaaattagaatattattatttctggatatttctgaaaatgtattcaaaaatgtgcaacgttacttctttttcatcatagtttaaatcaaagttgccagataaaaattctcaaatcatttggtttccaaaaaagcctcattcgttggagtcaaaaagcatcatttaaaacaaaaaatatatataaaaaatcaataacaaaatgatcatttttctattaatgatcgtttcagcgttttttctgtcttttcaaaatatttcgttaactttcaaaaaagtcaatgactaaggatgaatttttaggttttagcctattttttcctgaactctcagtgacttgaaaagcacgaaaagcattttttcggttgttgttgttaagctacttttcgagtttttagagcctattttagttttttcccaaaaatattaacaaaaatgcaattaaatggagtcagatttctgagcagtattcggaacggtttccgagcttaaaaatgttaaaggaaggaagcattatctacagtacccacgaaatgaaattgcatggcatccgaattacaagcgtatcatttaataaagactgcgcagatgagcaatggtggtgtcatttataaaacagcgagacgatatttcatccaacataacacggagagaagaatcgattggtatatcatttgtgccgttttttacggggcgttgactaaagtacacccga

SEQ ID NO: 10061 - DNA, 1029 bp, Heterodera glycines
tttttgatttgatgagaaaagaacaacaaataagaaacgaggatttctctcttcccccccccccccccgccgatggcaaatgaaagtcgaattggccactgttttattaccctcaggcgaagagcgcccaaaagacgaaggtcactctgaaagaacggaagagttgtcagcggaagggccttttgtgttacggggtatcccaaaatgtgcaggtgttccatgtccgcgtcgatctgtgccaatacgtccatcatcgcgacaagcgccgattggacggattgcgactgatcggcatcggagcagtggcggatcaattctttgagcagcagttggtacttctgttgtgacggaggaatgacatttcggcatggaaaaggccaaaaagaccgtaatccgttggattggcttcagcaaataggcggacaatgggaggaggtggccggcacgccgctggcactccttgaaaagcgaagccattcaatacaatgaaaggcccctcgcccagcagaaaaaccgtgaaaaatctgagttgatcaatcgagttttccttcctcaacgcttcactgatcggtttgttgcggcaataggcgcggtaaagcgaaagcaaacgatgccgctgggcattgagcacaaaagaaatgccatggacggagttggaagagcgctgcagggcgggtaggagcagagaacggtggaaatccaactgagcagggaaggaacgaagtttaagcaacgaattcagcagatcagagacaaagtgatctcttaatcagcgaattgaactgatcagagacggactaatgagacagtgtcagcagaagacgtaaaatgagcatacaattggcattgtttaatagaaaaatcattgaccagctcgcggatgttcccgaacagaatgtccgactgtccgcacagtgcgggcggaatttgcgaattggcactcaaatccaacacttcgaaaggtcgaatgtaatgagtgacgatttcgtccaattcacaaacgtaactcttctcggtattcaactgaaa

SEQ ID NO: 10062 - DNA, 960 bp, Heterodera glycines
ccttttgttttgcaaaattttttttgtgatagtcataaaaatttattctctggggtttttggggtccccgatcacgaatccttcaattattttgatcaattccgatttcctaatctaaatttgaacaaaaaatcataattttaaaaattcaaaatttcgatttttattcgagttcgggttagggattagaaattagtcaaaatacatgtcagattcgtgattagcgaccttttaaaccccggataaaaaattatcatggttttttatcttaaaaaaattttgcaaaacaaaagggtccccccttttgtttcaaaaaggccaacttttacagtagcgccgttttatttgttgcttataaaattaggcttatttaatggtcatgcatatgacagcaaagtctattttaaaccaaatgattttcagcagaagcagccaaggaaacgcagcagtcccggctcattgtccacttcaagctcttcgtcaatcatcgcaatcagctcaacttctcctaccgctgttcctgattcagtttcaccacctttccgtcctctggaggtatgttatcttggccattttcaaaacagtacgtcaagtggtatgaccggcactaataaaattgtcaaattccaacgttttcacatttttatgttcaaaggttttttaaataacaaacgaaagtcaaatttgttggttgcattgtataaaccttgtcgcttttttgtccatttatatcgcatttcctttccacttttttgagttattttgcaaatttattgtcagagagggccaacacttcaaaaaaatcatttgtaagaaattccgaaattttttttttaagacaactgggcctactaacagcaaagccactaaattgcataatgctgaagaaatgcttgccaaggctgacaatgagcagaggggtgttcaacgctttgtgaacaggggtggccaagttggata

SEQ ID NO: 10063 - DNA, 1628 bp, Heterodera glycines
aaactagtcacgttctggtacaaaacagctacaaattcttacttttccgccccggcgctgaaaatgtataaaataacactggagaacaaaattttgacccgaagagcaaaaaaaaaaagtgtttggattcctccctccgattttttttctgactaccggcctgggttgacccccacctccccttttttcatgtatgataattttccaaaaatgcaattttgagtagcgctacgaaaattgtgttctttcacatataaagatttgtgagaacttaaatctttaaatttaattttttattttaatttagaatttttgatttctatataaataaatctttatttaaaagattgaagaaatcgttcaatgaattggaccgagaatcgctggccaagaatcttgcatttacagcaggtagcaaaacatactaacgaataatcaaatctattaccgattgatccttttctttcatagtccgtctcgacagtgatggtgttgacaaaatacagaactcatttttgcgttatttggtccaaatggaattggccaaaaaggagcgagaaacgaaaatgtgtgattcctttttttaatattttgattgaccaagctaaactatttccatttccaggcgtggaattccgatggcggaacggaaagaattccgacgcatgtttgacgagacaaagatgccaaaagcaaacccgcactttgaccaattgttgatatccttcaaatcgggggtatttaaaaaaatcaatcggttttctccaaatgcacccgggtggggtgctgctaggcttaacactggtgtgaggagttggagaaaaccgatttcattttttacaatatattaaactcaaaatttttccctcctagaaatatgaggactctgtcgtactggagcttgaacagtttgccaaatttgttcagctgcagccagtttttacgatgaatcagcagcagattggtcaacattttggacgaggtgcaattttaaagttgacgtggaatttacaaaaaaaaaaaaattcttttttgagcattggcactgacacaattcattcactctcatgtacactttttgagtggcaaaaacaaacccaataaaggcattaggaccatcagtgccggtcagtaataaaatatgtttgtattaatttataatttatttttaaaataatgattcatctattttttgcatatttttgaagaaaaactgctcacttcaatggctgctgatggttcgatgggttacacggaaaatgttttacctgtactccgtttgttcaccgcttttttaacggacattaataaatcggaggtatgtttctatccagaccgtaccccataaaaatttacattttttcgctctgggtaaaaagaaaaatgttttcagttttttttttaaatgttcagagtaggaattgtagtcggtcgattaaaaaggccattttttactattttaggcccaaattaaaaaaaaaccccaaatacatgtttagctgaaatcaacagccctatctgaacctgacgttcaacaagtgccagttcgttcattgcgctcgcgtcccattaaaagggtggtgtcgccagacaatggagcaaactgagcaaaatcagtggacgtgtca

SEQ ID NO: 10064 - DNA, 1544 bp, Heterodera glycines
  unsure (1)..(1544): unsure at all n locations
caaaatttttcaatctatagttttttggtgttcgaacccaactcgatgacctcaacatatgttctttcaaccaactgagtttcnatgcgcagctgactattttggaacattttgtcgagcaaattcagtcgacggactcattcaacatttacatcaaaaaccattgcacggaggaacttgctgaagtacaacagaggaaggcaactcttgaaagagatgtaaggaaacgtattgggtggaggagttccgcaaattttttattaaaaatattggaaaatttttgatgcgcagctcattgactagaaaacaattttctgggggtggatctgaaggcttttccgtaataatgcatttttaaattaaatatgaaaattttgcacattttaaccaaatttgttaagaaaattggcccatttttctgaaaaattaaaaaaattttaatttaggaagtgggggtgattttttttccctatcatggctcggtattttgagccttttttcaaaattactattttttcagttagctgaagtgcgtactcaattcgctctgctagagaaggacataactgtacccaatgaaaaaccagttgatctctcccttatgtctcgcaaacaaagcgccgaatacaatgccaatttgaagaaattcaccacattgaaaaatgatattaacttgtttgagcagaaattgaatgaaacagagaagaaatgccgggtatactttaatcaatctaaacacccagcaaaaatgactgatttttggcgctttttgagttagcttttttagggaaattaatgagttttagggtcagacgccgcagggggaaaaaggggggggggtcgaaacaccatttgtgtattattctcaacataaaaattaagctttattgaatcgaaaattatttttagatcctcaaaatcaacaacaaatgtcgcgttgaaccgcttggtcaagaccgtttccaccgattttattggttctttgccggctcagccgatggttatgcagtgtttgttcaacaacagcaaagggtgggcgaccatctttttatttttttaattgggcaaatcatcaatttgttatttattaattgttttttaagtgttgtccgtcttatattgacctaaaagaaattggcactcaatgcacttcctcaaaaactgatgtcaaaaagcgcattaaaaaggaggacaaagttgacgaaaataacgacgaattattcatacaacgtctgactgaaaatgtggaaggaaggttggacaaattaattttttctaccgaaaagtttttttcccactttttagatctccttgtagcactgatgaaaggtgttgttcaacagaatgttggtggtgcattcagaacattgcacaattggatttgctgattgacacgctgacttcgcgcggtttgcgtgagcatcgactgaaaaggcagctgaacgctttccgcgatctgatcgaggaaggcatgggcaaggtggagcaggcaacagacaatagaagcagcaaagagaatgtgatggttgatatggatatcgata

SEQ ID NO: 10065 - DNA, 4614 bp, Heterodera glycines
  unsure (1)..(4614): unsure at all n locations
aaaaagtcattttagaaaaataatattttctgaatagacaattcggtgactttttttggttttaaatttttaatcctaaaaaagaattcatttaagttgcttgttataattcattttttcttttatgatatcattcacacaaattcgaaatttggacaataaattaaaaatttcaactcatttggacaatcaaatttaaattaattccaaattaatttaataaggcccaaaatgaggagaaatcggtgcttgaccgttgcaacggaaaaatgggctatttggcggcaattccgatgctcatcaagcgattgcgcgacgctgcggcggatgggcataatagccatgatgaggggggcgaaacgcggcgaaggggtgggaaaataattgcaatatttttttattttaaagaaaaaaaaatttattttttttgtatgaaaatatatttaattttttattttatttttgtaagaaaataaataaataaaaatttccatttgcaacttaatatgctatttcttaaatgttttaaaattagaaattaaaatttttttatttgtccaaaaaataacggattttttctaaaattcaacggaaaaaaatgtgattaaaaaaattagtggggaaaaaattaagataatttaattgaatagctttaaatatttttttaattaaattttttttttgtaataaaataactgctcaagattccgtttcccacacctccgtgctgttgggtcgtcatgcgaaaacggtcacttgtggattgcatcgggctgaacgctcaacactcaccgcacaacacacaaatttcaccgaagccgagtgggggaaaccattaattaattaataatctaacaaatccatggaattgtgatcatcctgcttcggaaaaggcgattttgcgggaaccggaaaaattatctggaatttccgtaacgaacgccattgttttatagaaaatacccaaatcaaatattcttggtattattcgaggagccctaatgtttcgcttattactacaaaagttgaaggaaaaaatcacctaattatggccaaaaatgaggaaaaaaaacgaattttcaaaaatattttcgtcatcatttttcacaaaacgaatgaaacttttttaaatttacaaggtaatttcccattagcaaagctttttttttgtcatcctgctttgaaaatttttgaacaaaatttgtaccaaaacccttatataatttcactttttcccccctttttttacagtttttacaatgcgctccaggatgcgtatttgttgacggaccagcaaatgtgggataatggctatccccggtgggcagaaacttccgctgctgctgacaaagcgatggaggaggaggaggggcaagggttggacaccgacgaccccattgctggtgatttttgttttataatttattttattttaattatatattttttaataaaagtgtatttaaatacattaaaatttaatttgtttacaaatttatcttttcgacgtttcgttaaacaatcaaatatttaaatttctacaggaaaacggcgcgtcgaaattcgtcagtctgagttagatgcgggcaaaagtcgtatcccatttgtggacgatgcaggcaaatcctatgaatttatacacatatgcagactgaattcatacctggaaaaaacaatttttttcgatttaaaaaatatatttataaaaaaaattaaaatttcggtgaaatgttccataaattaatatattttttttgtgtatttaatttttccatatttcagtgttgtccagggtgtgtgatcgttgtggcaaagagtatcggctgaccaaggagggcgattatgcggccggtgcttccgctgatcagtgcattttccattggggccgggcgtggaagaaacggggtgggtgtactgtattaggatatggtattctggggcaaacacaataggaactcattatcagagttatgttggtgcagatttagaaaaagaataatggctccccctccgccgtttcctttcctccccttcgaaaattcaaaaaaatatcttgaaaatttttattaaatttctagaaaaaaaatttgaatttttttttagcaatctttgggtaaattttttaatagttattaatcatgaaattttaaaaattgttcgaaaaatttttcatttttttctcttgagttttcttgtaaaaaaaaattcaagattagactgataaatttaagtttgaaaatttaaaaaaaaattcgcgcggggaaacgttgtgtacccgtgaaagaccttcttaaaaaacgcgcttctcgcaccgcctattttttcgaattaattttttctttttccattatttgaatttgttttttttttgtaaaaaaatagtttccggcactgtcgagtcgcgctacaattgctgcgatcagccgctgactgtgcagggctgtgacgtcgcgccgcatcacatcacgcagacgcaacgcttgtccaccctccgctgctacgcggagacaccgcgtccgttcggcgtgggcgacccgcgctcaaaaaaggcaagaagcgcgcgcctcgcgcgcacaccaagtgccgcgaaatcaccagacacatgaatggcatgggaaaatgggtgcagctccctccgcatcgtttccccccgagaaaattaaaaaaaccctttccaaatttaaaaatttccaaaaaaatctgaaaatttttggcgatttttcaaaaaatttattaggcattactagtttttgaaaaattttgcaaaaaatcgctagaaattttcattgtttcttgtgatttttttatgaaaaattttcccaaagttttttttcatgaaattttttaggaatttttcgaggggaaaactgatccgggtaggacgtaatgcacccctcggaacacccccccccccacctcctcgccgtaagagacccaagaaaccctctcctgcctgtcaaaataattttttcattgaattttttgtacaggtgtatgcccttgactgcgaaatggtgtacacggtgtggggaccggaagttgctcggtgcgtttgttcatttgttacatttgtcttttataatcaatatgtacatattccatgtttatttaaataaattttctattttgatgggtgcacttcattcctccgtcgtttaaaaaattttttgaaaaaattgatcggttttttttttgaatttctttgaaaaatttgatcgatttaaaaaaatttttcttatgtcttataataagaaattttggggagtggagggaaacgacctgctccggttttcttccccccctccaaatttttctgtttgatgattaaaaaaaatttttttttgggggggggggacaatctgcttcggttttcttaccccccttacaatttttttctgcttttaagcctttccgtcgtggacataactggcgatctgatcctggacctgatcatcccggccgagcaccgaatcgtcgactgtaacacaaagttcagcggtctgaagccggaacaagtgatggccggcgaatgtgatctgcacgaagtgggtgatcaatcgatcgatcgctcgcacaatgattttgcgcataaagcaatcagctcgtttctctattaacctgaacaagccaaaaaaaaaatcgaaagttcctcccctgatcagttgaattacacaaaaaaatcatatgattttttgtaagaaaattccaagaaaaacaaaattgaaacagagatatttggatacatttttagaacaaatttaataattctgcataaaataaagaatcgctggaccaattttttgacacttttcttagaaaaaagatactctaacaataagattttttactaaaatttttaagttttggaattttttttttaaatttttgagtgagaaaggaaacgctaaagagggcgagggggggggacgagctgctccaattttttgttaacagaagagattgttttttatggtacggcctaattcttttttaaaccccccccactttaatcgttaaaaaaatatttttattaaataaattcatccaattgtctcatttaattcgcccccccccccccccatttcttaggcccatcaacgcttctttgagctggtcaacactgagaccattctgctcggccattcgttggaaagcgatttgcgtgcaatgcatcttgtccatcgccgggtggtggacacttctgtacgaaataaatgctcacaaaaaggatgtagtagccatagccccctgctgttaggagactacaaattccaaataacaaaacaaatttattataaaaataagaaaattgagcccgggaggtggggttactgggcggtccagtcccggtactttcaatattgcgcgatctaaaaaaaatctgggtctcattaaacaaaaaattaaataaaagattttttggggggtggggggaaattgttcaaaatttttactagctttccaaaattttccaacggtgttactttaaaaaaaacaaaagatgcggttgtgaacagttgaattaaaatatttagaaaagtaagtaaatttagtttataaaaatttctccaacggnnggggggggggtgaaaagtaaaataatgtcaaagaccg

SEQ ID NO: 10066 - DNA, 2308 bp, Heterodera glycines
tgagtgcattagagccggagtccctttttccatttgctcttttcttcagtcaattcaacacggacggttcacttatgcgcaggcgcgcaaatgcctttccgacccgttaattgaggaagtgactgagcaagtgcacgtcactttggtaacggattaaatgacaaattcaaccaaatgaaacgaaagtttgtcccaaaaaaagggatggcaatacgccggccgcgtggaaagggcggtcagtcggctgatgaacgatgcggtcggccactacaggccaaagtgccctttcagacctgtcgtccatttataaaaggcggaatatttgtggctttttaggattgacgccgtcccaattgccatcggagccattaaatttcgaaatccaattttcattctcgaggatcacaactgtgtgcacgtggacttcgatgttcggatgattgtgctaaagtacgacgagggagtgggagaaaaacgccatgacatttttgtattttaagggtcaatcccggggacgacgaagcattgaacaccgaccaatgggaaatcaccggcacagcgcggaaggtttacgagaacaaactgatcagtggcacggcgtacggatgtctcggtttggtaagcaagcaaatgcggtgtgaactcattagtagagcccgacgcgggatccagccagcaatcccgcatttttttggaaattatgggtttgatcccgctaaattttcatgttttcttgagcaaaaaaaaaaaattattttgaaaaaaataatataccgtctactggtcactaattattgcatttttaggtgtgttcaccagtaatccctggcgtgaagccgggcgacacattcaaggcacgatttgtcggcttccaattccaaaagaatctttgccaaatccgtgcggcgcccctcaacattaagcgtttttgacaccaaatttcattttttcaattttattttctttatttttttattaaattttataattgaaattatgtgaatgttgatgaaagtgtcataggatgaattataagtaacggtcgctcgaataaatggctttacaattagattgattagctataacaatctccgcggacataatttcagaaataggaaaagaaataaaacaaattatctgagaagttaatggtttagaaatttgccattttctattgtaagaagagaatctcgggtcgaaaaacaaacagtgaaaattaaggaattattagcaaatttaggtgagtttgtttgacttgttctgttgaccatcccaaagcacagtttgtgtcatctgttcggtgttctacaaagtttattgttgtgccgtcgtggaagaagaagggattggtacgatcacctcaaaaaggggaagagtccaatgtttcccctccccttccttttggtacctccacgtaagtgatggggaaaaagccggtccggccgtccactgtgccctcaaaccaatgctcgtcaatttgcgaatcgagctgaatgatttggccctctaaaaagtgcttaatgacaaaggggcaacaaaaagaaaactctctctctctattacaatttacgtctctaatgaatgactctcagtttcttcttgtaccccccccgtcccctttgtccgttgttttcccttttttccgtttcgtacccttaaagtcgagttcgcccgggtttagtgcttggaattcgtagagtgccttgcatttgcccttttgtgaggcggtcgatgtgtcattttgatcggcagatgaagccgcagtgacggcgtgggctggggatgaaccggcgccatggttgttggcagtagcgggtgccattgggccggagatggataaattggccaaactgtgccttcccaaatcgttggcactgaacacatggatttgtcacagtttcatttcccttttaaacaggttcccaaagtgactcattgcaaattaaaatttgttagtttaaaagtcccaaatgtgttgatttccgttttttgaaaccgacagatcgaaaattttccctttaaaaaccaacgggctaagtgagtttaagtcactgcgcgaactgcgctggcggtcaatcaccggcctcggcacgtgctccacccgctgacgcgtgttcgactcgtccacccttaaaagacctttcaattttagaaaaatgggaatttgaccaattctacagtacacaataagcaaattttgtagtcggaaaggatttgtatctccaatgccctctacaagccaaaaccctggggccgtccctagggacgaaggaaatcaacggaagggcctttttttgagttttattct

SEQ ID NO: 10067 - DNA, 2592 bp, Heterodera glycines
cctctaaaatgccagataataccccctttgttccttcaataccttttgtttgtttgcgcttttttgcgtcataatccaatcgccaacttttcaatttgtttctatgtgcctaaaaccaataccatcacaacaattctttttttgacatactccctgaaattgaattgaccaccaaagactcaactcgaaatcaaaatttattattaatttaaatcggaaagatattgttaaattttttgttctgctcgggtagtggagctatgggtctgggccggtccatggttgacacgaaaacatgattggacgcagtctttttgtccaaaaataatggcttttttaaatgttgagctaaaaaattaatccccgggtaaatttaaagcgaaaacttttcgtaaaaatgttaaaataagtgaagagaataacaaattatcctcaaaaaagaaaagagataattaaattgcaaaaactcacattgaaatctttgagttcattgttttgaaaatcgctgatcgggtcgagaaagttgtgctttacgttgtcctccaattggtattttacgtcggccatttgacggaaggcatcggccgcgtcacaaagggcctgagaaagagcaaaaaattgtacaatacatcgattatttttcaaaaaacctttccaaagtccgattgaatgccaagcgaacggccgtacttttgcattgtgtccgccaacattccctccgtttggggatacgattgatttttggtggaaccgcgcactttggacattgcgcccaatgcggcgattttggcacgaaccgcttaaaatttgggagaatttatatcaaaatttgcacagggaaaaaacaattttttggaaaacgccggactgaccagggttaggctgtaaatattcgttggtacccgcgatgacctgcgtgatcagttcgtttgtcatgtccaccttctgtaaaaggaaattagaattaatgtcggtgaaatattaaattagcaaaaaatcctaaatttagaaaaatgaattagttttatctcacttctgttaaaatttttaagtgcattttcaactgtctaaatgagatttgcactttttacaagcttaattctatgatagtgatacatatttcgcttaaatacccccactaactctttccatctccgtaaattcttcgtcaagtttcgtcgcctcagcagtgccaattgattcgttcaggtactggttggccttgttgaactgttttttgagcgctgacagagacattttgccgaaagaaatgaaaacaaaactaaaaatgttgaaaaaccatgtttacttaaaataaacatgaaagtgtggtaggttattttacggacaaaatatttcaaaataaaaaagggcaggaagtggtggtctttctctttttggaaatttgagtttgatggatggtggtgccatcatttgaagcgccaaagttccggcgaagggccaaccgacgtaagtccaaaaggacgggaaaaggtacgaaaagaggcaaatgcatcgtggggggagccgttggaggtgaagccaaaggcaaagccaatgaaacgaaaagaaaggaaaaacggaaggagagaaaggggaggaaaggaaagtattgaccgaccgcaaaaaactgcaaaaagaacggaaacgagaaacgggaaaatgggaggaggggcaaaaaaagggagagcaaaggggaaaaacggggggggggggggaggacgcggtgagaaaagcggcacgcaagtccaataattcgcgtgttgtgatgtgttgtctcttccgtctcgctttgctgtgttcatttgtgacgaaaggacgagggaaatgagctcaccccaaccccaactcatcaacgaaaagcggcagaaaaggcgaagagcaaaaaaagagaaaaaataaacaaaaattaatggaaaagcgcaaaattaatgaccaataaaagaataattgttatgtaatttaggaaacaatcaattaattaaaggcacttccaataatattcattatgtaattcagtcatttgttctcaaagccattgcttttgaagcggcacacaaaacaaaacggacagacaaatattacataaaatgctgaatttttaagtaggcgccgccggagaatgttaaaatgagagtacatttgccattggactccatccccgtggatttaaaatgcggcaggacgacacgggggcatctgcagcaattgtggtgtgccgctcaattttatttcactcattggcaattctgccggtgaatggtgcagtgaatccgagaaatatgaagaaaatgttttactgtgctctggtttaatgagaaaacatactcaaaaaagcaaagattgtgtccagccaaatgggggaattgtgccaaaggggtaattctacttcagcagtttcctcaagtgcatggtgtgcatcccatctgtcattgtgcggttttaaatggcatttttaataaccgacaaatttaaccaaatttttaaattatttcgtcccctgccgaagtttcagcagatgagccgcagcagtgaattaagagtatttggagagcacttcactcttttgtaattttggagattcttctcgcc

SEQ ID NO: 10068 - DNA, 1104 bp, Heterodera glycines
tattcatcagcgactgctgactgtaagtcgtacaatgctgtagctcgtacagtaccacttatatatttatctatcatttccattaccgtttcgccctctcatacattatgctcatttcattgccttgtgcttccattagtcttttggcgtttgctttaaactttagaccttcgccgcgacatccgaaagtgcacttattgtgcacagtggcacgaactgagctcagagtgcagcagaagcaggaagaagccgaggaattgtacggactctttgctgtactgtttggtcagaaatgagcacccgtggggacgcgatttgttgacgaacaggtggggataagggatcagcagcagcaccgatcggtcactcattttgaatctcgacggatttagcgaataaaatgaaaaggaatcacagcccccctccctccccttccctaccgacgacggaaatgtccattttggcaatttcaggtccactcattgcatttctcacgctgaccttcgctcatccaatcattcatttctgctgcctgcgttggcatttcttcccacaaatggcctccggcgctgcgccgttggcaatgcccgacagcgcaattgccaatgcgcggactgtcccaacggcgatttaccaccattttatgaggaaaaggaggagagaaaaatcagggaaaatgtgaatgaaagcatcgaaagagaagggaacggaagaagtggaaaagcatcccggagcaaaatagacgaggataaaaagcagaaaaaagccaaaacggagatggcatacggtgggcatacgataagcacaaaaaagcaatagctttggaatagtgaaaaccctcaaaatacccattttcagtgaccgccgctacccatgtttcaccttcgtctgtgccctcttcttttgccaattcattgtccccaatttcggtcacttttcgttcgctttacgcgcggccaatgaatttgcagcgaaaattctcgagagaaaatccaattggcactgatcggcccgcgctgcttttggcccattcggcggatcattcccttcccaaatttcacttggcactcgcgacagttttaacgcctttggcacttttcactt

SEQ ID NO: 10069 - DNA, 5531 bp, Heterodera glycines
  unsure (1)..(5531): unsure at all n locations
tgaaatanccttttacttgggttaagaattaaaaaatttagcctattaaaatatttagaaatttttttattatattgtatattttttgaaaattttccgatttccgacgtttttggggtcggaaatccgatttccgacacttccgaaaattttttgggcctcggaatgccatccctgataaagaccgccggaccccctgttcctagttttttgaaaaattgcaccgcaaaaaagtggttttgaaaagaaaaaaatagtcaaatttatgaaccgttaataatttgatttccgatcaactttttaccgtcggatccaatcggaaaattttagtgacacatcagcaccttttaatgcatcccgccagcccctaaaaatttatttttcagcattttttgatttttggaaattttttgaatttaattgaatttttcgaattttccaaaatcccgcaatcccgcacgggatcccgcaaattttaaatgcgggatttgcgggatttgcgggattaatcccgcgggatcccgtcccgcaaaaaaatttgagttccagtcccgcagcgggatccgcaaatttgaaatttccggtctctatacataacatatgtatgtctcaaaaaagaagagattctttacttggcatggacggtaaaaaagaaaaaaaagcggcaataaatcttttttatggataattatgggaaaaaattggcgttctgtcacatttactttttatctttatttctctcacttttacgtactatctcttcattcttaataatgtaaagaacaacatttacttcgctctatagaacttttttttcgccttacagaatttcttcatattttgcatatcgatagagaaaaaaattctgaatcgattaataaggaaatttaatgcaaaaataaggccaactttagagttattttaaccgaaataataaaattatttttttcaggaattaatgagtaaaaaaaaattaaaacaaaagtctgacgtgaagaaacccgtgcacaaaagatgggacaagcgggaggagcaacaaaagaagttggagagggcgagacaagccaaattggcaaagaaaagtgagtttctaatcaatttttaaagcctaaaatatttcaactaatttcagcagtccaacagcaacaaattgaccatggggaaggagaagctgagatggagcaacaagaaatggaccaagcggagcaagtggaagagacttacgaccatgcaagtgagttttaatgattttaatttcaaaaaatatcaaatattcaattttttagtgcattttgacttccagctggagaatgatgtccaaatgtcgccgaatttggccattgacgatcaacaaccgccgacctgggacgcaacagcagaagcgggagtccaatgcgcgatacaaacaatggaagtctcaacccaaaccgactggaacatccatgctctgctttctgctgatcaaatcgctgatttccgcgccactgctgatcaattccgtgttcacatgttggagcactttcgtcggcactgttcgacttcaaaatttcatcatttggtccaccatgcccctgaatttgctgaaaaccatggattttggggccttctcagtgagcagcctgtggagaaatttcacgcgttgttcaatgacgatctcgcgcgcaaagcaaacatcaaagatctccacgatattttgatgttctgtgctagagaatctgccattcgaaacgccatttttgattcaaatgaactctgatcagtcttttgtagttttttttataagtttattatactttttgttgttatttttcatacatttttcaattttttatatttaataaataatttgccctcacattacaataaatgtttagttttgctgtaaaaaactatgttttctaatgagtttttacgattttaaaacatttgatcagatcaaagatataatttgattttcaatttgagtgtgttggcgttttgttttacgccaattattttttggcaatttttttcgttttttaccgtccatgttgggggcaagcacaacattgttttaaaattgggaaaaatatattttaaagggttttcgtcaaaaatttcattgttttgttgcccgcttcctctcacttgctctacaacagattagaattgacaaaaattgagtgtgatgaaaaatgctggtcccacaaaagaggcagaaagggggggggggtgggttgagtgatttgtgctgttttcggagggcgttgtgattattttccaacactccgagcaaaagtcgatgtttttgtttgtcaatcaaaatcacatccaaaggcaatcaacaaagcaacgtccattcatatttacctattttgcaatatttgtttacattaccttatgcatattttgttattaaaaaaaagtttttacgtgcattaaacagtattgagttaaatttatataagtaaaaaaaaaaaaaaggtaaaattgttcgaattcgggatttggaattggtctaaatttaggtactttcccattatgtgaccgcaagtcaaaacttttctgcaacaaaagggatacataatccatcaatcgagagtgtgtaattgtggcagtgatatgcgtggtgcgagataagaacagctcaggacaaaagaatcccggtttgacgttgcaacaaatttgcgcgcccctttgttgattttttaaaaattttgccttgcggtcacataatgggaaagtaccgaaatttatgttgtattcataatcagcgcacccgcaaaatttgaaatttccattctctactatccatatttttgttcgaaaaaaaatttgcgcaatttttcagtttttaatattagtaatttgctgtgctctctctctctctttctgttgccaaccataaattcacacacatcatcatatcacaatgagcagccgggacagcgagtttgagctgttgaacgcatttttatgttttgaggatggcacacgaatgcatggcaaattgttcggtgccgcgcgggcggtggtgggcgaattggtgtttcagaccggcatggttggctatatagaggtgagactaattggttaattgaaacggtgaaaactctttgattttaatttttgcatacgaacgataaaattgtctagtttaatgtagagttaggactaatttgtttttttttcatggcatggcatttttatgaaaatttacgccgccataattttccatttttcagtcgttgaccgacccgagttatgctcgtcaactgttggtgctcacttacccactcattggcaactacggagtgccggacgaaaccaaaaaggacccaaaatggccccaacttccgtcaaaatgctttgaatctacacaaatttggccggcggcgttggtggtcaatcgcatttgtccggagggcgaacattcgcattgggaagcggtcgaatttttatggcataatttgcatggaaaatttgtcaattttcctaggggtcgattaaaccaacggatatatttttaggtccaatcgttgtccaattggttgagcaagtcgggcgtgccgggtttgtccggcgtggacacgcgtctgctgacaaaacggataagggagaatggcacactgaaagccaaggttttgtgttttttgagtggcaaaattagtggaatggaaaagcagaaaacgaaacgaatttgtaaataaatttgttaaattgattttcaaaggcctcaaacataaaatttctgcattaacagtaaaataagttttgaacgctatgaaaaaatagaaaaaatccggaatttcaaaaaaaaacaaaaaaaaattttttttcaaccttttaaaattaagaatatggtgggacttgtgtaatcaaaaattatttttatatatttttaatcaatatttgcaatttcccgtagccacatttttgtctctccacaaaatgctttgttttgatttttgcccatttttcagttggtgctcgagtcggatgatccggaacgctttcaatttgtcaacataaatgaggagaatttggtggccaaagtttcacggaaggtacatcccaaatccctcctcccacttaccccctcctatcaaatgattcaatttttcaaaattcagtctccccaatggtttggcgacaaggagcaatgtcagagccgaattttgacgattgactgtggcctcaaaaacaaccaaatacggtcagtggtgttacactacatcaacggctcaaaagatcttttttttaaaatttgttggggttggtagattttttccggaaaatgttacacaacacaaaaatcatcattggaattttgttaattcgtgataaaaaaatagggagcaggacaaaatgtcaccgtcggaacatcatcgagataacatcgttacaaaaaaattttttttgttttttaatagaggaaaaataccttggatttttttttttgcggcaaggttttcgagtgtatccaaataattgacatgaatttgaattgtttcatgcccttgtttttcaatttcttcataaatcatttccaatcactcaattttttcaggtgttttctgcagcgagactgtgccgttcacgtcgtcccatgggattttccccttgaccaacacattgagggtaaaaacaaattttcatttttaaaaaaatcaagatttaccctattttttttttgttagattatgacggcatttttttgtccaatgggcccggtgacccgcaaatgtgcgctccgttgattgaacgtttgcgccgaattttgcgggaccgaccgaaaacggcaatttttggcatttgtttgggccaccaattgttggcaattgccgcgggtgcttccacgtacaaattgcggttcgttaatggaatttttcgatttttccccaaattttcgggtttttttaggttcggaaatcgtggtcacaaccagccgtgtgtgcacaccgattcgggccgttgcttcatcacctcacaaaaccatggctttgcggtggatgccaaatcgttggagggcacaaattggacgccgttgttcaccaatgccaacgacgcaaccaatgaaggcattgtgcacaaggagcatccccagttcaggtggcacagttttttaatttataaattttgcattttttttgccattttttcgtggtgtaaaaatcgagttttgtgccatcaattgtttaaattcgaacaattgtttaaattttggattttttacggtacaaaaaattggattttgtgccattaattgaatgaatttttgattttatataccagtcttggtgtttcagtgtttcatggtacaaaaacaagcatcgtgtcaataattcatttaacaatttggttttgagtgtccaattccatcccgagcactgtgctggacccatggacatggaatgccttttcgacatctttttgcacgctgttcaatcactcaaacaaggccaggcactcaagtaaatggtcatttgttgttttccaagcccgtaaccaaggaggataggaaaaacgaaaaattttccaaagaatttcgt

SEQ ID NO: 10070 - DNA, 2798 bp, Heterodera glycines
  unsure (1)..(2798): unsure at all n locations
aaaaaacgtttacaagggaacatcgcgaactgtgagtgtccaaatcgctttttaaccacttctatcatgtagagcatagtcggtttagtattgtaaattttcggcttttttggctccggcgccaaaaatgatcagaaaaaatcgatcaaatgaaaaacccagcaaaattttgttatttgattcattttttgcctcttacactttagtgcccattttgtcatgggttcggatcctctagacagatgacgattttttttgaattttttcaaacttttattctactaagcatatttttattcatttattttaatttgttttataatgctatttgatagagaattgtttgctgatcatttataaaaaagtttatggctctatcattagtttttaattttatgaatttttatcttttgtaatttttatcgatttttcgaaactttgctcacttttttctgatcatttctggacgccagaaccaaaatagccaaaatttacaatactaaatcggtgatgcgacatttgcggcgctgacacttgcggcgcccagccaaagcgacacttgcggcgctgacatttgcggcgtgacacttgcggcgcccagccaaagcgacacttgcggcgcagaattaaatgatcccaaaaattatttaaacaattttttgattaaaaaagatttgtttaaccattctttcagtccctttcttcaaagcctttcatccttaggcgatttgcaatgtatgaatgtgattaattatatcatcttgctttttgttttccttatggtcaaaatcgatgactaatcgtcggatcgcttcatcatttctcaaatatttttttaaacgtggcctttcagcaattccacgcgttgggtcaatttcgtaaggtctcagacggttttgttggtgttcttcctcattgttttttgaaaaaagtaatcaattcagaaaataaaaaatgaaaatatataaaaagacccattcacccttcgactccattattcgtacgctgctgtagaaaatttgatggaaaattaaaaatcaactgataaaattttatcaaataccacataaatttaattttattgaattaggcattgttaaaaaataaactattaaaataacaattctgttaattttaataaattgttgaaataattttggggtcgttgaattttgcgccgccgcaaatgtccttttgactgggcgctgcaagtgtcggcgccgcaagtgtccttttgactgggcgccgcaagtgtcgcgccgcaagtgtcggcgccgcaaatgtcctcgccgcaagtgtctgcgccgcaagtgtcgctttgactgggcgccgcaaatgtctgcgccgcaagtgtcagcgccgcaaatgtcggccaatcttttttgaaaacccttttttgatgaaaagtcgtgtaaaacgcctttttctgcacggggtgtttgttacgagtttgacatcaattccgaaaccgacatcaagccgcatatatggaaaaaaaccaaattttggttcgaaaattgcgcgggattcgaaacccgacgccgggttcaaacacacaatttgccgccctgataatgtcaatgaattagaagaccattctcctccccccccccccccactcacttccgttggcagtgcgttcagcagttcgtcgccgcccctcacgccgctcagtgcgattttgcggatttgttcgtgcgcttcctgccgactgtgcccgcgtttggtgagcagcatcagcgcacgttccaagaacgcgtccgactttcgcacactttcgagcaccgcactctcgtggacgcgcatcccttccaacacgcgctgaacaaatggggggagggggataaatctcattttcattttactgcatctgccaacgccgcagggtcccaaaatgctttagtttttctaaatctgatccaaaaataaaaaaattgaattaaaatttcaaagttttccgaggagacgggtgccattgaaaacagcgaccaaaaatgaatgtacaatttaaattgttacattttataaataaatttgttcttgcctgcagcgtcgacagaattgcgtccgcggccaaaaatgcgtccggaagaataatgcgacggttggccgagtcgtccaacgtccgctcgaagccttgctcggcgaaagtgatcagcggattctattgcggagaagaaaatgaatgttgtattaacaaagtaaattatatgataaagcgagcaaaaagtgccgaagcaaaaccatggcacaaaagcacaatttgaagaagtaaagaatggcattaagaaaaagggagcagaggggggagggggcggagcaggactaaccccagtaacagctattgtaagttttcaaaaactttaaaacaaacttttgaaaaatttttttatttttcgacgcttcggcggcgactgttaaattataaaggaagccaaggggacaagcacagaaataatgtgtcgaacttgtttattgagttaagcgcgctgagaaaaatgtacgcaaaattcggggaaaaaaaatttaacaaaggagaggtcggcaagtgaccgtgggatttccaaatgaaatttttttttaaatttcgggggagggtaacgacgcgggagggggggaaagaagtgcctccgaattggtcaaccccctggtttgttaccatcatgctgcacatcaaatagcgcgcgatcccacaaattcgctcgcaaagcatncggatttcgtttgtacggcatcgcggaactgcccaccctgcaaagaggagagtttcaaaaattggttttaatttttgttgattt

SEQ ID NO: 10071 - DNA, 2779 bp, Heterodera glycines
aataatatgaagaaaaacacaagggattcagttatgaaaagcggaaaaagacattggctgcattcagcaagcaatatttgtaaaaaaatgagaattttaaactttcaaaaaatgttcgaatccgggttcggggttcgaaattgagcctgataaaggccagattcgtactaagcgcctcgaattacacctgaaaataattttctcaaaacttaatttaaaaaattttttcgggaccaataatctttaccattgccgaattgcaaaattttgggtatttttcagtttgtttggcaaatttcaattttaattcgattctttttgataaaacaatcatttttattacctttttaaatgcgtgcaaaaggccgtccgcccaaagtgtggcccttttgccgacggttgtcaacgacgccgcttggaaatgggtgcgcccatcgatcggaaaatcggcgtatttttgcgcaaaatcagcaacacggcccaaacagatggccaaactgtaagggaaggttcaacacttttttcactcatttttcattaaaattggtgtttgttaattttttcaaaaatggcaagttttaaataaaaaaattgaaaattataaaaggtgtctagcgagagaaaatttgcgagttttaacgaaattgcgaagcattttataaattttcctataaaatttgtcgccccaaatgcgcaccgttcaagcaaatggtcgatcgcctcccgttggagtatcagacaagtgttgtcctgcacgaaacacgaagtggcacccaaatggatgatccctttggccaacgggcacacctcaaaagcatcagtttttagatttggtaacatttactcaggaattggggaagggattcccggttatattccaatttatgggtccaatcagtgacctttctcagtttcttaggccatgacttttttcttatttggtaaatgcttacatttttggtaccaatcgaaagcttaaagttttaaggaatttataaatacaagaaaagaataaatactttcattaagaaaaaacaacgagaaaacccgaaattcatttattttcgcgtatattcaataaaactgatgattgtcactgattggacgagtaaaaaatggaatagagccgggaattcatcactcactgccattgcccctttaaatggtcccatttgcaatcattcgggcaattttgaatgtatcattttcgaattcattgacaatttgtgccgaaattcggcacaacatccgtacttttttaagtcaaatgatttttttttgtatttcgaacgcttaaaatttgcaaatttgaacccgaaataaagctgtcaaactaacgactcttctgttaaatggctcatttttttgccctcgcccattttttgttgccaaacttcgccgtaggcgtggatatgtgccacgacttcatgcttcatcgtccgttcatttgctcggattttgtcccagttgatgttgtgcttttgggctttcagctcggccaccatttcggcactgatttgcgcctcaaggcccaattcgcgttcggattcggccagccaaatccaaagctggcgccacagaagggcctaaaaacttaattcaaaacttttcctaaattcttggaatcattcaaatgccataaagtatttaattgatacagcattgggacttcattaatatgtcgttcaattctccgatttgattactttattttgtggagaaaaaagacgcagaagtgggctgcgacggcaccaacgctcgacaaaaacactgccgtactgatcagtggagtccataatgaaattttgtgagaagatctattaaatgaatgcatcattaacacaccgagtcaattttgggctcccaatcaaaaactaaatgcatgtgtggcgaagtggtttttgtaataaaggaacaaagggtggaggttcgagtccgttgcgtaacacaaatatttatttatttttgttcaaaaaacaaaaaaatgacttttttgaaaatttttttttcaaggtttttgccatttaaattggacgatcttggtatcatacgaaagctcttgatgaggagagtatatgagtttttatgggtccgttgtccgtatcttttttgggccaatacggacttatacggagtaagggttttacgggtttttagtccgtaagtccgtatgggtgctgttgtttccccgggtttaaggctttaagccatttcaaattaccgttttaagagagaggtatttattgaaggaaaagcattgacaaatattatgtgttaaaaaccgggaataattttgggtcaacaacaacctcagcagagcaatttgggtgggtcagtgcaatttgttattttgacggtaatagaaataaatggatggcaaatgcaacagaggtgaatgatgggatagaaacggcacgataacatcggaaatgagagggcaggattggcttgggataggatgaacagactgacatatttatgacgggataaggggtcctggaagcatattttccttaatttcggcccaataagcctctaaaactgcagtgcgacattgtgaacaccaacttttaggattgaactgtttaaaatttagaaaactaattatttttttctaaactgggtgatccaacctgtaaaaacccaacccatctttacccgtttttgaatttcacgggtttttttggattacggtcacgatttactggaccaattcatggtcacgattacacggtttatatatttagtcagttgagataaatgatgatcgggactgtgt

SEQ ID NO: 10072 - DNA, 2073 bp, Heterodera glycines
  unsure (1)..(2073): unsure at all n locations
tttataatttatatttcatcgagcgtctgcaaaactntaatattctttccttagcagttttatttttaattgtttttcatgaattatattttattttcattaacaaatttgaagcattattcttgaaacaaattttaatattcaagtattcagattaatatcgtntaataaaataatctatgtcttattaatttaattttttaaaattatttttcatttatggatatgaatgtttatggaaaaaacaaaaatattattaattatttgttataatattctttattttttcatttaaaaatctgcaaaaaatctatttattcaaatttctacgtgcgtttcttgttaaagattttatcgaatttaatttattgataatatttattatttttttagttttttaaaatcaactcttattaacttaatcggtttgattaagtgggtttaatatagtttattacttttgaaggctttaaccattttctcttatcaaaatttgcatatcccacttatggtgaattcatttatttcttattgttatgcttatatgaattttttgattaatttttgttggataaaactagggttcggaccccgcccccgtcacccccgcccccgccgggggcgggacaggttttttggcctcaccaccgtccccgcccccgtgactctgacccccgccatcccccgcccccgcgaccttcacccccgcgggggcgcgggggtgaaaatacacccctaagaatgacatattcatggacaaaaggcaaaaaatttatacaattttgatttttttaaccattttgacaaattttttatgaattaaagttaattttggcgctgcctatcggcatcgcagggcccaaaaattcgtaaatcttataaaaaaattctctaaaaattgcaaaaacctatcattttttggacaaaatctattaacagatccatcagttttcaaaaatttttcccggcggcgcctatcggcaccgccattttattgcttttcaaaaaagttatgaccaaaaatcgtaaaaaaaaaattcgtacatgactttttttcaatcttcatcaaattttttgaaattttgcctgtatacagagaatctttagggctatcgagttatccaaggatctgctgctcttcgacttccaattccccttctttcacgtttcggtggtcctggtccaattggacttcgtttgagccatccatcgtcgtcaatttgagagtctcctcaatgtcaccactgatgtccgtaaggtccgcactaaatatgttaaggttgctaaggtaaaattagacggggttgtttaaccccaaggttatatcggcggatgagctgaaacactcttgtccatgtttgattgtcacttccgcgaaacttttgaattttttcatctccttcaaaagtcgggtactattgtctttctccttcccgttttcttcgtataaagtgtcaatacggcgtttgagagctccttccttctctttctggatagccaaaacagtcgtaatttttgacttagcactgttgacgtgttccatggcgatatttaaatcgtcggtaatctcattaattagcttgtcgtcgttcatcttggtcaccaccgttggaaagagtaggcagaggtctacacagccccttcctttttatggagtccacaagactacccgaccccccccctatttgtgttgttatctgcaccaaaccccaagaataaagcatggacaagtcaggcttgaagccaggccaaggtcgaactctataagttagagctttcattgctacaaaaattatgttttgaatcaccgttttttgtacattttgtcattgatccctgactgctctgctgattgtgagaaaaaccaacaacgcctttgtccattcgttttgtatgaataagctaattgattttctccatttttgcgtttcattgccctcccccaatccaagtccaacccttttcaacatacataaccacaacttcccgttaatcaattataatttaatgaaattactgttagcccatggatttgtcccctacaaaattcattggcctcctaattaattaatt

SEQ ID NO: 10073 - DNA, 1192 bp, Heterodera glycines
acacaccagggatggcattccgaggccccaaaaattttcggaaatcggaattccgggggtccaaaatttttcggaaatcggatttccgaggcccaaaaatttttcggaaatcggaattccgaccccaaaaacgtcggaaatcggaaatttttcaaaaaatataaaatattaaaaaaatttaaatattataataggctaaattttaattcttaaccaagtaaaagctagttcaaaatttttttgatctatttaaataaatatttgccttaaaaaattattcaatgattttcatcaaaaattttaccttttttttgcgacgcgttttttcaaaatttttgaaaacacggcgggcgaggtccggcggtgccgataggcgccgccgggggaaattttttataatttttaatcaaattgttaccaaatcttgtccaaaaatgactaaatttagcgattttgaggcaaaaatttctcaagaaaaatatgatttttagggtgcggcggtgccgataggcgccgccgggaaatttttgaaaatttcaatgcaatttattaaccaaaattgtaaaaaattgttaattttttgaaaaaaaatcataaaaaatccggaaatttccgactttttatcaaaaatttcggaaatcggaagtcggaattccgacgtccaaaattttttcggaaatcggaattccgaccccaaaaatgtcgtaaatcggaaatcggaattccgtgccatccctgacacacactatatgtgtaaattttaacaaatttttttaaaacatgccttttttatccattagtttgatttttaaaaaccatttcatattttagtgcacagtaattaatagggcttccatttttaggcaaatgcctaaaatttctgcgcacttgatacgcatagataagcacgaaaaaagcattttccgcttggtttggggtttctacgctgacttttataatgcctatttttgtgcctatttaatgcctattttgcgatttttttatgcctttttaggtgcctatttcgcgattttttgtgcctaaaaatggaagccctagtaattaatgtacaaaaaaagcattttttttttctcggagaatatttcagcaacagaataaatttaaaattaaattttcttttcagtttatcgtacgtatactgtacccaaatcaaagtagttttttaaaattt

SEQ ID NO: 10074 - DNA, 1246 bp, Heterodera glycines
tcgggaccaggtcgttttggcgccgatgttttggcgccgacgatttggcgccgacgttttggcgccgacgttttggcgccagggtcgttttggcgccgacgtttgccaaagcgaaaaagagtaaatgaagaattaaatccggctctttgatagacttcgtcagaaaaattataacgatttcatcatttctacctcccccctacatggcgtcaaaacgtcggcgccaaaacgttttggttgttttaatctattttagaaacaaaaagagaattttgaaattttttattttcgattttttgttcgaatttcggctccgggttccgaattggtcgaaatggatgcctggttcgtgagcagcgaccctgaataccattggaagcatgttttcatgacttttgaaaacaaaaaaaatttcttcaaaaaaggggggcaaccaaccatcggcagtattaccttcgcgaaaaatacgttttttttgttattttacaaaatttttaaatttgggtgttttctttttttattatagcttggcgccaaaacgtcggcgccaaaacgtcggcgccaaaacgaccctggcgccaaaacgtcggcgccaaaacgtcggcgccaaaacgtcggcgccaaaacgattcgacccctaatttgctgctattcaaaaaatttgttcaattttccttctcgtttttaggcagggttaccttttgtccttatttgtaagatttgtccttattttgagggtccaaatcttacaaattttaaatgttcttatttgtaagatttgtccttatttaagctctttgtcgttattttagtcttatttatttggattcagagagaaattacgatttgaaatgactatttttgaaagaaatatgttttttgaagcgaattaatattcgaaatcttactttttgcttcatttacttactgatatgcgtgatccagtgggttgtgtgatcttggttatgttcttcattttatcgttggatcagttcccctccaaaattttatttcttctaatttttcaaaattattcctttatcgatgggaattcaatcataattcaaacatttaaaatcaaaaatattgtcattttttgactaaatctattaacaaagtgcactaaaatttcaaaattttccccggcggcgcctatcggcaccgccggacttcccccgcctaaaaaaaaagtattttgaaaaatgccgcaaaaaaagccttttgaatgtaaaaaccgcaaaaattg

SEQ ID NO: 10075 - DNA, 5099 bp, Heterodera glycines
aattaatgggagagtcgaattaagtggaggattgtttaatttaatggaaggggcaattaatatttaatgggtgactatttagtccatgcgtttggataagttgcaaaaccatttgtggcttttcagatacattgatgaaagtgttgtgccctttctgcactttttccggccccttttcgcctcttgcggcacaaatttggccattgagtcgcggagttttcgcgttttggagttcgttggacaccaactcctgccgatgatcagtgcccgaatttgcgggatgaaaattttgtccggccatctgcgctatttgcggcaattctcggcctccattctcgacgattgttcctccctccgatcgctgttttgcgttggcaatttcttccccaaattcccggccgatggcagtgccggcgcgtcgtcgagccgcgcattggcccattggctgtgctcgcctcgttcagacggtgtgccgaagctgctccgctgtgacttcaattggaagtgtcaatggacttccaaaattgagggactgaagacggtgtggtggtgactcactcactcattgggaagcaggacataccgtcgcctcgaaatttttttttttttaattttagtaaaacaagaaaaattatcaaaaattagttatccagcctaattcgaaaaaaattctttaaaaattcgaaaaaaaattacctattaagaaaattcaagaggaaaaaatttatttttttcaaattttttgtattctggaaattcagaaaaatttactttttattaacacttaaattttcaaaaaagctacaattagttgcattttcttgaaattttgaaaatttttatttttggtgacgttatgtcccggcgacgttttggagtcttccccactcattgatttatgccaaatttggaattggcccttcaattttgccctccaggcatttgctaatgcctcttcgcccgtctgctttgtgattgtcattgtgtggcatatttggattggtcccgacattgaacgcatttccgtgcccttttccctgcgcaatgcgttgaccgaggagcgattggcactgaaattgctcggcaaccaacgctttctgatcgtccgctgtccaatcgcgcgaaacgaacaaaaatgggcccaatgggagagggaggcgaccgagtgggaatttgatgagcaatggaatcgcattatcatctcggccagtgagagcgggtcagcaaagaaatttgttgtgttaccagttacagtattacaagggatacgatacttattaatgtatgcctcccgggagttcggaccaacaaaaccctggggaaaaccccgtacaggcagggggcctttgtctgtccgggttttattttaaagtttcgaatggatgccaccgaatttacaacttaagtttctctactgaacaagccgacacgagtgatcaccagcttcagcaggaggattaatattgtgcgatgggagaaaatccgttgattaatttgtttcagaaagttttgccaacttttgtgcgtgcgttcgatatttttaaattttccatatttttgtcattttcgttgcgtcgcaaatgttccataaaattttgtttggtttatttgcctaactaatgtttgttttgatgatttctcatttaatttcctatggtgattttctgggccgtttccgaaatctccaaaaagttggaatcccgagacttcccgcccataggggggattttaatccgaaccccccaaaacccaccttaattggaacccattaaaacaattccaatgcaataattataaatattttcacaattttcatagaaatccgtactttacaaatatgttaagcagcaaaattttgctcgaattcatatcactcaaatgaaaagggaggaaaaaaatcaaaaaggggaaaaacaattgtttggcatcagaatgccagcggcgtaacgatgcttaacaagacaatgattatggtggtcattatcactgtcactggtagggacatgccaatgctgccgttacagtagtccgtgtcgtcacagtaacacaccgtattctgaacaccgaacactcgcatctgtggggatgagtgagaaaagaaaatttcgactttttaagcaaaacgcatgattttgattatatggtctggttgccgactaaaaactgacaaaaagtgccaaattttggcaagaaattgtaaaaatttgggcataatttcaatttggacaaaatttattaaaattaaaaactctaaatatattatattacattttagaaggaaagactcaaaattaagctaacattttttattttgaaattcggtatttagctttttttcaacataaatttaccaatttttagaaatgtagaatttttttattcccgagaaaattcctcttaaaatagattttttttttttttagaaaatgcccaaatatagaaataagaactggaaaatatggatgaacagtcctaattagaaaaaactgaaactaaagctaacttttttgtgcgtccaaatacaaatgccaattttatctgtttcgttaaaatttcaaattgtgccctcacctgcacacatccgggcgcaatgccaatggcatggcttggcatttgtgccgcacctctgcccccgccgccttcgcccatcgccactgctgaacgggcgtacacttagcaaaacgggggaaggggggggggggtaattaaaatttaaaaatatctgaaattttttacgaggcccatgactctgcgaagcttttgacggattggcggaggtataaaatgcggcatttgaggcggaaattgtccgattttcgcaccctttgctcacatatttgccagccactaaaaaatgtcgatgatcgcacagaaaattatgaagtcgcaaaatgatcagttcggagcctaattccccgaaagtctttagagtccggacatgattgatcaatatatcctgttaagattttccctggcttctgaaatacggcaaggacaggatcccgactaaatcgggatttgagtcccggatatttaccgatattttttagaaaagtcaagtctttttgtatatgtttatttttcataaatcagtgattttgagtcatttttcagaaaatgtgtccgaaattaataacaaagcttaaaatggtcggcccccttcatgttagcaaaggttgatatccttgtgtgtttatttatgttcttttatatattttaaaatgtaatttagaaattcgaataaatatcggttcgttttaccgaaattcctaaagctctgatcattttttaaaatttataatatttttttcaaattttttacccatcgatttcacgcaaaaatcgccgtaacagaagccggattggcattgcattggcatttggcactaaattattatttgatcagttataaattcaaataatatttacctgatagcaaattcgttgggctcgaaaaccgccgggatctgctcttcgaattgctaaataagatttatttaaaaaaaaagatttaagaaaaagttattttgcgctgaacctttattttttgaatttatatctttttctagattttttctaaaattaaatttcagatgtaaaattattttatttttattattaaaataaaattatataaaaattataaaatatataagtgaaaatttttttatttatggtttttatgtttatatttatttgagtaaattttataaaatattaaatatttacgagaataaaaaatctatttttaaatatttcaaaaatattttaaattgtaaatatatttatattactaaaatatttttgaattatgcaattgtttttaatcctaaaattgcttttcatttgattggcatttgtcacctcgtgccgtttgctctgccgctgctgctgctgctgcctctgtcactgccgaaatcaccaaaaatggcacgatcattcgtgccattgttgtcccaatcgttgttgttgtccccattggcataatgtttcgcctgcgcctccggcgccatccgttggccattgcctttaggcggccaattttgggcgcaaggcaatcatttttcgagaagagtgaaagcatatggaaaataggtaattaagcacatatctaattaagaaaaattgcttattaattatcattttttcaaattctattgggccgaataactcttttttcttttactcaaagttcaaccgttgccgacggacgtggccatggacacatcgccgcccatttgccccaaaaaaaaacttaaaaagttaatgagtaccccaaaattacataaattattcaccacaaatgctcattaaagagtcaaatgttgcaaaaaacaacccaaattatttttttaaattactcaataattaattagtcaatttgaaatataccccaaggattaagataatcattatccttaatgaacggagtatattcgtgctctaaaataaaacttttaaaggttagaatctgattctaaatcattttcactttcaaagtttttgtttgactagaaaatgtgcccacctatttttcaattttgaatgcatatttaattttaaatgcatttccgtgatttttgtgccaaaaattgcgccaccaatctttgccatcatcattaattagctcatccaccaatagcagcagcagcactcactttttgggccttccttctgctgccgctgaggtgggcagacaatgatttttgccacccctccaagcgccggccggagagattaatcatgcttcagcaaaagcaaaaagacggagggaggcgggataaagccaaaacattggacataaagccaggacaagtggcacaatgtgggcacaccaacaacgccagcaagcaacaacaacaacaagccgataaaagcaacaggagaaatccgtacggcacggcacacgacggagagtgtcccccgaagggggggggcggcacaaattcaaaaatgaatgccatgcatttattttgttccgcaaaggtgggctgctggcattggggcggagcgctggcccaaagccccggggcaaaagcaaaaaataaaagggaaaatgacgctttttggctttggttgtaaaaataaatgaatgaaga

SEQ ID NO: 10076 - DNA, 1171 bp, Heterodera glycines
aaataaaaaccaacttcttcgtttgagacattgaatgtagtaatgtttgggcaatttttgtaaatgaaagtgagaagcgctgcagcggaagggaatgccaaacgataagtgccgcttgaatccatgcaggtcaattctttgtgaagattaatgtgctataaaaatttagagtataattaatactgaaattgtataggagtttttagttgggaaatagaatctatgatcactaaatgagctccaagttaaagacaatctttggtgaatgtttcgttaatgcatttttaatgaaaattttcgaaattaatcaaacaaagcacaaataaatgtcattcatgcctcctatttttagattacctttttaatgaaaaatatcaattattttatattcaaccccccaatttcatataaaagcaaaaaaatcgaacacttaccgttacgttctttaacatgctcatcatagtgctaattatgcaaatgaatttgttaacatcgtcgaactgaaacataaacagaatgttgattggctggcctctttatggatatattttttaaaaactttcaaaatcagcggcctcgaaaaagtatcatcttgagtaaaagaaaatcaccaagattgtttgttcaaatagattttgagtttaataaaaatatatgcgttttaataatttacaaatatattttcatgcaatttatagaattttttttgtctaaaggtacccaagttggcagataataaaaatttctcgttctctcgaaattgctttatccaacgtaccttgttatttttgtgtgaagccgtgcttggtggtgaattgtttagccttaacacaaaaaatatgtaataaataattgtatgatatgtctaatcaactgtgaagaaaaactcaaaacctaatcatttctaaatcggaattttccacccaaggctagacggattacggttctgtaattacggtgattaacacccaagtaattgcggatcatggattacagtaatttaatccatggctgggacttttttcgaagcgatttaccaaaatgcaaaatttttttacttttatattaaatgagaaaaattttaaaaattaagaaaaatcgtttaaaatatccatttaatgcaaatttttcatatctaacaaaagtttggaattttatttaaggcctaaaa

SEQ ID NO: 10077 - DNA, 1644 bp, Heterodera glycines
aattccttgttgtttcaattccataccattcttcgttttagcaatttcatttttctataagataaaaagcattttgtttattaaaaaggctcagagtgtggactcttcggcaccaaaattcaaaatgcaccaaaatagggtgaaaaagagaaaaagtgacataaaaaggcataaacattttataaaggcaaaaagattgattgttaaagtgtaagttttttaaaattttattaaaaactaaagaggccactttttatttcacttgttttttggtgcaattttttttttgctatcacaaaaacttgttacagtggttttttcggtgtatgatgtcgaacctgacagaatctttaaaccgtactcgaaacactcgaaaatcacaaattttcgagttttgggtttcgttcggttattaagtcaaaaattatcttatatttttcttttaaatgtgtattggaatgaatttaaaaaatatgagaaataataccctcaatttggaaatattttttcaatttttgcacagatttcgcgaagatgttatttttttaaaatttattaaatgacggaaaatcggtgtttttaggccccggtaattaaggatttgcgtttaaaatcagttaggcccagccttagttgcatcctcagtttggtattacgattgtttgtagaactgctccgtctctcgtttcatcaaaaattgttgataaaaacgaacatcatccgtaaaaccgtgaaaggagtaattttgatgagcggcacgagcaatggcttaataaaaaaaaagcaatgagaaagggcgcaaattatagagaaatcacgaataaacttaattaaaaacacaaaaaagggttccgatgaaaaaatatattaaaaaagaaaaaaaccattctaaagaaaaagaaaaaaattatattacgacacatttttgtagaaaattgtctctttttaattttataaaacttattcaattaggtgtaaaatggtagataaattttatggaactcattttgaggaatgtaataatgaaatgagaattttctatataccatggtatttctgaattgttcctgtttctagaagcgtggcccatcggtttgcgtatctttcctgaaaattttcttttaaattaaaactaaaaattattaaaactggcgcaggtaataaatttacagcaaaaatcaaataaaaaattacttcagttacaaatggctttgatcgaccaccagtaacaaatgcactgcggttaggcaaatcaacgttgattgcatttagtaacatggtgttcattcccattcttaaacaatattttatgacgaggactgagatatttaggaatttatcacactgattttgagaaattgttttttctaactcagtcaaaatttagaatgaataaaatttgcagtaaaatttttatacataagacaaatttcataatcttttacgtaattagacgaaagcaagaaatgttttcctttaaaattcaactcaatgatgttaaggcattactcaaaaaccaccaaaaatgaaaaataatttgtttctatgctcaaaagtagagttgagcgggaccgggacctaaacacggacaactgagtaccgaagttccgagaccgggactagtcacggtttttttccggtttt

SEQ ID NO: 10078 - DNA, 2539 bp, Heterodera glycines
  unsure (1)..(2539): unsure at all n locations
aatttatatcatgaatttttcagagcattcttgaatggtttaaagaatataccaggcagcgcgaatttgcgcctaggtccaattccttcattttcagtctaacactgatgctttggcgcttgttcaattcacgcaaaccgcgtagctgaaaatattaattaaataaattccaaatttctctttattttcaccctttcataaattttcttaataaaaactgcaaaaaaaatgaaaaaaccaacaaaagaatcggcgttaaaaattttcaaaaaatacaccttcccctaataattaacataaaattaaaagacaacgtaaattggaaaaaatttcataaaaaatctcacagaaaagtttattaaattttttttttttttgcaaataggtgaagtttcattagtcgtgatttttaatgacgatctcgaaatagttaactaagatagtgaggaaaatgcctgaataatgacaaaatccaaaatagtaatgaaaagtgacataaatttcagccaaaaattgagcaaaaaattgtattttcaaaaatatttttttattattaaaaatcagctgaaatcgcaaaaatagattcttggtgaaaacctattaactcaaataagggtgtaaaatgaccaattcaaaaagcaacaaaattaagccaaatcagtattagataaaaaattttaaaatcaaaaattatttcaaaaaaattatttttatgatctattgcaatttaaatttctctatcaattaaaatgtgtttatcctttaaaaatttaccagataaattgaatttgcgcggttcgaatgaagggcattggtcggcattttggcacgatcgatttggcatttgttcaactcgtgcaactgaaaaattggaaaggatacaattcatttgattgaatttgttcatttaaaattaattaataaaatattatgctaacagagtttttttaatttcgtttgaagattcaaatatatttcaattaatgcccaatgtccgtcatttatagtaagcctttattggacgccgttttcactttcttcataaatatcatattcaaaatcagcaccctgaataagcttatatttctagggtaatttgaggcgctgatcacgaatatgacatttatttttcaaaattccgaacccgaattcgaacaaaaattctaattcataaattacaaagaaaacatatttctaggggttttagaggtcgctgaaaacgattatgacatgccttttgaccaaattcgaaactcgaaccctgacttgaacaaaaaaccgaggtttaatttactaaaaaatttaaaaggtaaaatatccatcataggtcccagactcaaaattgcataaaaatacttttataggttttcttaggtgctgaaaacgcctaaaccataaaaaaactgcgcggcaaagcgtttaaaccggttttgaaccggtttaagacttgaaaatttgagtgaaaagggaggcacctaagcttttaaaacggtcaaaatcacacaaatttggtatcatccgaaatctcttgatgagctaagttaaaaaacaaggtatagattcgaaccaacgccatctgagcactgggccaactaagtcccagtgaaaatggacatttcagtaccgaaaaatacttcttccgtagcccgtagtctcgccccacctactggccgccgtagtcgagtgtgcggcggttttttagcgcaataagcaaattcaatcttttatatttgacgttcttttaccaatttctgactatggtttaaaaatagttttaacgattttgaggacccataacatgcgtcggttttgcatattttgaattttgtcgagaattaatttcctttttttttgttagagtccgggtttagaatttggtcaaatggatgtcatagcagttttcagcgacctcgaaaacccccaaaatatgttttcattgtaatttatgaatttcgaatttttgttcgaattcaggttcgggattcggaattttgaaaaataaatgtcatattcgtgatcagcgccccaaattacccttgaaatgactttttatttgaaaatttcaggtggagaggggtcacaaaaccaaaaagtaccgaattcgcaaccgcaaatacttttataaattagaaaatccagcttatatactgtagaagcatttttcattccatcattgagaagcacaattttaaatcgaaaagaattttttgtatatttttttacaattaaatttcaaaaaagcaaaaaaatttggaccaattttgaaaagaaatagtgcancaaggatgggaggggtagacgaaaagagaactttttaggaagggacgcaccccatctgatattccaccttttctgttccataaggggccaaaggcgactggtcgtcgttgacaaagaagttgtccaattaaggtnacttggaatttccgcattanaatgtggtacaaaatttttggactgcccgccccctcgcggtgggacttaaagccatggtggacgtgaaattacaaatctcaggagtattttgtttcgaattttt

SEQ ID NO: 10079 - DNA, 1334 bp, Heterodera glycines
tgaaaaaaagcaaattttgaaaataaaattcaatccatttatcgatagaatggtgttttcggtcccacatttgcgccctcccaatttcccataattcgtgcagttttgtgggcgttttttttgttgcatcccagatcgaattaataactaattaatcaattttttgagtgccttttttaataattattaatccatgaggatattagcctttttttgcggttttcgcgcaacgcccttttttgcgggtttcgcgcaacgacgcggcaccgtttaaaccacttctaaccaaaatatcttttcaattttggataatcggatagataaaacattaaaaaattaaatggatttaaatttcgaaaatgggtcaaaaacttcatgaactctgtaaaattaccaacggttttcttgaaattaattaaatttccattgaaaaaacctggaaatagctaaataggataagcaatgaaatttttgaagaaaaaatacaaaatcaatttttaaacaaacaaattttatctttttctatttaatcaaaataattcttggggagattttcattttttaaaagccagtgtgttttcaagagtttcagttattcccgagtctaaggggaaaaaggcatgatgatcatagtccaagagttttcaatttttagtgaattttcaaaaaacagaaagcaaatcactcaatttattcaatgggcgttgatcaaatttttccaaattgatcatttaatttggttccctattttattcgattgaaacaaacaaaaacaaattgaacctttgtccaaatgatgggaagcgagcacaacaccgtgccattgagcgccccccggtgccaatgttccccagtgttcggttgggtgcagcagtgccaacaacgctcactcccatggcaccatagcgcacctgaaaaataaagtgtttacatttttaaataatcagtagtgcctgccattcatgcctaaattgtgccaccgaattaaaaaaatgccttttttgtattgtaataaaataaatataacacctcgaaatggccaagagttttgctcccgccgccctcagctgcgcgtcaaatgtgtcattgcagtgtacctgcaaaaaaagacccctccctcccgccctcttcccgggcaatccgaggcttaccaattgcgatcgatcagtaatgaaatttggggggggggggctaaatgcaactcaacaaatgttttttgttttttgggatttgatggcactgtcattgggggtattgatggcactgtcaaagtgagctggccaaggaatgaaaagagtgaagaatggtggggggggggggagtttacgcatgat

SEQ ID NO: 10080 - DNA, 1358 bp, Heterodera glycines
  unsure (1)..(1358): unsure at all n locations
tgcaggtcgcacacnntcctatggtccntttgagaaccaaaagaaaactgatcactcactgatcagaccatttttaatgcttgcagtattgttatacatttgaataatttactctacagcacaatagctgtattgctgctgtattcaattacagttttaagttgatcaaataaagatcaaaattataaaggatttatttatgtactgtacataaatcttttttagtgattaaataaaaacaaaaatcaaatttaaattaatttttaattaaaaaactttttggattaacttaatagctaaattaagaattaaatgaacaaaatttaaaaaatgccaaaagcattaaaaaaggacgccgagttggcaaattgcatgacgtgggtgaatattgatcgcctttgatgggtatgcgacacaacagttgtgtgtgtggtaaacaaagggagggaggctaagacatcaaagatcatttgatggccgaccgtgcaaacagacgccgccagcaagggaaaaaattttaaaatttttttggcacgtttggcaattaaaattttaaaaaattaattaaataattaatgataattattattattcaatatgtactgtattaagagaaaaataatgaaaaattatttttttattcctctgtgggggttgaaccagggcaaaacgcaaaaatgaacgcaggcttagccaataggctacaagcacattgaccgaaatgactttcaagcgttatatgtatgaaacattttttcacaattaaaaactttattcctttttccgaatttccatcaataattttgagttcgttcttcattccgaatctggacctaccggggtcgaattttgggttattttatgcgcacaatttttcaaaaataaaattaaatttcaggattttaacattttcactaaaaatgaatcatactcaaattcgaaaagcattctttttaggcttatttatgtatgtatgtacaaatcagagtccaactgatttttttgttttgccaaaaacaaattccaatgataaattcaatatttttgattgctaaaataatacgtaaaatggtggtccaaatgaacgggatcgaaacatgggcttcgagagtgggtttccgggaataaaactttttaccggaatgtgactccccattcttttcctaaaaaacccggaaccggcacggtgggactcgggttgggttttccattcggagcgctattagccaaattcgttaatttcttacagtatcaaccaatttttactgtatgtattttaagcgattaaaaagtgatgttaaattcttttttgacatacagtatatgcatgtctcatgaaattactgtttaagcttttg

SEQ ID NO: 10081 - DNA, 1830 bp, Heterodera glycines
  unsure (1)..(1830): unsure at all n locations
gcactgattgatcatgatcacataattatgaggatgggggtacgtcgctgatttgtccgtgtcttgtgatcacttttgtttagcgaattttgaaaatttatacaaaaattttacagagaaagttgttcccccccccnttcgttcccccncccccccgtcgtttccgcccggaaaatctctagtaatttatcataaaattttgaaaaaagattagaaaaattttatgctcatccaatctatgaacatttttttttgttactgaaattccgatttgtcaattttgcgaccaactgcgcatttgcctattactaacgtgccgctgctgaaggcattgattggcgcagtgaacgagtgatcactgatcgctgatcagcattagtgccagacgaacgtctgtttgtctgtccgtccgatcactttgaaatcctatgtgactttttttctgtctgcttctcctctccttttacaattttgtcattctctcacttgtccatgttctctcattctcttacgcactcttcctaattattttttttttgccactctcactgttattctctctttctaacacacattttctcattctctcttttttttacagttttcttcatttttcttttgcctcattctctctctccctctctcgccctttaattttctctttccctttctttctttccctgttccacatccctcgtttttttaatgagaaatttaatacagttaattccatataccagaaagttgtaaaatgtaaatcccaatgggatctcgggtccaagaaagtccgtttaccatttcaaatcccggttccggtccatggttttctaaattactggcctttcaatttagtcccatcccaatccaacaatgctttttgttgcttcccgctgctattttgtttgaccatgatgcgaaatgtgtgtagagtccgtaagggatcgggataccgccgggattttcactcggtccctatcttgatttcggcttttcgaaaaaggccgggaccggaataccgacaaaatcgtgttttaaatcccggggtcaagatcaaatgatcccgacaataaaataacactcgagatcggaattccgacaaaatctgaatttgaatcccgatatatcgaattcaaaccctggcaaaagcgggatgatttgaatcttgataatcctttcccggctgaagcaaatccctaattaaatgttgcatatacatatatggcgcaaacaaaaaacaatgtaacaaaaaagctgaaagcccaaggcgaaatttgaatattggctttgttatacaccataatgagattgagcggtggagaaggaagcagagcagcaggcgaatgccaaaaaaatggattatttagtggcagaaaaaacagagggggcgagcggacactgaaattgggacaacacgaaaacagcgaaaaacaacaaatttgaataatacatgtaacagcagggtttaatgtgccgatgcgttgaaaaaattcggcaatcggaaattgttccgagcccaataaaaaccgaaaaatcggcaatcataaattgatatattccgacatagctccgatgtgtatatatgtattatgttatcgtgcaacaacaaattcacagcaaaactaaaaaggctggacgcggcaaaaccgggattagagtccggtaatccaataatcccggcgcctgctgccagtcccgaatgccgactttttaaaaatccgggtaaaaaagacaaacaatgtggatttatccaatggtttttatttgcgttaaatggccaaagaattttttgaattatttttgtgaaaatttgtcgcgtaaatagagtagaga

SEQ ID NO: 10082 - DNA, 1113 bp, Heterodera glycines
cctgaaaatcattgggttgctcgagaatgaatactaattcaatcagaaaaaaatatctgtattattttatatatatattttttgtataaatttccacaattctgtttttaataccgagaatcgggttatttcattttgaagcctaaatttgtggcaggaatgcttccttggcacaaaatgctttttcccatttccatcaaaatttttttcctgcagattacaccacttaatacaataaatttgctgtttttttaaattcgcgttaaattgctaaataatttttattttttatgtgaaagtttgtcgcgtaaatagtgtatagtagagatcggcccggtcggtttttttcggtttttttcgattttcggtttcggtttttgaccgaaaaaaaccgaccgagaaatttttgagtttttcggttttttttggtttcggtttttttcggtttcggtttttaaccgaaaccgttcgaccaaccctcttgtccggttctctagtgtatagttgaccaacaagaaagacgtaactggagccaaaaaaaaaaatcacgaaattccattcctgccctttggaatccgaaattttggcctgaaaatctctgatcactttttggccgcatgctttcctttctgctgctccgctgatcactttttctcctctgctgatcactttcacctttgcagtaacagcaacagcagcataaaaaaaactaacaaaactttttttgcacacacaaattaaaattatttttatttttgtttttatttttgaaaaaacacctatacaaattttatggttttttacggtactcttactgcttatatcacgccctttgatcgcaaatttatttgtactatcattgatcacttatttggccaccatccaccgggtatgatggatagcaaatcggggaggggatggattcggggacggaatccaaccctaattctgatcagtgatctcccatcgcgcccatcattgatcacactgatcacacattttttgtccaacgcaccttcatggcgcatatttgatccaattttactttcattcaattggccaatgctttcctctttctttatccgccctagagggcggatgttttggtcggtc

SEQ ID NO: 10083 - DNA, 2846 bp, Heterodera glycines
aatagggctggtcgggaccgggaattttgacaaaaaccaggaccaggacttaccgggaccagaaaagtcgggaccgggacctcgatttttgtccgggaccgcgagaaaagccgggaccgggaccaaccgggaattttcccaagagaaaattttttgaaaaaatttttgaaaatttgagtgcactttgttacaaaatttcctaaattcaaaaatgtgcccagaagatttttaaattttcttttgggggaggaattcgaagaattgttattttttagcctgtttgaaaattaaataaaaagatgcgtcgtcgtccttcttatcaataaaagtgataaggaaggactgatcaatggcacacgcatagttctggaagaacttggcgatgatcgcctcattggtcgtgttatcaatagcaatgctattggcggccaagtgagattctttcttgaaagaacacgaaatgtctatgaagacaaatcgcctggcggcataaaatatgagcgtttgcagttcccaataaagcctgcattcgctatgaccattcaaaaaggtcagggccaaacaatccgcactgtcggcattgatctggaaagggaagtattttcccacggtcaattgtatacggccttctctcgggcaacagacggaaacaatgtccgtgttcatgctcccagccgggaaattgatgcccaaggccgcgccaaagtgctgaatattgtagctactaatatgctcaagttacagtaaatgagcaatagtccagagcagttggccacatggtttttggagagatgccaatcccattcccatctgcactatgttgggtgcgaaaatggtgagaagcttggatccgggacatggaccggtcagccctctttagggcctacaggtgaattgccatttagcgctcaacccaataacgtgccaacgcctggactaagggagggaggagggccatgacgtgcaacgttagggcactttcggtttccattgcattatgcgatgtgtcaactccaattattggaggaaaccaagtgcatgtcggctgacgcaaagaccctaacagactaaaacgcgcctaggtagcgaagctcccaaagcgcaaagcgcttttcccaagcgccaccctcgcatgcacacacccgctagttttttaatagatagctaatttgacaaatattgcgtcgatatcgaaaataaaatttggagattcagaaacgtaataactggatgggattttgttatttgagaaattttggaaatttttttgaaaaattttggcaaaaattttaaatttcaaagtggccatcataatttaaggctggtattgtaggttgaactttgtaattagtaattatttcgaacatatttaaaaagtttagaggggcaggatactagtttccttgtatttatttcatggaattttctcattaaaattttgccttcttacaaagagaacaataatcttttttaagttgtagatttgttttcatttgtagaaaaaggattattttatgtttagaaatttttttaatatagttcgggtatttaattttgcgaaaatttttgcggatttggcgtgtgggaaggtaaatttcgcataaatgtagaaggtagtttgtgaatctttgaaactataaactagaataaacctgtaagtttgttttaaaaatatgtctactgctaagatttcaagaccagaagtgtcagaagaatagatttttttgcaatttattgaggtggagattagtattgctacaccgccccctctttttttttagaaatttgagacctgttttgagagaaaacattaaatatgccattaaaagaaagtagtgagtttgtgggacttgaatcagacagccaagtttcagagaggagtattaattttggcctaatttgaagagttgaaaggaaatgattaagatcatcgattttgcttacaataatctacagttgaaatacacatatttagaataggaaaatttttatgagtacatgagagctgattttgtagggaaatgtgtgaaaatttatgcaaataaagtcagaggcatcacaccatcagtttacaccagcattcgttctttgcagcaggttcggagggggaggaagaattgcatgtcgttgttgccgtttgtgttctgatttatttgctgggagaagggtcgacggtttgccatccgctgttgacgttcggcgtccaattgctcactggtcaggctgggacggatcagaagtcgtgcgaattcagtgttcggcgttcgaatttcgctgcgtttctctttccatttacccagagcgatcctctgaaattttgaagcaggcagcacaattttgagcagacggccccgacctcacggggctgggtcagaaaatcgccccattcggtaaaggcacaagggcgaccctctatccccagcgaatggagtaaacctttgactttcgcctcgtcctcttcaacacgttcgcctggtgtagtctttgcactttcagggagtccgatgactaccaaaatctgcgacgttcaatttcttaagctgaggctttttagctgcttcatataattatatcttgtcaaaagatgcatttatgtttcgtttttaatcatgacaattgatatgttgcattttccacgaagattagcaggatgatctaatttatatgttcataaattattagacattattatttttaccattttataaatatctactatctttttactaattttacaaggctttaaattaggcttcttccatcaaccgttaataacaaaacccgaacatataaatattttttaatctgttataattttaaaattatctcagcttttattaaatatt

SEQ ID NO: 10084 - DNA, 157 bp, Heterodera glycines
gagagagaggagagagagagagagagaggagagagagagagaggagagagagaggagagagaggagagagagagaggagagagagagaggagagagagagaggagaaagaggagagagagagagaggagagagaggagagagaggagagagaggaga

SEQ ID NO: 10085 - DNA, 4874 bp, Heterodera glycines
  unsure (1)..(4874): unsure at all n locations
ggggaggagcaaccagtaagcacaacattgcacaacggctgaggtgccggggcatcgtcaatcgggacaggcccaatttggagtgccggaggcgcaaattgctgctgatgctgctgctggtgttgcaaatacggttggaaagcgaactgtagcggaggaagtaccaaaggcattgtgaatggtgggaagacgggcagtggtggcatgcgcatttgcaaagtgctgatcgcctgttggacggcagctgaaagcatcggcggcggttgttggtgctgtgttgccggggcgcaatgtgtcaattgttgctgctggtgctgctcctcctcgacatgttgctgctgctcctcctcctcctcgacatgttgctgctgctgctcctcctcttcctcctcctcgtcagagttcccctcggtgcgcactaccacctccacaatgggcgatggaacccgggggaaaacctggtcctaaatcaaaaatttggctgttgccatgtcatgactcatcattaccaagggtaccctttctgcattgcgcaccccgaacacctcaaagttctcagggtgggcaccaccgacccgggctatttcgctaaattcctgatgtttatttgctgattttcgccccaatttcctcacatttggcgggccctctcgatgtcgatggcaccaccaacagctgcatgggtatacacagcgtccatcagacgagcgagggtatacccaatctataaaatgcatttcaattcttaaatccccgttctcgctaattttacatggctgagaacttcctcatctttgaggtactggtggtcagatgattggtacctaattaggtaccaatacctcacagcatcgcagatgagacatggcgccttgtcgtacagggccaaagacgtcacttcatactcagtggtgccatcgtcctcttctgctcgatcgtcagcgtcctgatccgggtgtcgatgttgacactaataaataaatttgtccattaaaaatgaggtagttgcgaatggcttctaactcattttgcactcaaaattatgaaaagatctatctcgggatgagtcaaattatcatttttgcctataatccataatttcacaattaatttagacttattagataaaaattaccccgaccgtccctaatcgcaatttcaacaaattttataacacattcattaaattcaaattttgccgccgccaaaagatgtcaatggggcgctaaaagtcacttattcttttgtgtccaatattccctgcactaatctttgttgatcgccccgagccaaacaaagaaagataacatctgtatgaccatttctacaatgaaaagacgacaaattgacaaaagaaacaaaaatttggagaactaaagtggatgggaaagggggggggggggggttaagcgatcgggccatactccgctggtcatttctccgaatattcgcgccatgcagtggattaaattcaactgcacgctttgcccaagtggacttcagtgtttctatccgcgcaagtacgcaaagcctgtgctttgtgctcatcccagcgtccgtaacatcacggactttttgagcaccgggcagcttggcgaagctgcaacgacaacaacaacaacaacaacatttccgacaactgcggaggtgtcggcggcggcgacagaatgcgcacctccgcccgtgcatttgaccgcgtggatcgcggtgtgcacagcgctggtggcgcttttggtgattgcggaggtctgttataattttggtcatttatccgctaaacccctattcctcaattaagcttgtgcgtgccggattcaaagtgcgcaaatttttgaaggaccgcgccttcaaaaaggggatgctgcgccgacatcgccagcgtgagtttctcgctattacatttttagcaaattgtaattaacaatttgtacaggaatgagcgccgcaaggcgcaaccgccagccggcaagcgcgccgactccgctcattttgccggctatgttggccggcgtttctctgcgccagacgggcgtcaatttgactgtggaccgggtgggcaattttaattaaattaaaatctttatatattttaatttctcactcattaaaattacaatttaaatttaaaggcagcggggcagcgccgcgcggatggtgcaattgaggagggcgatgagcccgtgtacgatgaggtgccgcttgacagcgacatcgtggtcgagatgcgcgatggagaaaatggggaggaggaggaggaggaagatgacagcgatttttagtgattcggcaagcgatcaaccaccatttattcaatcgatcgattttgcactaatttaaccatttaaaaaataaagttttaaaaatgttagaaaataggatcgctcactcaaaaaaattggtcataaaaagtttaaaaataggtataaatccaacaaataaaattctaaatgaggatttagaagcatttgaaaaatgtgggtgggcgctcgcgctatataaataagtgcgcgtgtccccatcggcccatttcaatttattcctgtcaaacatttgaccgtcagtttttttgtcagcatcatgtcggataaaaaagcattgttcaagcgtgttatcgcagaggtggacctcactataagcacgggcggcataaccttgagcggcccccgcctgtctgttccccgtttcattccgtttgaggaaaacgggcgttgccgagcatgtaaaggaactgaggctgaggtggacacaatggtcaccaaggagggaatcaccttatggtgcacacgcatagaaaaagctcagtttgtcccttttgacgttgtctacgagcttcccggtcattgtttctttcgcgtgaaaaataaggcaagggtgttcagcgttccgtacagcgaactgccgtcctcagacaggtgcacccagcctctaccaccaccaccaccaccaccaatgacaacagcaaaacatcaacggacaccggacgacgaggaggaggagaagaatttgaggcgtaaggcaaaggtggcgcttgacttagtggaagctggtctagcggcagacgcaatgatgcaggatgggacgcgttggaagaaagccaaaaccgcgatcaatgtgctggccaatttgcttttggcggaatcattaacagatgtctcgtcaacttttgatcaacaacaacaacaacaacagctatcgtcaaaagaggaggagaaggaggaatgcataaacaacagcagtgcttcagcacaactgaatctgctcccgatggtgatgtaatgggcgatttcgtcaatagcattcaagcggcgacaagcaatatgcaatagcaaaaaaagcgcaaaactcgctctgccctatatataaaagttgttgattgctgcacgatttgtcataatttttgaaaatgttaaattctcaatcgttcagtaataaagatatttgtttcaaattgccttgcggtataattatttccgggccatcctcgtcgggcaaaacggaattcctactaaaatttattgctgagtgcaatgaactgatcgcacccagtcccatctcaattctgtactgttttggtgaaatgaattcggcggttccgctactgcaaaagcgggagttgaggtgtattcgggcgtgccctcggaggagctgattaggcgccttcccaaaccgatgctgctcattctcgacgatctgatgctgtcaatagaggagcgctatctgtctgatttgttcaccaaaaaatcccatcaccatcagtttgcggtagtgttcatcactcagaatctgtttgagcggaagatcaaggtggctcgcctttcggcgcagtatttggtgctaatgcgcgcgcccaactcgctgctgtccattcgaaatattggagttcagctttttccgcgtcaactcgattttttccttgacgcctaccgcaaggcgaccgctcgcccctatggctatttgctaatcgatatgcacgcatcatctgatccggcgcttcgcctccgcaccaacatatttaaagaggagcaggaggaggacgagggaacagttgtgttcatccccaaaaatggagcggtataaacgtcaacaacaacaacaagctaaagttagtcaactaataaaagataatgccaactggctttgcgcactgtcgaaggcaaaatgtgtgaaacgatgcgggagattgatcagaaaggcgaacactgatcagctgctgtcactggtggaagtgtgcttgaacattgttgcttcccgattccgcctgacaactcggcagaagaaacgactaatgccctacgtggacacggtgcgccgcgtgagcagagcgaggagcgagaggggcgctaagcgagcgcttgtcgtccagaaaggagaggggtttggcggactatttgcagcccttttaacccccgtcttaattgaattggccaaatcggttgtgacccgaaacacataaataccctcgtaaaattgtctcacacacgcattcattcattaataaaaatggcaaacaaattcattctcgtaccacaagaaatttatcggggtctcacctccgtctcgcagacgggagacctcaatttggacgcggttcgccacgacctggaccgggctaggggtgaacggacaaatccttcggcgaaaaatgtcaattataaccagcagctccagcgttatttacagatgagaaaggaacatgcagacagaccaacaaaagttgagctggccaagggaataagtgtactgatgaatagaggtggcgaagaaggcgaggttgttgataccccagggcgtcctcccgctcctccaccaccacctccaccgcctngaagacctcctcgtcgtccaccgcccagtcctccgggtggtcccggggg

SEQ ID NO: 10086 - DNA, 1648 bp, Heterodera glycines
gagagaacaacacaaaaaccaaagtcagaattcaaaccgccgtcgacatcaaagaaacccgatcaccacactccggcaaaaagagtgtcagagtttgttgatctcgatccacgaccctccacatcaaggcaggccgggtataacccgcctcccccgacgcccaaaataaaacatgagccgacaacaaagagacccatgccataccgtatcccaaaaagggaaccaaaagtcgaggaagcgccacaacagcaacaacctcttcctgctgccgctgttgtcgtcgaagaaatgcccgttgttcctccgcctaggaggggggccaaacgtcgctaccccgtatatgaagatgatgaggtgcagataagaaaacgagtgagacaaccgagaagggtaagggtacagtactcacccgagccaggcccatcgacatctgcacaaagtgatgaacaacaacaacgacaacaacaacgcgaactgtttgccattccatcaaatcagctgaccatgactcagcgggttgaacggctatacatcaaatgtaaccattacgctgatcgtatgggcgttcgtggaaatacaattaacaccgcaaacggcaagccgttggtgcataccaatttgcgaatggccatccgctatataatagacagaagagcgggccgccccaccattagaccaccaggagcggccatattggaagaaaggcttcagcaggacccaattctgtattcatggacggctccaccaaagagaccgtcacagagcaaaaccacgcggaccgcaccaaaaatcaaaaaggaatttcgtccgaaaaaatggagctgatcaacgcaacgcttgacaagctgtataacagtccatcgtcgcccgcggcgttcgcgggcgttaccgcgctgtggaaagaggcgcgaaaaagtatcaaacatttacgcaaaaaggacgttcaacattatttggaggggcaccgcacatacactctgatgcgcccccgtagggtgcgctttccaagggccagcactgtagcggcaggattcatgaccgatgtccaggtggatttggccgattttcaagcgctatcgcgacacaaccggggtcaccgctatctgcttgtcgcggtggatgtgctctcaaaacgcctgtttgttgttccactcaaaaataagagagccgaggagatgttggaggcattcaagctgctcatcgatcaaatgcccatggccccccaccgcattttctccgataagggaaccgagtttaagaacagattgctgaaggacttttttgagcagcgagaaattgagaagcatgaacccgtgcattcatcggtcaaggcgtcggtcgccgagcgggccatccgcaatgtgaaacagcggctgtaccggtattttgcggaaacggagacgctgaactgggtggatgcagcacagaaaattgtggacgggattaaccgctccccgtcacgtgcccacggaatgcgtccgattgatgtgggtttttccaatgctcagagggtgtggaagcgattatatgatgatggacaccgtgcgccccaaaaacgacgaccgccacgcttccgcaaagacgattttgtgcgcatgagcagagagaagggacagtttgagaagggctatttgccaaattatggcga

SEQ ID NO: 10087 - DNA, 284 bp, Heterodera glycines
ggtcccggtgtcatctatgttactagatcggggatcgatccccgggcggccgctcgagcaggacctgcagaagctagcttgatggggatcagattgtcgtttcctcgccctactcatcggcacagagaggagcacgaaggggaggggagcggcgcgtagcgggggaggtgggtggcggaagaagaaaagggtggggggagtatgagtatgatggtcaatatggagaaaaagaaagagtaattaccaattttttttcaattcaaaaatgtagatgtccgcagcgt

SEQ ID NO: 10088 - DNA, 1991 bp, Heterodera glycines
ctgcctttgctgttgttgttcatctcctgttcgtcctctttctgctcggcaccctttgccggccgttttcccatgcgcaggaagtgcccgagtttatgctgtccagaaaggatgtatgtgctgcttcttcaaaattaaaaaaatatatatctatctatatatatatatatatatatatatatttcgtttcatctttttgaaacatataaatcaaacccgactctcgattttcttgggaccaattaacaaattaccaccagttaacccccccccatgcaaatgtccaaatttatgatgcgtttttttgcccgtcattctcatcataaattgttggcagattgtcgacaaaaatgtggaagagtcggaaacggtgctgtcgcccaatgattttgcgaacattcccgagaaggaagtggatttgcgcaggctcggcattcgtgtcaattcgggtcggttttgtggtcaattttggcacatttggggcggggacaatcattggaaaataaataattgtagtttatatttccaattcctacttagggcgggggatatatcaagacaccaaaagagccaagattttctcgagtcgtgtgactcaaaaccgagagtatcgaactgcactatcgctgatttgctcctccgttttttttgttagggatgctaactttggttccataatttgaattaaaaattgggaatattacatataatattaggcaaattaaaaacttaaaaaattatacgatttatcggtcaatattttcgtatttttattgagaatttgattatcaaaaaatatagatcgaatcatttcccttctttaatataaactttggttggtcaattaacaacagctaattttactaacaaataatggtcatattttcttttttaattaatttttcttggtaaaaaaataaataattttttcgatttataaataaaacgccattttcttcgcgtttcgttcagacccgaccatgggcaacaaagttgagggagacattgtcggatggtcgccgacaaaggaaacgcccaaaggacagcaaatgatgccgaaacggcacaaaggtgccgcacgggtcggcactgatgctgctggtgccgccggcacagtgctatttgacgagaacggattggcacggaacgcactccgacagccctacaggcaaattgaagggggggggggggggcgcttctcaatgtcttccgttggcattgggaacagcggaattgtgtcctcgtcaactttaacccccacagcgatgcccgtccgtctgagaaggtccaccagctgatcgccttgatcagtcatttgccgataagtctaacaattaggcagggaattagaataatttgaaattaatctccaataattggttctgccaatccgaaaactttgacagattaaaaggagggcgacacttcatcctgaacaatgactgcgctaatgtgcttgtgaatattgggagtggtgaacaacaattgtcgaaagcgacggcgattctctgcggaattttccatgccaaaaagggtcaatcgcgagtcgagagcaactgaaaaggcaagtaatcaaaggtgtgtgtggtgtattactcattaccgtccgaatttgccataattagctaattacccccccccccctcctctccgcccccattcattcgacctgccgggtcgcccgctgccaaaatgcctttgcccggctgaagcactctcgccacgatatcgcgcagttcgcactcatttttctcactcaattcgaaagtcattcccatcgatctgctcctcctcttcatctttgttcttttgtccattttttttactcccttgaattttcttttcaagtcctttgaaatttgaattttgatttaatgaataaatccaaatcacttaatatttgcattattttttgcaccaatcgacaaaataataataataatataatatataaataaccaatgagtggttatttttttttatggaaaaaa

SEQ ID NO: 10089 - DNA, 3648 bp, Heterodera glycines
  unsure (1)..(3648): unsure at all n locations
aggcaaatgaaaggngggggggcggtggggtcattaatccaataantattatagaaatggcttaatcaaattagaggggcatttaactaattaagggaatggtattntgatcggaaaaacgaccaaaaaaagatttatcggtgaaaattaatttccaccctcaggcgatggccccgcaacgaaattccatacgcggtcaggtcagtcatctgaggcagtgtcattagtgaggatgcttctctgatcagcattcaacccactcaccaataaaatatctgtgatctatcatcagtgattagaactattttctttttaaactcaattaattttctctggttttgaatcatccgtcagttttgatcattgctaattggtctttgaatgcttctgatcactagtgatcattggatcttcgatcattgctgatcagcagcacttatctgagcatttcttccgtctgacccgttcaccaatccttattagtgatttcatccctcttttttcgaacatttcggtcactctccgtcaatttctgatcactgttactgatcatttaattccaaccaaaagtttccctcatcacacagtgcacaatacggctcctactcacgttcggtcagtgttttttgtcactttttctccgagctaattgccttttaaaaatggtggcactttcccttattaggtaattgccaaagcgatcagtgaatatcacagcaaaacgtgtgtcaggtttgtctgtgcgttcttcactaatcaaccaattaattaattaatggtcatatgatcaaaaatttcatcattttgatcatttcccagatttgtgccgcgcgatgcgcgcaaacacagtaaaaattaaaatacgattttaaacttttaaaatgattttcccatatttgagcggattatgtgtggatacaccctgatggtaagtgtaaaatcataaccaaacccatttgaaaaacccgattgtccatgcctctgatcaatcagaatcattgtcatcgccatttcataaacataatttgatcactccgctccccttttgctgatcagatggctgctactcattggtgggccgtactggcgggtcggttttgaccgcacattttccattcgatttgcttttgtgtataaaatttgatcggtgcccacagacgacagccgttgagcttggacagcggatgcatccaagtgggcaccgttgtgcacgagctgatgcacgcagttgggtgggtaaaagggggagaagggcattcattgatcagtgccaagagagagagagagcgaaattgatggcatacgagtgatttgccgagaaaatttgtatacagattagagacagggggacgggccgagatctctgttcaggctgatcagtattgactgcgttattgcattgatcaattaattagatcgaaggccgagcataaatataggctctgtctaatgtcaatatcgaggtcggaaaagcaaggcatgtcgagactgatcagtcgtgatgaaagtgatcaggctggaagattgaatgctgacttgtacctttcgatatacataaatgtgatcttcatccattttatagtcaggctgtttccgaaagcgaaaaatgccctaaatttttgatttgaatctcaaaatgccgtctttttggcgaaatttgtccccttttcttctttacagcttcttccatgaacagtccaggtacgaccgggacagtttcatccaaattctgtggtccaatgtgcttcggggagcggacggtgagaaaagcgatttcaggggcagaaaataatagggagtggtcgagacaatgttcagatcaattcgaaaagtacagcttcaataccatcgaccaggttaatccatggcattgggaattaatggatttttttcttgcagcttggcgaaccgtacgattacggaagtaaggcggggggggggggggggaagggtgcaagggtgagagcggggaaagggtggagaacgggtgccaatgaaaaggcggcgagaattgtcccgaaaaattattctcgaccccaagtcgagattatccgggttaattgtcggaaatttaatcacgaccaaatgaatcgatgatcggtcacacggggtactccagcgaaacctcgacggagtttttggcattgtgccttcgagctttataatgcttaccagtctcggaaacccttcattctcgagggacaactctcgggaaccgagacgggaatgggtcttacaaaattctgttcaatcccacgctaccatacccacacaaataccccctaaaaaggcataatgcactacggagcgtacgccttctcctcaaatgggaagcggacaattgtgccgcgcagaaacggcgccaatcgaatgggccaacgggtgacgttcaggtggatatgatcagtagggcataaaattacatggaaattataataatcagaaaatggaaaaaaaattttaaatttgttatctgtcgctagattttatcaattaaacgaaaattttcagaaataagttaggttttatagaatccttgatcgaaatacattgaaattttaaaaattgggtcggaggaattcgaaaatttgcacacaaaaaagtaacaattattttgtaaatcattaccaaaagtgaaattgacctacggaagatcaacaaattgtaccaatgtgacaagcggacgccaaacacaaacagagtcagtttaaggggacttaatcagaaaatgactgctttttaatgaaagggacggcaatttacaaagagtcgggatcagagggtacaaccaagagtgaatcgactaagaaacccaaaccttcattgattttacgggggaaaacccaaaaatccaagtgaaattctgatagagttaagaacctctgatcatgtccgagccttatttgatttcggaattcgaatacaaaaaaacacctaattaaagcaattagctttaattaataattaatttcttgcatatttaagtgcaaattttattcattttcctgggaattcaataaataaataaataataaaaataattatttccaggccaatgccaacagcagaaattggggtcaacaacaacagcaggtggttattttcacaaatgccatgccatttaatgatgcttattaataatgcctttgtttttttttctcgctgctttcaattttggttgatcgctgccgcttgtatttgtgcttttcaatttcagtttaaggctaaaacgatagcaccggcattctcggggatgatggtccccggcccaacatctcaaaagtcccaaataaatccacagaaatccacgaaatgtgtccaacgagttggggaccaaccttatgggcaatgatcatcaccaagaacaagattctgaatttcagcaggggtcatgtagttttcacgcttcaaaagggtgttgtctctctgtcactggggatttgtgatggatgatcgatagtctcgattcccaggggtcaatgctcccccttggtaaaatcattctttctcggcacacccacccctctattaatgtctatcagtggccaccgctgatcacaacgctgaaccaatcgcggcgattcccatggacagccgcgggcggcgccaacggcggatggcggcgcgggcgacggaaaacggaccgat

SEQ ID NO: 10090 - DNA, 2270 bp, Heterodera glycines
  unsure (1)..(2270): unsure at all n locations
cctaccctaataaaaatgaacatttaatttaagcttgtgcaactggggatgaacaactctgcgtgcagagtgtgaccaataatccgacagtttgttctgaaaaaacaatgttacgggcgtgtccaaaaagttgcggactttgtaacagtttggcaatgggttcggcgtatggctaagatgacgagaatttggacgaaaataattgaaaattcgcatttacatgtaatcaaaaacgatgcctaattttatttaaattttccaagttgtatattttaacaattaggcgggtccggatacccaaccgggcccgaaaacccgggttttcaatacccgggacccgcccagacttttttataattcattattttaaaaggaatttttataaattttaaaatgaactatatttaagttaaagaaaaatattcttaagcaattggaaaaagcttaaaaatattatatcataaaatttaattatgaaatttgtatcttcttaagttttttgataaatattttcatttgctaccaaaaatatttttagtttaataattgtaaaattttaaattcttttttatttttgaaaaagtatgaatagcttttcaggacggcccgatacccggactcatttttaaaacttggacccggcttttctggacctgtcaatactctggctcgtctaaccctacttttaaatatgttgaaaaattaattatttgtgattagtaaggttgattatatggtcaaataattccaaaattacgaattacaactttagttactcttgatcaaggttaacaaaattttccatttgatggttttttgagtaatgaacgacccagcaccgataaaatttgcaaaaaacaaaatattttagggaaaaatctgcctttattatggacaatttaacgaaaatacaactaaataaatagaaaaggaaaacagaattgaaataaaataaatacctcaaactttcttaaaatatgaccaaaaaaccaaaaaaaaaaaaaaaacgaaaacacgaataaataaaatcgaaagcgaaatgccacgtaaaatatgaaaacgaaaaaaatgaaaaacgaactataaatttggatgaaagcaagcacaaaaaaataaaaagctaaaccaaaaaaattttacatcaacttgatcagatcaccccttcattatggtctcaaaacacgaaaattccatgaaatctgtaaagtttttcgacaaaaattcctaggggaaacttttttgtgccaaaatgatggaacaaatgtttgtgtgtcactgattttatgaaaagtttgtggagaatgcatactaaaatataaaaattttcttttatcaataaatcttcttcttttggaatctgaattgctttgcataatctcaaaaaattcttccggtggaacatcctaaaataaatttgtttcatatttatttaaatcaattttaatcaaataccaaaagtagggttgcgtttggttggtttgagaaattaaacttttttcatgaggatttttaaaactttttcagaatttgtttaaaatttacacaaaacaagaaataaaagtttcagaatctttatattcaacttggaaattctaaaacaaacaaaacaatcttaaagtttaatcaaacaacaattattcaaaatttatttattttcacatttttaatcaaattgtgaaaatcgatttaatttataatatttaattattgtttgttaacatattttgtccattaatgatcaattttctgaatttttggataaattttcaaaattttatggaattttgggtccggcagtgccgacaggctcctccgggaaatttcggatatcttgtcacaatctgttaaacgattttgaacctaaaaattggctttttggctatatttaaaaaaaaaaaaacattttaattgattttttattgtgttttcgggtggtggaaattttcataattaatttttaaaaaatttaaaaataaaaaataataaaacaatttcattaagtgtggggatcgaaccaagggcgaaatcaaagaaagaacggatatttaaccactcaactgataagttttcccttatctctaatttaaaaagaaaaatcaaattttattttttctctaaaattttttcttttctcccatttttcaaaaaatatattttttctcacccctccccccattcgtaccatttcaaaaagatctcattnccaaaatacaaaaataacagacccccgtttttgaacatatctctgttaggtaccataaatctgctat

SEQ ID NO: 10091 - DNA, 4012 bp, Heterodera glycines
  unsure (1)..(4012): unsure at all n locations
tcaatttaagtgcattaagatgaaatatagaaaaataaggatnttatggagtttattttggaatttctattacgaaagttaaaagatattctagaaatctggaaaacttgaacactctatccctcttgtaggttgggggggcggcttctaccagagggactttgtattgttgaatcccttcggacttacggtactcatcagattcaacgaaggataaatgctgaatttttttctcatttttaaaattggaacttatttgtcaagcgccttgaaaatttgaaacaaaaatccaaaaatgtaaaggaaaattaaatgaatttcattgtcgtgtttaaatttggcatcttttcaaaatattgtaaatgttagcaaaaattcacttaacgttgctccataaattaacttataaaatttttttttattccaaatagaaagattgacttttgctaagtaaatatggacataaaataccattaattattaaatcaattaagcataaatttattttcatcaatttgttcagctttccaattgaacccttttattcaggcaaatggtcggattgatgttgagaaatattaccattaaaatcaactatatgtttagtaattgacccaattaataataaatgaatttagaaaatcgatgggcttttcccggctgattctgatcactctgatcagttgctgtcttttgccattggcatccgttgttctggcacaatgtccttaccaggggtggacagtgagcggatcctgccaaataatgggatattgtgtagaccccagggataagtgctattacaggagttcgtgttgtaagttttttttgctattgcattattggttttaaaaatatatttttaaaaaatttcgtttcccatctcagctataagttaacaaaaatattataggtcgaatttcgaatcaacagtacgcgcagacaacaaagcaaaacccgaaaacggggctaatggaaacaaattactgccctttgggggcctacagagatggaggtcattagctaattagtagggatgggtgtaatttatagaaatgtatttttaaaaagaaaatttaaatattttaatttttcataaacataaatctcatcctaagtgattagcatacgaaatggcattttaattatattcacaaaaataaaaattgtattttttatttggatgtcggaatacatacatacatatatttataatttacaaaccataaatttatttaaattattgccattgaattgaaagcaaaatttgaggctgctcaacgatgtgttggacgccgagccaagtgtgcgtcaatcggcaagactgttgtaagtgttgccaattattgcttaattttttatgatagtataattggggggggggggggtgataatgatgaaaaaatgtgacttaatagaaacagcgggtgcacgacttcccccgcctcccgcaaaaaataatataaatttttagttttaaacttttttaaatattttttttagcataagaaattatgcttatgtttgaaaatattgcttagttttttattattagaaaaaaaatttgtttacgagaaaaaaacctctaagaaagacagaaagggaaaaaattaataaatttttcggcgggggggggagacaagctgctgctccccatcgcaccatcctgcaggcgaaattgttaatttaatggatgttaatttgcttttatgatgtttaggtgtccaatcaaacattccggtgaacagcaacccctacggcccgactaataccggaccaaatacgaattatcccggatttaacgcttacaacccgggtataagcggtgaagacacctgcagacagggccaaggacaatgtccgttgacaatgtgccaagacggatgtgagttttatttcttgaaaattcaaataaataatagtaagcaaatggacatttatttttaaaaaacgaaaagaagggaataaatactggcaaaattaattatccaataaaatgaacaataaaagtgctgacattgagcatttatggaattataaataggtaattgagagagaatatcagtgggcacttgaacaaaggtaattagtgttaattgctcaaactttcttgcgagcctctcatccatcattaattccatttaaaatcatctgagaaaaaaagaaacaatgtccgattctcactcctcattgatcagtacaattatctcctcctccagtgataaatcagtacgcttcaacttccctactgatcagttcacttatccccatccctccattgatcaatcttttccttccccatttttgttcctcactgatcagtccacttcttctcttacttccccacctgcttttatgccgatggtgttctgtgagggcgttccgtcccgactttgtcctccatcgcggcttaaattctttttactgcgcgacagcgacctgcgcacgcgttccacgatgcgcgaactgatccctttgaacggattgcgccccccgcgcggaagcgacgacgacggaaacggggaaggactgccgccgcctccgcgggtccgttcgtttgaaccgggcattttttcactgggcacgtgttcgccctttcgaaatgcctttggagttttcaaattctaaatttgttttttaatttcctctctaagttgctaattgccctcaacattcttttaatagcgcccattgacttatcgctaatgtcttaatttccgtctttaatgacccagtggaccaatcgatcgtttttttccaaatcattttcaccttttccgacattgagctgacttccatcgaactcgacttgcccaacagtccgaatagtccgccctttgtcggttttattctgaaattatttgcccttccaacaatttttgtttcgctttttctcgccttttccgttttggctcttcactgctgttccccttttgttggagtttttcaaatgattcaaaagcgcgggccatttgacgaactgtcggatgtttgccttgggcaagctcttctcgacggatacggtagagaatgtttgtgcctggaaaaagttacaagtaattccaatgaaatgcctgctcactgtttaccggcacttcccgtcctgcggtatttctgctgcacgtcgtccacactgccaaagtccccgtcgtccattacggcaattgcgcgctgtcccagccccgccagcggtgaggacgtgtgaatgtccacggcacggcattgaagcattggtactttgagaatttgaatatcaagggcaacataatttgattgttcctcaccagttgacccgcccctgaacattgccgattggcccttaagaggcgaaatggaccgcgtcatcatcgagccgcagtccaaaagtcggctgtcccacgttgtgttgtcagtgaaattgttttccgtcagcgaactcattgatggactcttaagggggaattgcttaaattggtcgctttcggcattgtttcacttcgtatcccctctgtggtcgtgtcacgtgctgtgcctggtgttgcgtcggcatttttataacggcactgacattgaccgcgtcattgttgtcgtcctgtttatgttcagctaccgtctccgtcggtgccactaccgtaattttttgttgccgtgtcgccagttcctgctccaatttgaccagctgtccgctcagccgctgcacctccgccgtgtaatgcctttgatactcgcggtactgtttctgcagctcttccgccgctcgcaaagcgttgtccgcgatttgcttataatccacgccttggccaagcgaagcggcgccattctgcacaaatttttttcagttgtaatttgccataatcaacccttaattaattgaccattttatgcgcccttccgcccatttgttctctctctctttgccactcaattttctccgtttggtgcgccaccatttccttaagaattttaattggttcgaagttaaattagactaattgctccacctgctctcgtatctttctcagctcctccatct

SEQ ID NO: 10092 - DNA, 2562 bp, Heterodera glycines
gacaaaatggcgtacattggcattgacacgaccctgtcaactgacatttttggcactcctccgactttgttctgctccgtgttgcttgcctcctcccctccatgacccgagtttttgcccttctcctccaccggtggagacggggatgacaaaatggtgtgcattggcattaccggaatgtggctgttggccgagtcagtttttggcacccctccggcgttttcctgctccgccttcttcgcttctacttgatgttcctgtcttgcactctttttcctcattgattttctgtacctcctcctccatcttagccttctcttgtggcttctccgccgttcctttctctggtccctccgttccgccattctacataagggtgatcaccacctgctctctgcctttctcgtcctttgttcgtctgacttccaaccgtccttcccctccggcgccgtccttcacttcaaccttaccattctcgttcaccctcacttccggcactgtgtcctcctccgtcatcttttccttcaatttttttgcttcctctcctcctgcccattcaatcagtttgtccttcctcagcttcacttctttcgcttcttcgtccatttcgaccatcacttccaaagcttccgagaaaagtcccaagtcgaattgtggcggtgcctccggcttttccttttggatggtctccaattcccaatgcatttttgccagtgctctttggggctctgtcagttgtgattcgagtgaagccaatgaattttgtgagttcttccattgttccggcgatgaaatagccgaataaacagccttcatatccgattggactgactcatcttaaggggcaacaaatgggaatatccaagtaagcaggaaaagggatttacctgggatattttgaacattgagaagcagggggagaagaagcagaagggcagagagggccatgaaaaaatgaaaaattgggagattaattaaatgggcggcaaaagaaatataaataatattttggaggggagtgagtgagagggaaaaagcgggataaattaataataaaagctaatcaatggatggatgggcgagtaaaagagtgaatgaatgccttgtgcttccctatttggcgaggctttgtatggattggctgctcatcacgaaacatcgatggtgttggcaaggggagggggtggaaaagcgcatgaatggagtgagaaccatgccaatgccaggcccaatgatcccatgatttgataatgatttgtcttcaaatggaaattgccaaaccaagtgaccatcaaattaagggtattgaatcacttatacaaatgagtgccactcaaattattaaatattgaaaatagaaacaactagcatttttattggaagaaatattctgaaaaagtaaaaacggaattatgaaaatggatgataaggagaaatcttgcagatttttttaaagacgtgtagtgttgtaattttattgggcggctcattaggccgtttggctctattgaatgaatacgttaatgaagtatatatttctaaagcattattatcaaggaattttacgaacatttgagtttttggattcaaaaaagttatttccttgcatttttcaatataacttcgtgtttttgtccggatattcgaaaaagttaagaaaatacctattatgttttcttaatatcgataaaaaatttctcatttcatttcttaatatagaagaaaaaaaccaatacttaaagatttaaatcttttattttttgtgatatggattattgagtaactaaaaacggaaaaaataaatctttttttattttgtaacgacaattccattaaagagtttatctatcaatataattacattttaattaattaatgaattttaataatttttcatgatctcttctggtcggttcctatcggcgccgccgaccaacaaaatttccctaagatttcaaaagttgacttaaaattgtcatttttcggtgaaaatttaaaactaattttctggatttacaaaatttcactctatctagttcttaagtgtcaaaaattctcgtttatggagctaaaatgcgggaatgagaaaccaaaaaggcgagaaagcgaaaagagcaacaagtctaattctttaatttgttttgttttgtcgctaattattcttctcttactctatttttctggaaattcctctttgttgaattttttaattaataaactttaataatttcgttttttcttatcagttagttttttttcacgtttttctctcaatcaaataatttttgttgtatttttgtatgaatagtataaatatgaatcaggcaattcaaaaataagggcttttactcacgaaaaataactgttaaaaacaattattaaaactataattatctaggtcaatcttcatacttcatcatgatacttttccagaatttctcattgtaattcttagattttacgatcatccttttgcttattttcacttgtattcccaacaaaaatgccaccattgtgttgagtgccgcttctatttacatttcctcctgtgtttatgcggaa

SEQ ID NO: 10093 - DNA, 2023 bp, Heterodera glycines
cattggcattccagtgttgtgcatgcgctggtgtttctgcaaattggtccagggcatccgaacacgctctggattgttcatgaatcatgttgcacattttgtgggtgtgtttgtgcccccgatggtgggtttgtcatttgctgttggtaatatgccctccacggctgttgatttacattattccatggattcggccatttcccggattgcatattagtttggtgttggtgagtccaccatgaagcattctgaggttgctgttgcatacttgcaaatgcttcatggtcatgtcttggctgtgcatttgtcgtattgcttgtcgaagtgtcagcgttgctggccagtttgtcacaagcagggcaattgctgtttctttttcgccttaagcactggttagtgtagcaattgagccctattattaaacaaattatattaccattttttcatgcagttacgatgaaattcatgctgaaatatttgcatattaaattaaaattaaaatgggtatgccaattcaaacatggcctaaactttgcgagcctatcaggttaatattttttataaattttgacttgatataatttcttgggtttttgtatcccaagcggctcacttacaagatatgctctatctagtagaataaaaaattacttcacatgacaatgaaacaattctttgattttcttttttcatttcattatcgcaaatggggcagtcattttccaccaaagcacctgttaaaaaatattaacttaatttgcgttagtgtttcaataaatttacttcgagcagttcccaacagaagaaaaagaattgccaagaaaatgaagtgtttaggaaaatgcatcagatattaataaaagaaatggaagatatttttaaataaaatattaaattataaacaaaaaaaaaagaaatatttttaaaagaaaatcacgaaatattagttcaaaatttatgaatattacgaatatgattaaatctttctgattagtaagaccctgaaacgaagacaatattaatatttttgaggtcatatttaaccttacatttagcaaatatgaagaaattttatacactcaatttggaaaattatgtccaaaatatgaggaagggacgagggaaattgaggattggatttgggggaataaggaataagccaaaatccgggccctggataaatgacctccctaaattggtaatcccatgggcgcctactagatctaatacgcgtgcggggatgggtgagaaggagcaaaataataatataaatatttgccaattacattaataataattccgccgcgttctgctctcgctcgccgattaactgcccgctcaactgactccttatcgagagaatgctcccgattaaatagttggacttatggaacggaataaagatggggaaaagcggggataaatggtgtgagaaagagattaaacggatgtgataaattgcgctttacactattaaaataattttaataatttaaaaatcagttggaattcccctcggtgccgatcagaatatgacccggtgttgtgtgaatcgaatcggacaattgctggctattttaatgtgaaggtgaaggaatgaatgaaaaatatttattttattaaaaataatttaaaaatttacaattttaatttaaaataattaaaatttatattttttaatttttatttttatttccaatatttaatttggtcattaaatattttatcaatttattttttcattattaattttcattttaaactccttatggacctctggattcaggcctcagttttcctgtccaagtccagttttttaggcaacctagtttttttggcctagactttcttagttttttctggcccaaaattcaagtcgctaattatttaaaaaaattattagccctttttaataacatattttttaaagtaagtttcttttaaaatattttaaaatggtttatcttaaatttatttcttttccatttgaaattaaaaatttttgttttcaattaaaaatatc

SEQ ID NO: 10094 - DNA, 3045 bp, Heterodera glycines
  unsure (1)..(3045): unsure at all n locations
attcgagacttggacatttcgtgggctggacattttgtgggtcagcggccacactatgggtcaagcccagtgttagacaaaattgctcataacgccaaatagcgtaattggcgtaaatttttgcgcgctaattcaaacacactgatcactgccatttctgattgtttattttgatcagccatagctttgttcctctccaactaaattgacctaaattggtatctaaaataagaatttgaaaaggagaatctttttctagttaaaataactctacagttggccttatttttgtattaaatttccttattaatcgattcagaatttttttctctatcgtgtgcaaaatttggtggggttttaacaagcagaaaaaaagttaaacagcatgaagtaaatgttgttttttctattaaaaaaaatgaagagatagtacgccaaagtgagagaaattataaagaaaaagagaaactacgagatagtactaggcttttctctgcacagtggagttgacccatagtgtcctgcttattaatttaaaaccatttcatttaaaattagttaaaaatttcttttcttttgaaaaataaattttaaggctgtattttcgaaatctttttcgattgatcttatcaatgagtatattttcctctttggattaaaaaaataaaccataaaaatcgcttcccgagaaatgagcatttgaaaaattgtgtataagaatgacctcttatcaatattgtaccgtttggcgctgtttggtattatacataaaatgtgatctgatctattccttatctttctgctgattatcaattagtcatcgcgttggttttgatgagtgctgtgacttattcagtgtgtgtaaaaggccaaaattttatttgtttgataaaattaaattaataatcattttgttagataaatgctacatatgtataaatacatatgtatacaccaaaatttagaaattttatgcgattgattgcccaagcatttaatacggattggaaagggaaatgaaaatcttttatttccaaataaacaaacgctcattccatccgtccgaactgcagcataatcgcgtgaatgggcgataatagggacggaatgcatttcatttaatcaaaaaatgcaaacattttttatatatcaaaaagtgaggaattttgttggagccttaaaaaatggcgaaggatggaatgaatgaacggcgcttttgttggcgaaataaatctcacctcttccgccacataaaccagtcgtcgtcagtctgtggtgggtaatttaaaataatcattaaacatttcgaaacgcccgtttatcaccgctcattggtgagaattgttggggcattcgccaaattgtttcatgaaactcctcgaattgattgaaaagcaaatataaataaaactgaaaagtagcaatttacaaaaagcagattgaatgcataaactggaatagagcattttgcgtttatttaacaatttacacgatttttgcagctacgtttttaaagtttattttccgcatgtggattttcccggaatctgatccagatcccgactttttaccaccaattgcaacatctcaaattttccaatgtcacctgtgcgtgtaaggcctcccgaccatacgaattattcgaaaattcttgagaatttttatgttaattttaataatttcgacccaaattccagaatttgaatcctgggaatccaatcccggcctgattcccaacctcaaattttcaaattctaggctttttcctggatatataatttttttatcagaaaaagcgaagttattaaattctttaattttacacaatgattaataaatacatatgagaatgaatggacaatgtgtgtgattcgtattatgtacaatcaaaacgagtttcatatgaaaaagatcacagtttcaaggttagatcgatgcacggcgtcctcctccatcgtttggaatatcgcggtaatcactttcaagcgccacgttcgactccttcacgcattgtttcaccctctcattgtaccgctggggattgacgcgaaacatcagctgaaattagaggggaattagtttaaaaatattcatttcatgcgaatgctcttcttacgagtgcctcgagatttgcagggctcaaaaagttcggctccgaaagcattgattggactgagatgacgatggactccaccgtgtgcacaggctgccaacgttctgccgctctctcaacgccaaacggtccgtcgcccggcgggtggagaatactgatgcacacatagccatccctgtaaactgtagggagaggaaaagcatgatgaaggaacggttgatgcaaacggtttaccattagggtgaagaatgttagtgagaaatcgcatcttcggcggttgttgcgggtaactcgtcggaaagtcgagttgtgccaaaaaagtgccaccttcgctaaaatgtgaaaggggaaactgtttgtaaaataggtatgcgttgtctcattttgagcaaactcactagggcgattcgggcggaccaaaaatgatcacttgccatttgaagatctgaaaaaactggggatttgattggaaggcaaaaaacttgaaaagaaagtgccgacattgtcgtcgtcgtcaacgaggccacggacagcgaatccatcggttgggttcgtctgaagttcgaccaattgacgggccaacgaagcggacataagtgggaagaacggcaaaacaacgcaggaatagtaaatgtggcaattttgagcaaaatcatcccctttatatacatatacaccagcacgaaaataggtaagctcctgtaacaaaaaaagatttgtatgtgtgtctaagtggcttttaagagaggaatggaggtttaactccnctccacnacataacaattatttatttantttttnccaattaaaaaaacnattttataaaatatttttaatnttttttccaaaaaggttaaacaaacttnntatcatttcaaacttcgtgattgttagaaacttttcaacaataaattcttggcatttcgctgaag

SEQ ID NO: 10095 - DNA, 1434 bp, Heterodera glycines
  unsure (1)..(1434): unsure at all n locations
tttcccggaatctgatccagatcccgactttttccancaatgcacnnatctcaaattttccaatgtcacttatgcgtgtaagtaaggcctccngaccatacgaattattcgaaaattcttgagaatttttatgttattttaatatttcgacccaaattccagaatttgaatcctgggaatcctatcccggcctgattcncaacctcaaattttcaaattctaggctttttcctggatatataatttttttatcagaaaaagcgaagttattaaattctttaattttacacaatgattaataaatacatatgagaacgaatggacaatgtgtgtgattcgtattatgtacaatcaaaacgagtttcatatgaaaaagatcacagtttcaaggttagatcgatgcacggcgtcctcctccatcgtttggaatatcgcggtaatcactttcaagcgccacgttcgactccttcacgcattgtttcaccctctcattgtaccgctggggattgacgcgaaacatcagctgaaattagaggggaattagttaaaaaatattcattccatgcgaatgctcttcttacgagtgcctcgagatttgcagggctcaaaaagttcggctccgaaagcattgattggactgagatgacgatggactccaccgtgtgaacaggctgccaacgttctgccgctctctcaacgccaaacggtccgtcgcccggcgggtggagaatactgatgcacacatagccatccctgtaaactgtagggagaggaaaagcatgatgaaggaacggttgatgcaaacggtttaccattagggtgaagaatgttagtgagaaatcgcatcttcggcggttgttgcgggtaactcgtcggaaagtcgagttgtgccaaaaaagtgccaccttcgctaaaatgtgaaaggggaaactgtttgtaaaataggtatatgttgtctcattttgagcaaactcactagggcgattcgggcggaccaaaaatgatcacttgccatttgaagatctgaaaaaaactggggatttgattggaaggcaaaaaacttgaaaagaaagtgccgacattgtcgtcaacgaggccacggacagcgaatccatcggttgggttcgtctgaagttcgaccaattgacgggccaacgaagcggacataagtgggaagaacggcaaaacaacgcaggaatagtaaatatgacaattttgagcaaaatcatcccctttatatacatatacaccagcacgaaaataggtaagctcctgtaacaaaaaaagatttgtatgtgtgtctaagtggcttttaagagaggaatggaggtgcaactccgctccacgacataacaattatttatttattttttgccaattaaaaaaacgattttataaaatatttttaatgtttttttccaagcaagttaaaca

SEQ ID NO: 10096 - DNA, 3976 bp, Heterodera glycines
aagcgatgaaaaaatgggtaaaacgcgggaggaaaacagtaggagcacacgaaacattacattcattcttctggcacaaatttagaacatttgtgtattggttgtttttattgagcattggacacaccgtcccaaaaaatgagagatcaaccaataatgagagagtgcagagaaaaaaatagaatttcttcaaatttaacatattctgcattttctataatgaattcatttttgtctatggttgaatacaaaagttttaagaaaaacaaaatttcgaacgttcatatcttttttttctgattcttcaaattgcttagcattagttttgggaaagcttctcctaatcaagaagagctttagaataatgccagtatcgtccaatttgcattaaataattgccatcgaaatgttcaaaccgggtacaacttttaccacccactttatttttttaattaattaaatttttttttttttgcgattttcaaattttctccaaatatcatttggatccttcaccgttcgctcattcgtgtttattggcctggatatgtatgatgattaacctgctgctggattagtctagtaaaccaaagtaagaaattaattcatttaattagtcgtcattaaattttaattgtttttcggcactcggttgggccgattcgaagtgccgtgaaaatggcattgaatgcacggcagagaattgtcgttctatgcttggtccggcacttttcaacatacgttttccggtttgtcaaacgtggaatttgcgaaggatattgataaaaaaagagattaaaaccaagtttaaactcattcaacaacgagtgtcaactttttaaaataattaatttaaataaataaaataaaaatttaatatgctttttcttatattttcagtgcattcaaaatgaaatataattttttaaaaattttattccattttttatccatggagaatattggcacaaattaaaaggaaatggggaagcactgatcagaattgtttgggctttaacctttttcgatgctccaaaagaaggtgcgaattaactgttaattaatgctaattacaacgatgattaatttccatttagacgaaaattggagttgcaaatgtcctgcaacttttcgaattgtctctcaaaagaacgatgggtcggatttgaagaatgaatttaatgactacttttttgacaacaaaaagaaaatcttgggttcttatttcatttcatttccagtgagtcacaattaaaatttcccttaattgacccaattatggctaattaaggaactgtggacccgagcaaaggcttttacgacaaaagcgaggacaaagtgacattggccatcgatgtgacagtgaaagaagcaaaaaaggagcacaaataccaacataattttgtaaagtaaatgtttcggtttgaaatttacttgacgacatatttttattccgaaagtcattagagtaaatgttctcacattttgatggcttattttatttgagattcaataaatttatccctggctcatttactcaagcccggccctgattcgatgacaccgacatttccaaccccaacgtaaacctaaaacgctgctcgctttgaccaatgttggcaaattatattagcaaaattaaagatttgtttttcctacttttataaatcttatagtttctcgaaaattacaataatcatcccgtgaccaatcatcgggcctaaatgaaatacttttaattttttttaaacatattgattttactgttttgaccagaggattaaatctcaattgaattggtggattatctttatccacaatttttatttgaacaaaaatgctaagccaaaacttgaggaaaattaacggttcaaacttggcaaaaaggctacacggataattctgtcacttgcacatttttctcagctatttttttatttgctaaaataaaaataatatttaaaaaaacggaagataagcaaatccaattcaaattctttacaccccctcctccagactctctgagaaggggtgggcggaagtttgggcactaaattaaggattttcattctataaaatgccttacatatgtatgtattatttgtatcattacaaggctcagtatgttcaaaatttaaaatttataaatttaaatagtattagacgggtctcttgtcatttcaggcccaactaagccggtatcagggtctaagtccaaacagaaaccagtacatgtttaattctacgtttaaacaaccgtaagaattgactaaattacaagattgccaggtttccatataaaatttttttaattttcgagaacatagaaatttttgagcacaaatgttgttaaatttactaaattttaatgatttatataacattttatatatttatattgttttatttttttgaaatccctccctctggtgcccaaacttcccggtgcccaaatttttggtgcccaaacttcatgtcgccctgagaaggggtcccccatctcggtaggggtcaactccgtcccgccaactccgtcccagacaagtttaagaatccatacttttttctcagttgaccaaacataacaacatataaatcattcgaaagctcttggtgtttaggaagatatttctaagctacttctaatctattaagcggcttacaattttcgctcgaaacccgcaaaaaaggcaaaattttctaagttttttacctcaacttttttttacagttcgacattctctgtaattattagtaggctaatagagcctgtgaagagctttcgaatgatatcaaaaattgttggattcggtcaacaatttaaaaagttacgctgctcaaaacttggctgggacggagttggcccgttccgccccaatcttgggtgtcaagccccccccccgcccccttattttttttttgtatgccctgcgtttccggtaagtccctatcctaattttcaaaaaaaattaacattttccattaaatcactagggatgctaatcttatgtaacaaaatttgcgaattatgtaaataaaatatgtataaaaaatgctaaaatatgtatgaaatatgtacaaaaacccccaaatatgtactaaaatatgtaaataaaatttttttaatggttattttttggaaaaaaattcttcgtaaaaagtgaaataggcacaaaatgccataaaaatgaccaaaataggcttagaatcacatttgaacattttacagattaatttttgatatatcattttttgaaaaaaatcgatttttttggatacattttcaaaaaaaaattttaaattttttacaaaaaatttctataaattctcaaaaatcctcaaaatatgtaaaaaaatgaaaaatatgtacgaaaaattgcgaaatatgtacgaaaaagtccaaaatatgtataaaaatatgtacatatgtaatatgtagaaaaatccgaaaatatgtaaataaaagtcccaacttttgttcgcaaacacaaaaaagaaagtgattttcctactaattaggttatggagaatctaggaaaaaatatgtatttacataaaattagcatccctataaatcaccaattatgataataaaatttattaaatgcattcccactgactcagcaccatccatcccatttttctccactcggttttagaattggcggaatcactttattaaccaaaaataaaataaaagtgaacaaaataaaacgaaaaagcattctttttaaatatttgtattttcaaaaacttcaaaaacttccaaaatgcaccagtctctgccattgtttctgccgcttttcatcttcttcgtctacgcgaccgattgtctcaacggtatgaaattttgatttaaaaatttgtgaaaaaccttggacaagaaaaaaattcggaatatcgctttttgtcgttgtatagggacagttaccgtaattgctaaaatgtttttagcaaattattagttaattaaaat

SEQ ID NO: 10097 - DNA, 1240 bp, Heterodera glycines
tttcacttgggaaagatgaaacgattgataaaaaatgttatcttaccaattaggtaggtatgttagattgagcggaaaggaaatctgatccaaaaaagtttcgatggtttaagaaaaataaacaaagtgctcactcactcagtaagttgtgataaaatgatcaaaaggtgcaaatgataggaaaatatcagataaacaaaacgtaattaaatggaaataattttaatcgtgtcaaaaaaattggcttcaattttaaaaatttaattcaaagaaacttactataaaaaagcttgcatcgttgagcaggtcggcaaaaagtcgccatcgtttgcaatctgagaaggtttttgaaattgactaatacattaggcgaaactcgagagtcttgagtgagtacaattaataatggcattttacaccgtcattccatttttggtaaaatgaattgtttatttgccaaatatttttaataaaaaatattttataaataattagatgatgcaaaaaaattaaattatatttaattatataaatatttattatagaaattctttttattaaatagaatgaaaaataataatttaaataaaaatatattgaataaaatataattaattaattatgtttttaattcctttcaattttatttaagaaagcaacattgaatattttaaaagaattattgttttctttatgatttttaataaaaagtaataaaattgatcaaaatgtcctttatttaaaattttaaattaattattttttttgcatttccaaatttttggctcgccccacccgagtcgagccgagtgcctttggcccaagcgaatgcaatgcgtgccaacatgccgactccgtccttcaaaatccatgtcagtgccgccgccaaaactgtctcaaatttaaatttttcaaaaaaaaatgtttccattttcaaaattgcctcctaccgcttgttcgtttccaacgccgacacctttgagcactgccaatgtggccaaagtgccgttcagagaagaggcaaatgccttcaaaaatgaacaaattttaaaattaaaaaaaattaaaatttctttttaaaacattttttgttgaaaattttggtgtaatttaaattaaagaaacaaataataagggcaaaggtcttgaagagaatattaacccaaaaaaacctaaaaatttcggcaaaattccaaattttccatacaaattttgggtcagtgggggggggggggggggg

SEQ ID NO: 10098 - DNA, 1477 bp, Heterodera glycines
  unsure (1)..(1477): unsure at all n locations
ctcactgaatggacacgtttccgtagagaattctttcggagagccaaacgcttaaatttaaagcctcggtaaatttaaaactcaaattccttagctaggccaaaaaattcttgaaaatttcaagccaaaaaacgacgcttacgtcgccgtcccctcggggtcgagcaaaactgtattcatggaccggttcgccattgtatgtttccacaatgttctgttgttgttgttctatggcttcgacttgtgatgctaatgattttggcattttcaccgcggactatgaaaaaattgaaaaattattttaaaatattaaaattaactcaaaaatttatcttggaggctaatagtttacatgtcttcagttcattttatttaaattcgatgagaaattaaaaagcattgaattttgtgccaagattacccttcccattttagaatttccacttttgtattttatgaatgggacgattttatttttaaaaattagaaataaatcctagggctccgggactattaaaaagcgattatttttcatttttattttaatttttccttatattggtagaggaaaactgtgaacattttcgttaaaagaattctttattgtgagatccgtccctttggggttaaaatttttgctaaattttccaactgtttaaatattgcaaaaataaataaataaaaaaataaataaataatgaatattttcaatttttattttgcaccaaatcctaatgaaaaggatcaattaaatatttgccactttcatcatcatcatcatcatccattagaaggaaacaatttttgctccccgttttcccctactaagagagtgtggtttaaaaaaaggaagaaaaaattaatttaaaaaaaaattcaatatttttgtcgaataatttaaaaaatataataggagactaatagagaaaggatagaataattcgaaaattgacttttatcaatattttacaaattaatatttatcccaaaaaattccggttttttctcatttaatcgggtttaatcatggccaaagttttgttgtttatgcgaaaatttaaaatttaagaaacacattttctagggctaaaaaatgcactgatcacgaagttgagaaactcaaattctgtaaaatcattaattttttcgatgatttttcatcagatagttgatttttttccaaaaattttagtttttctaaaaatttattgctggtaaaacccatagtatagaactcacaaatagtttgagaatgagctgtttatgaatgaaaaattaaatttttagttattttaatgattttttttaaagttcttatagtcataatgcnggngtctggngttcgaatccgcttggctgcgaactacttttctaccttttaaactgaactcatcaacttgtatgtatttccaataaataagttcgcagttcagcatattggcagcaaaattccagttgatttaaattgcgaaaaaaa

SEQ ID NO: 10099 - DNA, 2898 bp, Heterodera glycines
ttaattaaggccttttagctgcttgttgtcatttatgtaaaatttcaatttattaagtgaggaggagctgcgacattttaataaataaaattttagccatataataattaaggcaactgacaaatgaggctgggattttaattataaacttttcaaaaaaattatgtgtttaaaaaaattttttttaaagattacgtgtcaaaattattattttttatgtgcgaaattggcggtaattgttgcaaagtcgggaaggatttcttttgctttgcaaattttaattttcccgacacggctgaatgtacaaaaattgctttaaaagaaattacaatatttctgcttttcttcaatgttgcaatttttcaacccccaaaagctgacgtaggcatacgaaagatatttttctttcatttttagtgtttgccaatattaaagctttaattttcttaactaataagcttttcgataattaagagagctcggctctggttcagattatgtgtccaaacaattacaatcctcagtttcttaggccataactttttttctttttggcttacattcttggtgccaatcaaagcttaaactcactagaattatgaatacagcaaagttacaaataaacacgaatttcaggctttttcgagtagctatatttacgaattatttttcgtctctttttttattaacccataatttgtcattaattgaacgcataaactaacaacagattgctagtgtatatacataaaataaatatggacaacaattcgcctggtccctcaaataatgtcaacccggaaaacaaaattgggaaaaccaatgttggtggaccattgtcagacatcgacttgttcaaagtttgttcaatttgaatttgtttattggcatattaattacccctactacctaagttttgattttccaggagatttgtggcattgacgaaccaactgcttccgcgttgttgagggagtcgggcggggacctcgaggccgcgattcaccaatttttcttcgtatttttttttgttgcctatttttgaaaattgacgaaccaattttctttagacccgcgagaatcccgaagttctccagaaccaggacaacgaagtgcaggagcttaggaggcgtgcaattggtgacagggcacggaataatcagcagaagtgcgtttgtttgtttcttgttttggcacttttgctgttgggggaacaccgaaaaatgccaaaaggttgggggacccttatggactgatttttaaaaaaagttttggactcatttggtcactgcagaacagagaaattactaaaacttgttctcggctgtatgtttttggggccaaaatcaggacagttccaggatgttgcgttggagggtgacgccctaggcaacgacccttttttgcggcgcgctttctacaaaatttttggaaatggggaaaatttaaaaaattttctcgtgtttgttaacggattttcaccttaaaatgaccaattttgggacttacaattagagctattttttgtgggttttccgaaaatatcgaattttttttttttaaatttgggttgtggaggtcttggaggggctatcactaaagaaaattggacgttttgaacccagcagaaaatactatttatccctaaccgtttgctatgtttagccaatctcttccggtggtttcggcacctccgaatgccccgctcatttcgtggtctcaatgggttcgtggcattttcctcatcccgtttcgctacctttacacaacggcaatggacgtgttcttcttcgtttgtacgtttgcaacttcacttttaatttaataccaccgatatttagttgatttcttctttggagggcggccgccaagacgtccaatcaccggaaataatcgtcaaaagtgagcaccaagcttaatttcttataattaaactgggtatttttgagacacaaaaattattatctgtcagtgttcattcgttaagttaaaaaacggcagtgttttaaaaatgaaagctaattttttttttgtagattttaaaagacgcaaaagtaaatttgggttctattgcactttatgagtccaaattcggagtttaaacaagttaaaatattcataaaacaaatttcgtatcgaaaaaatgatgaattaagcaactgttacataacatactgaatttgttgttgtcctttcagcaatgccaatccactggcacgagggcagcaggacgttttggcggatagaatgtgaaaaatgattgttttttccatatttttcgcaatttaattcaaaaattgcttccttttttcagcataatgcgtgaacaacaacaggcgtatgagcaggcgctggccattgacaagcaaaaagcggagcaactcaaaatggaaaagcaacgggcgcaggcggaggcggacaaagtgaacaacaggaaggcatttttggcacgaaaacggggcgaagtggcggcaaacattggcaaaacggcggcggaaacgaatggcaccggcggcggcactgtggcggaggagaagggcgaggatttggtgcgcattcggctcgtgtttccgagttctgcccgcatggaacagaactttcgccactccgacagtctcgaggtatgtttttttgtgtgtagttcgacgacagaagcagtccaacagctggttattctcattggagagcgcagttcgtttacccattcctccaaaaaaaaaattttttaattttcaagcttagaaattaacaaaaaaaaactagaaaattgcatcaagaaaaaagattatttctatctttcaagcgttttatgatgaattgaaaagtttttcacaaaaattgttacaaaaaatcgataaaaacttttttgaaaaatttttttttcttaaaattttataa

SEQ ID NO: 10100 - DNA, 3083 bp, Heterodera glycines
gaaaggcgtcgtctttgagttgcgcccgcgtctccccttgtttctctccttgtttattctccaagtgcatttttcgctggtaaaattgtaattttaataaaaaagcgcaaataaatttaatttttgtttcggcagctttgtccgatgagtattttatggagaaaagcggtatatgcgccgaattttgttgggtccgtagtctgtgcagcttttttagggttttgccaaatccgcgtttattattttccactcattaaaattgaaaaacatttcgccagaaattaaaaaacacgaattagaatttcgggacctaaaattttggcaaaaccgggaccggtacttgctggtaaaaaaagcgggaccgggaaccgggaccaaaatcagaaaatttcaaaaactttaatcattcgagatttagaaatcaaatgaaaaaaacaaacataactttaaaaaaaattttttactattttttcttaaaattttctaaaagtctaggaaatatttggttttttttggtggcaccttatttgttaaggtttttttttgatacttaaaactttcgaataaacaaattaaacctaaaactttttatcaagaaaaaaaatgaaattttgattcttaggggtgtattttctgaaattttttcaagtcatttcttaggggtatattttcccgattttatttgttatttatgcttaatatatcggaactagtgcgcagaaaaaaggcatatgcctcaaaagtcggtctctctctatttattggcgattagactaattttttatctacatatttattggtttttattggtttttattatttaaattgcaatccctcctaattattttcaaaatttagacatgagaaccctgccttattttatcattttcattacttcacgtgaaaaattgttggcaaaaatggcggaagtaaatagaaacaaggatattgttggctttttattaattctgatatataaattaaagaatttttagctcagtctttatattattttattattactaaaaaagaaaattaaaaatgtttaaatttcttattttcaatttgttattgcttggaacacgaatttttcaagaaacaaaatgtcaaaaaggttatttttaaaaaataaatgtttatacatacttaacggggatggcattacgaggcgaccccaaaaattttaggaaatcggaatttctattcccaaaaatgtcggaaatctgaaattttgaattaaaaaaataatagaaattttctaaatattttaattactaggttttaaactaaaccaaaaattaaaaagtaattttctcaccagaatattttttatgtcaatcaatttacattgtttaaaatattattgggaaagtgactatttacattgacgccatttttaaaggcccgcgttttttttaaattttgggaacgaacataagcgtagtccggtgggtgctggggaaatttttttaaaagtttatgcgatttaaacagaattatacaaaaactgctaattttgagattttgggctaattttttaggaaaaaacaaggagtttttggggtccggcgggccgacaggcgctgaaaaactaattatttcgtaattaaaaaaaatcattccgaattggtaaaaaattaataaaaaataaatttccgattttttattaaaaattccggaaaccgaaatctgacctccaatttttttcgggaattccatgcagtccctaatacttatcatttttaagtgtatccaaaatttaagttttcaaaatttcaaagataataaaggcacccagacttattattaaaatatttgatttagctaaattatattgaatgcttattaaaatatacaaaatttaagccacttaattttcaatttttaaactgctttttcgtcttaataaatttaaactccgcttcttctaatttagatttgattatgacggaaaagaaactgttgagcacagctccgagcgtattcttccaatctgatgaatttttgtttgaaaaatggttccaaaattatatttttggcattttatgcgccgaagaatccgaacgaaaaattacaccggaaaattatttttacaatttttatgaaaaagctcaaaaattgcggaaagatttctgttggacaatgaaaaatggacaaagcgtggaaaaagcaacagaaaaatttggaaagaatgcaagaaaattaataaaagagttggaaaatgaccaaaaaataaaacaaagtattcaaaaagcgatgaaaaataaaaatatcaaaaaattaaatgaagccgaaataatttcggtgataaaagaatttgaagcaaattcagcggaagaaaacaaaaaccaaattaactcattagtcgtccaatgggtttatttggcgttgaacggactgtggaaagcaatctaactcttctctcttcatgatgcgcgcagataggaaagtatcccccggaaaaagtgggataaagcacatgggataaccctcaaaaagaaagcggcaaaagctcagtcgtttcgagcaataccatggtatggaaaggccgtgggttcgagtcccaccaggcgagtcaccttttatcttctacaactctccctctctcactccttttctcttgtgcaaaaaaaagagttggtactttttggttttgttcctacacctcaaaattttaaatgcaacaagacgacaaatgtcccgggcgcaatgtcatgtaacctttgatcgctatgctaatttagggtcactgtgagtttgtgcgctcacgtttgggtgctcacgtttgggcgccaacatgtttttccacgaaagctttctataacttttttcaatgtcatccaaatccaacatttttgatatcattcgaaagcttaacatgtttagaagctttttctaagctactgcttcacgattagacaattaccaaaaaagttatacactgaaaattgcaaaaagtcgaaatttttgaagttttttcttaataaaattttttctaggctcgaaaatcctttcgatttggaaaggctaatagagcatgttaagagctttcgaatgataccaagaatgttggatttggatgc

SEQ ID NO: 10101 - DNA, 2381 bp, Heterodera glycines
gagcatgttaagagctttcgaatgataccaagattgttggatttggatgccaaagaaaaaagctttcgtggaaaaacatgctggcgcccaaaacgaggcgccccaaacgtgagcgcccaaacgtgagcgctcaaacgcgcgcgcccaaacgggtgggtcccgctaatttatgctatgagaatggtacaaaaatgtccctccagcgcgccatttgttgacatttcttaacattttgaagtgtatgaacaaaaccgaaaagtgccaaagatatttatagccaaataattttgcatttagcagttgaacaaagcccaaatgggacgacggcgggtggaaaagtgaagcgcgaggagccgcgcctttggctgagcaaaaactgtgttttgcttttgctcggctcccttttttccgtcgcttccggcctttatctgatgcatctttttttccgcagttcctccgctttgatttggatcagtatcagcttcaattcccttctgtttgttgtccaagtgatcacattcacgcggaaatgtacaaatttcgaaaatttattccaattttccgatgaaatggaagtgctgcgttttgtcaataattaagtcaattaggcaccaaatattctcatcattcattcgtcaattttttcataatttgccaaattgtagcagacatttagtctactattgttgtttatgcagtagaaaataaagcatttcacataatcaaagaaaatgttttattttttaattatttttctgcctattttcgcagaaagtccaaaaaaattcattttcatcgaacaattcacgaattagagcgatttattagcagtagaaaatattttttgagtttaatactgtcacatattttgcttatagccggaacccgtcagttggtcccatcgtggtgcgacttttggggatttgcaacttggggacccgacgagtgaaaccatgaattattttatatgttgtaagaatatcaaacttttttcgtcgtttttcaagagttggtaatttaaaaagttcaagcctttgtccatatggattatatggcaaattacattttcttaaagctatacgagtaaagtacttttgcatttttcaattttattaatgtgaatttttaactgagggttccatgcctcaggggcatattcaagaagaggacggatatacgagataaaaatgtttttccatattgaaattctttttgacttaataatccgaaataaaaatcgcattctaccgtaagcatttctagttacggtatttatatgttcagtaaatttaagtttattgtcgataagaatacccaggtctcgaatggtgtccacttcacaaattgtgttgttatttattttatattgttctctagggttattttttcccaagtacaaaacaaaggttttgttaatagagatgtcgatacaccattcattagaccaattggacaattgcctcagagcttcgtgcattatcactctgtcagttttagttctatgtattgaatacaatttgacatcatctgcataaagtttgataaaaattcctttcggaattttcttaggtaaatcattaatataaataagaaacaaaataggtcctagaacagagccctgggggacgccagagcacattttgtattcagaagaaaacgaattttcaacacgaactaaaaaggagcgattggccaaaaaatcagaaatccaattaaggattttacctctaatgccaattttatgaaccttatataaaagtaagctatggggaataacatcaaaagctttacgaaaatcaatataaacacagtcaatattttttccattgtaaataccgtcaaaccaattttcaagagttaaaataagttgggtaacagtagaacgacctttaacaaacccaaattggtgtactgagattaggtcatgttttaaaaggaaactagtaattgccctgacaacaaatttttcaaaaattttacacagtgaacatgtgagggcaattggtctatagttggtgagacaacttttatccccttttttaaagagaggaattattattgattttttccaaaaggtcggtaattttccggtatcaaatgagattctgaaaagttcggtaacataaggtgcaaaagaaaggaaacaatttttttattaacctgaaatttataccatccggtgaagtattatttttatttggtaaagatttaaggacccggccaacatcaacaacattaaattcaatatcattaattacaggagagtgactagataaatcaaaaggtaaagacttagaattatgtaaataatgttcagaaaaaatttttgcaaaaatttcagctttttgatcaggagaaaaaataactgaattatcataatt

SEQ ID NO: 10102 - DNA, 4162 bp, Heterodera glycines
aaaaaattaggttaaaacctaaaaattataagccctagtaataaggatttagcaattcatatttatagtatgttaatttaaaagagatttagtaaaactaacaagcaatataatttattttaataaaaattatttgtttttatgtttactgtcgaaaagtccactattttttgtgtttctgtcgaaaagtcctttactgtcgaaatgtcctttgctgtcgaaaagtccttctgtcgaaaagtcctctgtcgaaaagtccgggagccttttgaaatgcccaattccttcacaaattctttctgtttgcgttggttagccgacttttgcgccgcagacatttgcgccgcgaaacttgcgccgctcagcaaaaaagacttttgcgccgcggacatttgcgccgtgccatttgcgccgcgacacttgcgccgcctaacaaaaacgacatttgcaccgcgacatttgcgccgtacagcgaaaaaagacatttgcgctctgattaaaataaatttatgtgctttatagaataagaattgatagatattcattattaattcctttttcgaagcctttcatgtcaattccatattgaagtgcacgtaatgattgatcaaattttaagcgaaaaaaataggtaaataaataagggcataaaaattgcgaaataatgcgaaaaatggtaaaataggagcgaaaatttgaaaatcagtgcgttttttcaatgaaatgaaattaaaatctatgaaaataacttattgagaaaattaattacaaaggaattgaatttcattcttttttcgaagcaaaaaaataattggggtttctacagaaaattctttttttcagttttttgttagtttgtattcttaatcattttttcatatctttgatgaacctattcaatgttaagattttaatggttaaaaaattgaatgtcaatctttgtgactagtaattttttcgaattttcaattagttatttttgtctatggcttatagttttagtaaaacttattgataatagtggaatttttatgaatataatatttttgacagcgcggcgcaaaagtccatttttgctgggcggcgcaaatttcgcggcgcaaatggagcggcgcaaatatccgcggcgcaactgtctgcggcgcaaatggcgcggcgcaagtgtcgactttgctgagcggcgcaagtgtccacttttgctgtgcggcccaaatggcgcggcgcaaatgtctcatcacgcataaaaactaggtacgtaaaactactgtggacgcgtaaaaattaatgtgacgagcaaaatattttgacacgtgaaacccgtgggtcgcgtaaagacaacaggatatgtaaaaatcgcgggtcgcgtaaaaattatgtgacgtgtatgtacacgtgaaaacggtggtcgcgtaaaaactatgggacacggtgtttatattacgtttaaatattttattgacacgtaaaaacggtgggacgcgtaaaattacgggacacggaaaaagcgtaggacgcttaaaattttgtgggacgtgatggataaaaaaaattgtgacgcctaaaaactttatggagtcgtaacactgtgggacgtaaaatctatgggacacgtaaaaatttttcgagacgtgtaacctatagacgcgtaaatatttaggtgacgtgtaaaacaatggaacgtaaaatttatgtgaaatgtaaaatttcagtagcgtaaaacataaggaactcataaaaatttatgggacgtgtaaattttttgaacacgtaaaatagtgggacttaatttttttataaaaataatatgaaatttataaacacgtaatcattatacttgtaaaaattttataggacatgcagattggggcgtgtaaaatttttgggcgcgtaaaaaatggaacgcgtaaaaatttatgagacgtgtaacaacttataggatatgtaaaattttatgtaagcgtaaaaaaattggacgcaacgtaaaagttctagggaacgcttattcagcatagatcatattttaaaatcttctataaatctattttttaatcatttttctcaagcatccgctcgtcgaaaaataagtgaggactacaaggaaattcaactaccgtctccggtgtttctggatgatcaggaccaaacgttgtgggacaaacgggcggccaagaagcgattgttgttccaccattcgtcgttggatgtgccggccatgggaagcattgacacggcacacgacgatttggcacaccgctacgaagacatggattccgaggcagaattggccattcaggaggagccgcctcgttacatcaacgacgaggaagcggaagactttgaggagatgatcaagttggtggcacgaaaaatgccgaaaatggaatttttgcaagttcgaaagtgattgaaattcgaactcaaggccacaacttcaggtttaaggcgaatcgaattccgaccaaaaattcggaaagaggaattggaaaatttcgaggattaaaaaaaattcaaaattccaaataaaatgtcgcaaaaatcggaatttcggtgcccaaatattttttccgcatattgaaaattgcaatttttctgatccaactgttccgatattttatttagaacaaattgaaagacagtgaaaaaaacaattaagggctgctcgaccgccaattgatgcgttcagcaacccaattcttcttcgtgacgcagacccattgacaacgcgcaaaaagttgacaaaacgcggcagcggtaaaggcagtgccgcgtctggtggtggcggtggatcaacactgttgcgccaacacagcaaaagccgcttgaaaaagttgagcgaacagtcggactcacgaacaccgtcaggtggtgccacatttgatagtgacgatgactgattgatgagatgataaagccaaaattcacacaaaggaccagaatgggcaggcggcacacacaagcaataaagggcacaataattaattaattgcctaattaccagattaatgaatattttaattaattaacgcaagcattcgtttttaattttgtttttacgataaataaaatactcagaataactttttaaaacctctactaaatttattactggttacggattatggaaattatggcattttgagcccacttaattacggattttggttattgaaaatcctagttacgctcatttctaatacataaatatttttgaattacataatattgtgtcagaaacccgtttccacttgaatctaaaattacgacaaccaataaaaaaaattgattttcccattttaatatattcttcagtaaattcttttgaaatgagttaatcaaattaaaaattttgaaattttatttaaattaaatttgcctttgtcacgtgccgctggttttctgtgaacgcgggatataataatgaatgaattcacaaatttttgcataaattttgacaaattttcatgtgcctccttttttaagtaacctgcactaatgatgattatgatgatggggcagataattcaagcattggtaagaagtttttttattaaaaaaatttttaagatttcaaataatttaaaaaacttttactagggatcgaaatttgaaaatgcctggatttgggtttcatgtttgtcatggacctttttctagataatccagcaaaatccaggtcaaggatttgtaaaatgaagaagagttaattaaattattaaatagctagaaatccttgcagaaatccttgcaattttattacagattttgtcagtatagtggatttaaaatttaagtttttagctgacgccaccgaaatgctggccgaactgtccgccatggtggccaaatcgacggcccattccggcgccaccagtccagcaaacattctccagtttattgaggagcaaaaacagaaagcgtcaagccaagcagttgctggagaacaaccatgaagcacaaaaaatgatttttttaaattccccaggcttaacatttttttttttataaataaggcgatgaaaagtttaatgctcgcaatattagggtaattttaattaattaattttaaaatttaattaaatatgatagcacataagatgttcatcttcgatggcaaagacaaagtgcttggaaattttgattgttcttgaaaattaaaaagcga

SEQ ID NO: 10103 - DNA, 2044 bp, Heterodera glycines
  unsure (1)..(2044): unsure at all n locations
tgtttaatttttgactttttnaatattacctctatcttaaataaaatgaaaaatttaaattttgaaaaatttaaaattgaataaattttttattatattttttacactacaaaataactgtaccatataattaaatgtgagcccacaaaagcggcatttgtaataagtaaagccattctcatccttgcacgaatttgtccgcactttctgttcttctgttgccgccggcttttcctccttttgatcaggcttaaaatgtgaaaataattaaaaatttattagatttcaattttttcaaattttcgttacagtataccactaaccacagtatcgtcccattttagactccgttgtgcagcaatgtttgagctggttacaacagtgccatcatcatcttcttcatcagcagcagcagcagcagcacaacctttcactgttatgccttcattttgttgttgtccatcagaaatggcagttttctaaaaatgtaaatttcaaataattttaattaaaataaatatattttaaaataatataaaattaattattatttttactgatatttcatatttttcaattaaatacttaattaatttttaaaaataatattatataattattttgtcactgacatcttcataatatttaaattaatatgtaatatttatttattatattgttttttcactgacatcttcacttttatcaccaccaatttgtcccttttcctcattttcagcttttgcctgatcctcattttccaactttgctgcttttacattttcaatgttgctaatcacatcctccttggcctcaattaatgtgattggttcagttttcttttctctggacgcctaaaatattttaaaaaacttatttgggtttttaatagtaaattcttaccgttgtgtttaattcatcatccatttattaactgagtagaaataaaactgttcgtatttggccaacagaaatatttattaaaacggattaataaatagcaataataaatacataaaaatgaggaaataaaatattcgcaaaaattacatttaaattctggtcagttcctggtttggacattttaaaaactttagtctccgttcttgcttatccctgcacagcaacggctgagctgactaataatgctaaatggccatcccaaatcgttttcttgccgacgggggagggcgggggcggcgatcgatcacttctccgatcgattaagagcaggaaaatagtggattttggatgatttattcaaccggataagccggcgaatgttaactttacactgacccagccaactcagctttatccactcttaaaattgaacatatgtcacacattgaatactcaaatgcgagataaactataacaacaaatttatttataaaaaatgaaaatagcattttagtcggaaaagaaatttacggaaaattatttctttgaagcacttaaccaaccctactccttttactaattaagtggctcttttccaatgattttaaaaattgttttgtttattttttctgagttttctgagcacttgaaaatttttatgagataaaaagttgttgagagttcctacagcggattctttttttttggttgaagatgttgagcaaagctctcaatagctgctgatgattgacttgcacgagataatgagggcttacagaaagaaaaaacaatcgttaatgacccgaaaacctaaaattacaggactaaaagccgagaggaaaacacccatcataagagaaacaaaaagaccgaagaaggcccaatgttttttttttttgaaaattagtaggcttatagagtaattaggggaaaataaatttttttttaaatttgacactttatagtctaggcacataacatttttgtaaatgcactttttctgctatgcctataggtaatcggagaccttttggctcatgccaaaatgttcaaaagtacgggcccgggccgtttggccgccgctagaaatttcttgttgccacacgacaaacgacgaattatttgctccccatctgtcccc

SEQ ID NO: 10104 - DNA, 1064 bp, Heterodera glycines
tacaagcaaatcgaacgcaacaattttacaaaattctctgctaggagaagggaaatcccaactgccaaaagtgaaaactatagtaagacccaaaatacagtttactgtttcgaatcataccatttcacatactaccaaattaccgaaagtaccaaaaacaaatttcaaatcaactgtaaaaccaacccaaaaaataaaactcaagggggaaatttcaacgcctaaaccaatttcagtaacggaaatgccaaaaataacacttactccaaatgttacagtaacacctactgtaaacattacggtacaattttcggagaaggcaattttttcaaacaaaaattctgaaaatgaggttaagataattacgccaaaaaatataaatgaaaaatttgaaaatgggactaccgaaaacattttgacaacgaaaatgaaaaatgacaagggattggaaatttcggaaaaattggagcaaaaccaagaaattgtgcataagtttttgggaatagaatctgaatcgttagaggatgagagtgatgaatatgatggaacaaatgaatatgaaaaggatgaagcgagctatgaatatgaaaacagagggattttgtctgatattttggaaatggacagaaaaaagagaacaacagtgactacaccggacgcgcgatgggttaaaaaagtggagaaaagcaaattaagaaaaagtggaggacaggagaataaaaatacaaacacaagagtgaattatgctctttataagttgaatgaggaccgaaaacggcaatatgatcaaatttttacccaggcttgcgaaaattcaaaatttcagctccaattggccaaagccattttacaaattagtccaaatgagggagtaagacggatatttaatcgggatgatttggtggccaaatggaagggagaaaaacttgaggtcggattttgcgctccgattattcctgaaaaaataatttgggacaaaaaaatcggaaaagaatgctttgaatgggtaccaatattgccgaaataacactttttttataaaacctggaactcgagagctaagc

SEQ ID NO: 10105 - DNA, 4909 bp, Heterodera glycines
tgtaacacagaaagggattattcaggaattgacaaaaaagtttgacaaaattaaaccaaagtacaggaatattcaaaatcctttggtacttaaggcaggtgcattatttgagtccgacagtattagagtggaagaagccatgatggagtaccgtaaaagaattaacaatttacccgcctcaacttttcgagtggtcaaaaggcccaacatttcggaagtcataaagctaattaaggcagaagcaaaggaaacacttgggatagtaatgggaaacaccggaaatttgctggatttaatgagaaacattcccgaaaaggcgaaggaagcagttaattatttaaaaggaatgtcatttttattggtgattttgcctattttggtactgattgcaatcattggttttattgtgaccaaatattggcccattatttatgccggatttcgggctgggtcggtggcaacacgagtcattcgccgaattattgggatgaaaagacacagaacaagggtagcggcagtgccaacggcaccggaattagcagatttaaattccgtagacgaagaggcttatgttttggactatttaccacctagaaggattgcagcaattacaaatgacccgagaaggcttccatcgattcgcgtgcattttaatgggctattaaccgctgctttggttgactcttgcgcaagtgtttcttattgtcgggagtccattgcccgtaaggcagggctcacaattaatgatttaaatggggaaaatgcaaatttaactgcagcaaatgactcacggattcaaattttgggtaaagcaaacacaaaaatacggattgaggaccaaaatggaaaatgtggtgaatgggaaataacggtacttgtctctcctgataaacattgtcctggcccagttcttttgggtctaccgattttaacagatttaaaaggagtgatcgcattcagtgaacggaaagtacgattgggcgaaatctgggcaaatataatttccgttgtcgaagcagaaaagccaaaaaatgtgaaaataacattggaaaatgatgaaatttttgaaccaaggactgaaaatgtaattacagcaaaagtaaatgaatctttttctccggatcaaaattttttggtaaagggaacaataaatcgatacccgagtataattgtcgggagaactttggttgcacccggggacaaaaattttgttacattgcaaataatgaatgcgggaaaaatgccggtgaaaatttacggcgggtcgcatctcgctgatttggaattggtacggataaaggctttacctggggacgaaattcatccgaaagattatataccatccgaaacgagatggcatgaaaaactcccaaatttgccaaatatggccataaatcgattaccatcagagagattaaatttggaaggcacaagattaagtggggaaacacaagaaaagctcaaggaaattgttgacaaatatagggaggcttttgtggcagacgatggaaaaattggactttaccggggaccgatcgcacataaaatcgatttaatgccagggtcattgccttttcactttcgtccttatcggtatccgcctgaaacccagaaggaaattgaaaggcaaataaaaataatgttggatcagaacataataagggaaagtgagtctgaattcgcatctccgatcgtgatggtcccaaaagcggacaaaaaatcctggcgttttgctattgattatcgagcattaaataaaatgactaaaaaacgggtttttcatttaccaaatatacaagaacttttggatttaatgggggcaaaaaagtattacacatgcatggatatgcaacaaggctttatgcaaattccaatggcacccgaagatatcgaaaaaacggcatttatttcacatttggggatttacgaatttattatgatgccgtttgggctaacagccgcaccggacaccttccaaagagtcatgaattcattaagaagacggctaacggcagctatgcttatttatctggatgacattataattgggagtgagacggaggaaatacatttattggacattgaaaatttccttaagttattaagagaagttggattcaaattaaaaattgaaaaatgtcactggggaatggctgaaatacgatatttgggctttttactaagcgaaaaaggcgtgagaatggacccaaaacaagtctcagctgcaaattttaacacaagacaaatttgaagggaaaataaaagaaaattggggaaaagaacaaaatgaatctttggagaccttaaaaagtatgttaacatccgcgcctgttttacaatcaccccgatttggcaaaaccttcaccattgaatgcgatgcctctcgaaaggcaatcggagcagttttgcttcagaaaaatgggcctgtggcattcatttctcgtgctctgaatagacacgaggccaattacccgtctatcgaaagagaggcacttgcacttgtttattcggtcaaagaattctcaccctacattattgggtcagggataacaaaaattattacggattgtagtgcgctgacaggcatgatgaatgcaaaagaattaaaagggagactagaaaagtaccaggtcaccctccagggtttcgatcttgagataatataccgcccaggcaaaaaaaataaggcagcagattttctttcaagatacaatattccgggaattttggaggaaaatgatgaaaatggggaccaaattgaaaaaccaaaaaagggaattaatgccttgaaggcactgaaaacaaatccgaatcagaccgctgaaaacgaaaaatcggaattaagaatttcaatgttcgaaataatgaaagagcagagaaaagtgcgggaaattgcaaaaatattttatattttaagaacgggtaaatgctctgacgacgattcaaaatggcgaaaaataattcaaaattattgcttggtaaatgaactaatttattataaaaatggaaaagaaaacgacggaagcccaaaattacttattccttactcactaagaaaacaaatttttgatttaattcacaatgagggacattttgggtttgaaaaaacatttcatgaaataaaggaaagattccattggaatggaatgaaggaagacgtgaaaattttggttgagacttgtgaaaaatgccaaaaacggaaaattttgccagggcaaataaaatcagcaccaggggtcccaattcctccaactgaagctccatttcaacgcgtacattgcgatttaatgggcccgcttaaaaaaacagaaaaaggaaatttatacattttattggccattgacagtttttcaaaatggatgatggcaaaagcgatcccagaccaaaaagcaaacactgtctcagaatcatttattgaaatggtggtccaccaacaatcgacccccgaaatagtcgtaacggatcaaggacgacaattcacgtcagaaatatttaatgatttggcaaaaatttatgggtttgagcaccaaatgtccacaccgtatcaccaacaatcaaatgggcttgccgagggatcaatgcgcataatggctaatataatttcacaattaattaatgaaatggggaataattgggacgaagttttgagtcatgcattatttatttacaacacatccattcattctacaacaaaattttcaccattttacatattacatttgcgccacccgcgcatgccaacagatcgcttacttaaattaccatccaaagatgaattagtttctgaaatttctgtttttacgaggaaccatgtcgaaaaagcctcaaaggcttgggaatcagtaaaagaatcaattataaagtcacaaataatacagaaaaatgagaatgataaaagccgaaaagctgaggaaagggaatttgaaataggagaaatggtacttttaaaaaaggaagtgttaaagcacaaatttgatcaaagatgggtaggtccattacgctgcgttgggattgaaacggataagaaaaatctgattttacaatcattggatgggaaaaacaaatttaagaaagtacaccaggaaaaggtcaaaaaattcaatggtccagcaattctcccactaagagaatcggatgaaccgttaaattgggaaaaatatgtggatgaccccaacgttgaacaggaggaagccgaaatgagtgaagattcgggaaaagaagacaaaaaagggaaagaaatcaaaaagttttcaaaatttggctttgaaagcagtgatgaagaagatcagagcctcaaaattttttttgtaagaaataatgaaaactgggacttaaatgaaaatgagcaaatttgggaacaaaatggggaagccgaagaggaaaatgaaattccgtgcacaacaacagaaatatttttggatggggaaataactttggcatatacaagttggcctgaagccaatttaatctcattaacatcattagttccgacaaatttaataaaagatgactgggaaatacacacaaatgaatttggaaaaagatacattacggcatggctttttgggataagttttgaattatttttgagcgatgagcctgacagggttgtcctaggaattcaggcacaattttcaataaatgacgaatggcactcaaaaactgaaggggaaagggaaacatattgggaacaattgggtgagattgacggacaaatcctcgaaattcagagaattcccgacataaccattacttattccgagaacccattaataattgattatgaatttgatcaaaatgatgatcagaataattcaccgacaattaatgttatttcggaaggggatttattcatgagcatattggacataaatacagaaacagagaaacaaaaagaaaaatgtgcgga

SEQ ID NO: 10106 - DNA, 5253 bp, Heterodera glycines
  unsure (1)..(5253): unsure at all n locations
gtattttctatctgttcaacggcattcacntcgcttcattcatcccatttgaacgtgtccttctcaggcagttggctaaataatgtaaacatttaattattggattaatttagtagaattggtaaccgatcttaaccattttattgaaattttattttgataattaataaaacaatcattaatatttttttaattaaaaaatatttttgttcaaaattgttacagatcgggccacgcaacaacactcatcgccaagccgaatgcaacctaagaaacatgacccatcattgtcacatccgtcaccattaggagtacacgcaccttaatcatttgtcgtcattagaagtttcaatttttatgaaaatgcctattattttggcattttgatttcttcgcgaatcctagaacattatgccaaaaaaattcgccatttttgtacatattttggcgttttcgttactatttcatttacgaaaattgaaactaaaaatcattttgtttcaaaaacgcaaaaatttttattcttttgaattgcatttcgttaaaatttttaacgaaattgaatttcgtttcctatttcttaaaattccccccccccctattcatgtatgcctaaaaatttcattcttgaatcatcctggactattttatttcaatatttttcacctccacattggccatttgccatcatgaacatgttcatggtgatgatggtggccaacaaaatcacggcaaaaatcagtgagaaatttttcattttatttagggttttttggaattaaaaaagcaattaaaatagtaaattagttttagagaaattaggaatgtaaaaagaaagaatttttaccgcttttatatgggaaaattttgcacttttgcttggccggcaacttttggacacagctgttcaaacaaattgttgttcttttcgctggcaatttttaggatgggcattttcaatttttggttttagcaaaaatttggggtttttttaatttgacatattgaaattttcattgggcaaaagactgattaaacaaaaaatggcacataatcgtctggcaccattcaacgtggagagcaaaagtcagaatcaagcaccgcaacaaattgaaacgaaattgaatatcataatcagacattaaaaaaatttattgcgaaatgagtatgcttataaattatatggattaacatattttttctgcgaatatgccatgaagaaagtggctcaaaaataacatttctacgttaaaattttttgatttggtgaaggtttttagtccatataaacccagattttgggggttttcgggaataaatccatatttagacatttttgcatttttagttatattttggccattttttggaaattttcacaagaaaaatgcaaaaaaaaagcgaaaaatacacccctaaaaaagaattttttcgaaatttcgaaatatgaatttgatttgcaattgttaagcttgaatttaataaaaattggcatttttaaatgttaaatccattttttggcagtttttagcgtattttagcaaatattgaatataaatatatttttcggaattttttagggtttaaaagatttattttggcagtttttagtcaatattttggtccatatttggccatttttgagctttttagtccatatttcagtcatttttagtccatattttatgcccaaatttggcgttttttagtccatataatttataaccctagaaatgagtgtcccttttttattaagaagaaataacatatatttttttaattttcttatttttcaaaaaattcattataacttttctaaattctccaccagcatctacccaaaaaatataattgttataagtgaatatggttaccgtagttcctttcccaaagttgttctatgatctgttacggccgcattaccattcccaaaattggaataatatcctttattccgaaggtgtgcacacaattacataatgagtaaatgagggaaaggagcggcccccgattcgtacgggacagatggggagggaaggatcggacgggcacttggcccaatccccccgatcagaatgaatagaacaaaagagaggggaacagattaatgagaagggggggcggggcgagtggggcgagaaaagtcaagagcataggcaataaaatacaatgtaatgacaatcataagtaaagtagagcgctaatcggcaattgtaataaaccggtaccggtaccaactttttccaccggtaccggtaccggtaaaaaccgataattttcaaatgttaataatttttggacgaaatttttcaaatctaaattattcaattccgttttcgtccggcggtgccgataagcgccgccgggaaaaaaatttgcgcttttagccaattttttttttaaaatagcactgtcccaataaaatatgacgaaataaaaaaaaattgtttttaaaatgctaaaatttggcgaaatgttccattttttaaattttccatttccctaaatttacatcaaaaaatttgtgctcagactactcctattcttaccagtgcaagttctaccggcggtcccggttctagacaaaccggtaactgtatatttatttttgaaaaacaggaatcagtaccggtacaaaaaaccggtaattaccggccgtaccggtatcggtaccagtaccgctctaccctagttataaggaacattgttcattaattgtctggcaactttttcatggtgtcattgtcatggcaattggtgccaagtgttgtcactagggatgcaatttttaggctctaaaaactgccaaaataggtaggctttaggctctaaaaaaaaccccaaaaatagggactaaaaatggaaaataggctataaaaatcctcaactttagggtgtaaaatgacaaaattttattcaaaaaggtaaaaaaataagtcaaatcagtattgagttacattatttttttaattcaaaaaatagtccaaaagaatttttttaatgatttttgagaaaatttttcatttcctaggggtttttattttcagaaattttttggtcgatccttagagttgtatttttaaatttcccaaaaaatcgcttcttagggggtgtatttttcgttttattgcatttttgttaacaaattttgggcaaaacgccaaaataggcaaaaaaataggctaattcaaaattttttaggctttttaggtgctaaaaataaaagcctagaaaataggcactaataactcgaaaagtagcttaacaacagcccaaaaaaacatgtttttcgtgcgtttcaggccacggggagcacaggaaaaaataggcttttgcttaaaaattgcatccctagttgtcactacaacaaattgtaaatattttgcttggcatcatgtgtttttttgttgtcttttcaatgaataaaatattataatattattaaatttaaaattcgaaagcattaaaacaaaaagttattaaaaatttacaattaaatgaaaaaacatttaaaaaaattttttttttattaccattggtatgagaagaattatttatttttttaatattaaaaaaataattttttttttgtaactaattttttaatttaatttaattttgattaaaaataataaattccttttgcatttacttttttttgttttccttgaaattttagtttaaaagaaagaccgcacaactcgtctcattaaattctctgctgatggaaagaggtcaaccaacatacgcaagaaagtgcaatcaaatcatttcgcgcactattaattagttaaattgggtattttccacttttaatgtcttatattatttgaacaaaattaagaaatgtttaaacaaatttctaatcaaattaattattcactcgtatttaaaatatgttaattaataaattattaatttattaaactctaattagcatcatgcacagtaatttgtcggtatagaattaaatgagtccataaaataatcaaaaaatttcttggtgccagcctcaatgctatttcatttaaaatttgatagattttgaaattttaatatattaaaaaaaataatttaaaaaatttataattttagcgtggaaaattttaaaatgccagcaacaacatttttcataacaataataacacttgtaatatttagtcatctccattttttggcaaatacgtcatcagttacaaatggcacttctctgctaaatgaaactattggtaaaaaattttggttttattttttctcaaaattaccgtatttttctttacacagtaccaaaattacgaattttgatccttacaacgagaattccaatcaccgagacacattatgtgctacaccgtaaaatggctgaactgcttgcagacgatgcagaacatgtggagaaagtggtatattcaaagaaaaagacttttataatatgatttttaaataaaatgtaaatttataaattaaaaatttttatagtaaaaggcaaatttatcatttgaaaatattattatgaaattgattttcctaataaatttcatttagaaaccaaaatttttcataatttttttaaaaaaatattttcaaaatgttaaattgaaaatttttattttttatcttttataaatctcattaaaaatcaaaatttaatttttcatcggcttcaattgacggcatcaatggatcacaaaaaatctgatattaaatgatatcaactaaacctattctgatataaaaattcagaattttaatcattcagcttttgcttgtcgcaaagcctgattgtgccgagacaagtgaagtgccgtcaaaatttcatggacgattattggtgtggaatcggatgacttttggcacaaatgccgcacaaaatgtggaagaatgccaagaaatggtcaataaaattatgctggacatgcaaacgcgacccaacttatgggagaaaaatggcacacaatttttgccaagtgccgataaaccgtatatgggcaaccttggtaaataaatgggattaatgattttttaattaaaaatgaaataaaggtatgacaaaattaattaaccaccgagtaaatttgtcaacatttctgagctaaatttttatgaaagatcataaatgaaaatcgctgagtaaaatcatctaattagagttaagctaattatttttataaaataataaagaaaaatgtaattgttttttatggtcattttaaatatcagaataaagatgtcagttttttggcggttatttta

SEQ ID NO: 10107 - DNA, 4764 bp, Heterodera glycines
aacaatttcaaggaggtgtggccataatctcgcctttaactgatttttgtttccaaattgtttagcattttcttcgtgccaatgccatttcttccgtcagttaccaaattcattttaatgtgcaagtgccgtcaatacaaatggtgccatttgaattggtgaacgaatggacaaaggaaaagctgacattggccaaagcaatggaaaatgaattggacaacatttggataatgaaacgatgcaaaattattggggagaccgcgacggttcattggaacgacggaaagtgggacaacagttgtaacaatgtgtccatttggctttataatagcgccaataattgcattgggtgagcaattaaaaaaaagtgtttagataattcaaattgcgcttaattaaggccattgtctcctccactggcagaagaagcggcacaaaacatcacaaaggggccgtcttctgacaatgaatgagtggtgggcccagcaaaaacagtggtcaacagaagaagaaatgatttatttaagaatgaccgaccgatcataattcaaatcagtgatcaaatgaaattttatgaagaaaaacctctcaatttcggtaaataaatcggacgtataaaaatggcaaaaaattggactctattgcggttcacaagcccataagcttttttttgcaactttaatgcaccatagctttttcttattaaaaattcttggtatcactcgatagccctaagagaaaaaacggtaatagtaaagctggtgctggggttttcgaggtcgctgatcacgaatccattatccgtttcgctcaatttcgaaccccggactcgaattcgaaccaaaagtcgaaaattcaaatttttcgaattgcactcttttgctcaaattttgtttaagaacacggaaatgaactaaaagtcatcactgcttcagtaaaatggtaatttgaaccatttttagactaacagactatacatttttgattcagtctttttcgattaactgatcaaaaatagaaaaatttttgtatttcgaatttttaatataaatttcagaaattctttaacaaaagcaacaatttttttattgacgcgtgacatttttgggacaccttcaaaatttcaaagtttcgttaaataaattctgttgaaaaataatttctccgtctccattttttcgagttttgaacctgttcaaaaaccgtttttttggcatttccgcaactcgagacatatttttccacggtaggggggggggtcagttgcgtctggccatttgcgtcttagtacttaaggggccagttgcgtctcaaacattttttatagagtaaaatggattaattaagttttctgtatgctatattttcattttcacagatacattgacaagaaatattcaaaaatttatagaaaaaataaaaagttttaacaaaattaacaaagtttcatttacccatttggtaattgctcgaaattcccctgagcatttcaataatcaaatttcggttattttggttttggccatattggtgatcatcgtcgatttgcggctgcgttttttcctcattgtaggctccagaatcctcaaaattcgtctgtccactacacggtaacgctttgctttcagcggcggagcatttccggcgaggaaatgttcgaagtccacgtcgattattttctgatgctcgcgcaaattgtttatgaatttccagatcggtggggtgtccttgtccgatcgaaagttgcagcgtgcaatggtatgcttcggcgaagttatttgtgcggtcggtgccgttcattgtgcgctcatgcacacttcattcttcgggacgaaacaatggaggactgaagcgttagcggcactggcggcagcaattcgatttcatggcggactcgcttcactagcttaaccaaaaatgtgaacgtaaaaaaatgattagattttcacttttttgtggcattctttgttggaatgttcgccattactggcgtggcaatttgctgaagtgtgtgcgtcctggttgccgctggtggttccatcgtctcagttcgccgacaattctcaccgatctcaaccaattggtttcaatcgattcatttggtctgtcgcccgctgcgtttggtgatggttttgatgggccaatttctgctggccaagcattgtccaaatggttgcactctccgagaaaagatggccaacccaagcgattgcgttgcgaagattacaacgcacaagggaacaccaattgggtcaacaatttcaagaaggtgtggccccacattttcgacaaatcagtgcttttgtttccaaattgtttagcattttctccgtgccaatgccatttcttccgtccgctaccaaattcattttgctgttcatccgtcaatgccaatgatgccatttgaatgtgtggtgaacgaatcgacaaaggaaaagctaccactaattgcattgggtgagcaataaaaaggggatttgtttttatacacggcgagtaaattttgcgctccaagtacaattaagttggttttttcgtcttagtggtctgtgagttagtcaaaaaatggggggtcacaggttcaaatcctcctcatgttgtgtgttaattatgtttgcattgggtgagcaattaaaaaaagggatttgatttttatccaaatttgagatttgcgcttaatttaggccattgtctccgccaccggcagaagaaacgggacaaagcatcacaaaagggccgtcttctgctgacaatgaatgacggacaaaagaacaaaacaatggtgattagtggaagaaatgaattaattaagaatgaccgaccgatcataatttatcagtgatcaaatgaaattttatgaagaaaaacctcgcaatttcggtaaataaatcggacgtataaaaatggcaaaaaatgtataaaaacgcacaaaattttgagatttgcacaaaataatgaacaacaaaaaaaacaacttgtttttgtgcgtttcattgcactgggagctcaggaaaaaaatagggcaaaaccctaaaaatataagccctattttcaatacgattgtttgaaatttgccgaaatttcctgagaaattcaatgatttttttaaaaagtcgtgaatgggatttgcggaacaggctatatgctccggctataaattttacagagtttaacaacccacgcataacacaaaaattttggcgctagttacaagaaggacctttttgaaaattttttcacttttttgaaaatttttttttacacaatttgtttttttaccagatggtacgcatttcacgttatttaataattgaaaaaaatttcaaaaaggtattattttagactttagattttgaatttttatcaaaaaccaaaggggggacccttttgttttgcaaaatttttttttgataaaaaatcgtgaatatactttttattcgccataattgtactgttaatgtttaatgttcatattatgagtaaataaaacaaaaattttttcaaaaagggaaaaaaatttcaaaaacgtccttcttgtaactagcgccaaaatttttgctatctatcgatgtatgaatttttccttgaaaagttgtgacaattatttttcgggattttgacgggggatttacgacatccattagcaatattagcaccggcaacattaaagtgtcgatttgctgctgttcctttctcttttctcctcctccttccgtcgaatttttccttttcctctctttctcttccgtctctcctccttcccaaatgctattttcctcctcttcctttgtttctccattcccattaaaatttgtacgaaataaaaaataatttttcaaaaaacgttcgaattcgggttaggggttcgaaactgcgcaaaaagatcaaattcgtactcagtcagcgtctcaaattacccttaaaatgctttatttttggggtttccctcttttttgtgggaccaaatgatcttggcgattgccaaagccatttaaggtataactcgtcgaacaatcaataaactcagcaatttgcacactaatcattttataaaaatttttgcagaaattatcggtctacgtcagttcggccccgcacggttcggccccagccatgtttcggactataactttttttttctttgtcaaccaaatctaacaatttttatatcattcgaaagcccttcagatcagggctggagcgcgatcgcgatgcgcgatccacggcgtttttttttgcgcgatccgcggtcgcggcaatttgaatgcgcggtgcgcggccgcggttttttctgtgcgcgctccagccctggtgtaaacgtagttttatatattatttgttttaatcttttaatttagccccaaaaatggaaaacaatcaaattataacgaaacaaaacaacaaaaactcgaacatgaaggatgcctctatgtcttccatatgttcaatgctgaccgtgacgtaaaattttggcgctgtgaacatcagcgtgatgaattcaagtgcaggggacgccttcacacagcgctcaatgatgtcgttctgaagacaattggcgaccacaattgcaaccacagtgtggcaaatgtcatcacacaaaaaatcgtcactggcataaagcggcgtgccgctgagacgatggaaccaccagcggcaaccagggcgcacacacttcagcaaattgccacgccagtaatggcgaacattccaacaaagaatgcaaaagaaaagtgaaaatctaatcattttttttacgttcacatt

SEQ ID NO: 10108 - DNA, 1163 bp, Heterodera glycines
ttttcagcattttaccattgaccaatcgttcggtgcttccgtttccggcgctgcctttcaaatgcctttcgacgagtgaaagtgaaaatgaaatggcaaacgatgagccaacggaagcggcaaaattggcggaggaatttgccaccaaaaatttgacgacgaaagaacggatggatgccattctgaagatgatcagcggaagaagcggagaagaaggagcagaggaggaagaagaaggagaggaggatgaagaaggagaggaggatgaagacgaaaagatgacgggagaagagttggaggagagggaggaagatgaagaagaagtagagttagaagagagggaggaagaagatttagaggtgatggaagaattggaggaggtggaagagttggaggaagaagaaaagttaaaagagagggaagaagaaaaagaagaggaggaggaagaagaagaaggagagctggaagagaaggaggaagaagagaagaggatggaagaaaagaggcgggaagagtggcaaagaagcaattcattggtttaaaaaggcagttacaagccattacggcgctaataaccttatcgttcccatttttaaaaatatgcattatttatttatttaatttcgttgtaaaattgataaaattaattttgaatattgaaatgctgtttaaaggaggtcatgtgaaaagggtacagattattcagaagttttatgcgccgcaaaaaaattgttaaaaatctgatttgttcatcctaaatggcactcacaaaaaattggaaagggtaaaaaaaaattttttttcccgaatattgtcccaaatttgctgtaacaaaactataagttcaaaaattgaagacaggtaactttttttatagagcacgaaaaatgtgaaaaaaattcagctcaatgtgactttttgtgctgatcaaaaaagtcaattgtaccacaatgatcagatcactccttcagggtggtctgaaaccctaaaatggcttgaaaccgtgaaaattttgtaaaaaaaatcctagtgggttggataaaatttttcgtataagatgaatataacagacagaaagagcgcaaattttgctacaaaatggcctttgaattatggctctatgatgtgtctccaccgaggaaggtaagcctaaaaatcgacta

SEQ ID NO: 10109 - DNA, 2344 bp, Heterodera glycines
  unsure (1)..(2344): unsure at all n locations
tgtttgtttagaggttttcagtgggagcttgggcatcgctttaaaaatttttatttttgtaaatttcaaattttccagcgcttttttttcatttacaaggagaaaccagagctcggacggcatttcgagaaagcctaggcaagtgttttcttgaacaactccggaaaattaggcgcctcaaaaaaaaagataaaatccagcaggtcaagcttggaaaaatatatttatggaatttttctatccctaataattgcaaaaaacttcatggtaacaaactttaattggttggatataaaaaatggcactctcacaccaaatcagccgaggtcggcaccagaaggccccgcgtttggtggttggaaaaaatgcccaaaaaattggggcactttcccccccgcggggcggggctctccatttccatccacccaatnccatcccaaatccttctattgctggctggcagcaatttcctgtccattgaaactggccaaggccaagacaccgacgccatttatgagagaagaaaagcatagaatttcaacggggctatagtggagaaacatgagaggagaagcattcattcattgtgtgccggccatttggccaattgaacgagcggcgaaatgccgtggccaccaaataatgtttttttttctccgaaggacggcacggtggcgggcgccgggtgggaacagacttggccatttttttaccccattgattttgctgcttggaagaagtgggccctcctattttttgccgagttttgctatagggacggcggcataaagtgcatttgaaaagcgaaaagagaccggaaattgccggaggggaggggggttaagaagagaaagagaaaaaatgacaggcagagagcgaaagagagagaatataagagagaatgagaatcagagagagagagaggagcgagggagggagggaaggagaaaaaaagagagaatcagcaaaatgatggttaaaagaaaagtggagagagatgaaaagcaaaaagaggggaagaggacgaaacgggccagttgcgtctgagccaagtttagaccaccataacttttttctttgttgaccaaatccaacaatgttggtatcattcgaaagctcttaacaagctctatcggcttcctaaaaatcacaaagacatactgacatataaaaaagttataaattaaaatatgcaaaaattctgactttttggtagtgttcatgttgcaacttttttataagttgttcaatcgcttagcaatatcttatcaaaagcttctaaacatgtagagctttcgaatgatgccaaatttataaaatttgacaaacaaagaaaaaagttatcgtgctttatgcttggctcagacgcaactgacccctaccgttcgacaatgaccatttacgatatatcatatcgccaaaattaaaaatatcaaattaaaaataataaatgataaattaataaatttaaagagaaaatataattgctctatttttaaatttaatgaatgcattatctatcgcctattgtgtatgattatgaatagtgaagaaagaagacaaaaagagacggatctataatagaaatccatttatttcaattattgtagtgtcctcttttcaccacttagacaaaatgttttggtcctcagaggatattagtggcatagttcaagcagttcagccaattcataggctaaaaatcgggagcttattgaatttgtcgaggttgagtcaaaaagaggcgcttaattgttcttgagggacgaaaagattcgaacgcttttgaaaaagactcggcgatagtcgaagatgtcgaatattgccgatgtctcataaatgcaaaatcgaaaactaaagccattctcataattctattatgaaaaaaaaacgaaaaaaaatccattttatatcgctcccaaatccgcaccgtccatatcatttagcagaaattagaattttatttaaaaaaatatatttaattttgttgtcgaaacggcattgtcgaaatgtccgggagccttaggtttatttttgaggaattttagtaaaaaaaaatttacaaaaagttataaccaaaaaattccgaaaaatttagacgcacaattttgtccctacggtttctcactgcgtttgcgaatcgcgccccgtccatgtgcaagggaatgccatgcgaatgcgcaatgttcgcaatgcgacggatctgtgccaatgagtagagcgtgccgctctccgtgctttgggtgatggacacagccatagggcggcccgcgtgcactgacacgggatttggcggatagcgttggattgcctcctctaatgcctaattaaaaaataacaattt

SEQ ID NO: 10110 - DNA, 4303 bp, Heterodera glycines
tttgaggattatggcccggaattgcaggaactgttggaacatgagccgtgttttggggtggcggcggtggtatgcctggtggcacattgttggccatcgtttggtgataatggcccatcgtcgacagaccgtcggcggtgggccgtaaatgcacaacaaaattggacggctcgacaaaggtggcattcacagctgaatgtgaaccggcagcagcaggcaccgccgatggaaaggcggccaactgaatctttattgaaaaaatttataaaaatgaaattttttaaaaaaatatttaatgatcgcgactctcaaacaattatttttaaggtgtttattcaattttgagcaaatgcattaatacgttaatagctttgtttaacgaaatattgggtgcctaaaatattttagtttcataatttccttagaatttttttgaactctgacaaaaataacctttcaatcagaggttaaagttcggtatttccgagaaaggcctggagctggaccatattggatggatctagattttctgggcaaatccaggtccagcaagccggtttttaatgcagaccaattccgatcccaaagtttagtttttcactctgagacaactgattaaaattaaaattcttgtaacccaattaggcgccgctgctactcgtccctgtgcattatcatcaacaaaagcaacagccttttccgctgactgttttaatggtggcatttgtgatggcctactgttggctgctggaggtaacactgaaaaatattgttgttgcagttgttgctgctgctgttgatgatgaaggtgagggtgacggcgctgattttgctgctgctggtcagcataagcagcagcaaatgggtgaaagtgcatgtccaacccgcgctgaccagagtcaatttgtcaatttgttggtcaatttcgttttttttttgtatcagccaaatgcttgctaacaagaagatacggcaatcaaatttttttaaatgatcgttaattaaaatttgatattccgagcgacatatacataaggtataccattgaacgaaccgcaatgttaccagcttctcttgcctcaaagtttgaaaactatacatatcaaaatgtttgttcaatagttgcttttttgaaattcaaaacaaaaagccaaacttaaaaaaattgtacatatcaatttatttcaaatctaaaactagagctggtcgggaccgtgaccggggcgggaaatcccgggtttttcaggtcccggttccggtcccggtttttgaaaaaaaagaaatcccggtcccggttttgctagtcccggtcccggcgggactaaattaagcactggtaagaatgggggtctgggtaagaaaagagaagaaaattggtgaagaaggagaaatttttggagaaaaaaaatcaattttattttatttaacgtacagtcatggtcataagtgttgtcccatcatgctttgaaaaaaataattgcgtataaaattgtcattttccaatttcaacagataagtagcataccattggatagcattttttatgggctttccaatgataccatatttgcatttgtgacataaacatttatttgatttttcccccctgaagaaatttttaaaaattttcctcgaattagtcctccaaaacgaaaatataaaatttatgggtacatttttgaatataggcaattttcgtaacaaagttcactcaaatttccaaatttttttcaaaaaattttctcttgggaaaattcccggtcccggcttttctctcggtcccggtcgaaaaacttggtcccggtcccggcttttcgggtcccggtatgtcccggtcccggttttgcaataaaaaaagtaaaaatgctatcctaagaaatgacccgaaaaaaaaaatcagaaaacaccccctaagaatgaaaaatgttctcaaattgatcatcaatatttaattatcctctacttctgccgtacattattttataaaattttgtgaaaattaaacttggaccaaaataccaacaaatttgttcaaaacaatgtatttaagaaaattcgaaattttattgttattatttttcattttttcattgtcggacaaaaaaataagcaaaaatattagttctggaccgggttcgaacctccgctctttttctcttttaaatgaatttttcttaacaaatatttgtaaaaaaataatatgaaaacacacgcaaattcacctttatttaccaaatggatcaaaaaaggcaaaatatgatttatcaaagatgaagctgcattatggttgcgccacatctatttcaaaagaagtctcggcattttttgtattctcggcactttaaaaaaaaattaattattctacgtatgcatccattctttataacaacaaattctttatttaatttatttgtttgtctttatgtttaaatatctttaaaaaagaaattttcatatatggccacttccagtaggaattgagagaatgcaaaatcactttgaggggaggtggggggcagcaacacaacgacgacgggacgtcgcaatttgcgcatcgcataataatagacaacggcggatggacactgctgatcaccaccgattgggcagactgatcggagccattgtgttgcacagagattgtgacggccgcagaattggagtggctcaaaattgtccacattttgacgcaaaatttcgcatactctgtcccatccgacgcgccatttattgtttgatcaaattaataacattgttcatctaccggtgttcacacagcagcaggacttgttgtcgtcatgttttgtttttgtgttggaattggccattacaaattggccaaatatttcgcgtaccatttacagattttttcactctttaaattatgcaatttcagcagctctagattcattttaattaggccgtcaataatttagtttataaaaaatctgattttgtaatcagtgtgatcaccctcaaatttttatcccaaatcatatatattaattaatccatgtggatgtccatgcggccgaaaccgatggagattatgcattaaattaatatttttttagacaggcattataatttgtttcggcataaaaatggcccaaaaattccattcaatgattgtctctatcacccttttggtcaccgtaatggcccaccatgcacacagtttaaccactccactgacagcacatgtccaccccgtgccacagtacaccggcttcccggagactgtggctgtcccagtgccaccacttccgtgcaagccgttgagtgctgcacagcgagctgcactcgctcccgcccatccatcggcggccgacgcgtcaccccaacaagaaatgctgcaattccaccgcatggttgccaagcgtggttgcggctgttgttgttgtaaaccatgttgttgttgctgttgtaagccgtgctgttgctgttgctgtatgttgtggatgtttttgtaaacagggacaaggctcgtgttgcaaaacaagttggatgaggcaaattaaaacttgggttaaaccttgactccgagttcctcgtcccgatccccgggctttttgggcctgctccccgactccgagcaaaaaaaaaggtgtaaattttttgttgaaatataattttgaccatttcctgatcgggattaccgacaattttgcactcgccgaccccgctctgccctcgcccgtattctccgagaatttcttccccgagggatcgagggaggggggcttaactctaattaaagcctttgttatttgctgggcctttttttcacatattcaattccttttatctatgcttggctatggacccaaatccgtagattaaacaaaattcactgcccatctcgaccccggccttttccaaaattcccggttccgtacaactctctaaaactaaatatatatataactccaggcaagccctgctgttgttgcaattgctgtaactgttgttgctgttgccataaatgcatgtgcatctgtgtccgcccatcatgctgctgcaagtgctgcccaagctgctgtggatgtaaaaatgtttaaatttgggcaaacatttttttaaaattaattattcaaattatggagacaataatggacatatattacagtattccttttgttagtttgagttgtacggcgattaatttatttttttcccacgaatttgatttaaaattaaaaacaattggcaattgtgaagattattggtcccacaaaaaaaaagaataaaaatccaaaaaaagcatattttaggggttatttgatgcgctgagcacgaattt

SEQ ID NO: 10111 - DNA, 1515 bp, Heterodera glycines
  unsure (1)..(1515): unsure at all n locations
ttttattcttttttttgtgggaccaataatcttcacaattgcccaattggcaataggtatattgttttagtttctttttaaccaatttaaacaaattaatattattttcaaggccctggctatgggtgtggatgccggcgccgccgtagacgagcattgactgctccatttggttatccgatgccaatgttcttacaacagttacgtacgccaatctatgagccgagattatgccgcgaactttgtcaggtaacaaatttctaattaatccagttcttatttaattaataaattggttttttttaaggtcagagttttgagtgagcgaagccattcaattggtgaagtgcacacaaatgtgaatttaataagcgcagacgaccggcaaaggatggccgcttcggcggcaggaaatgaaaagctgtgaaaaagcaatgacgacatagcaatataaaagattagataaataatatattctattgtgtatgaatagggtgtatgcattgtttattatttaattatggggagataaagtattttctgctacctatttttgtttttcaattaaaaaaaaacaattgaatatatttttggtaggacagtttttcttcgaataattatgttaccaaaaaatgaaagaaaatcaataaaaattaatatttaaaataatttttaaattaaggtttgtttttataaaataaataacaaaaataaataaattcatatcatttgaaaataaataaaatatccataacaattagaaaataaaaggtctcgaaatgcctcttctcttctcattattattgttgatgtgtagcatttagcgagggaactgaatgaaaaatggaggagaacatttccaccaattgttgaaataatgaaggggaaattgcagacggcaacacaaaatttatattaaaatggggcgcgccaccagcattgcccgaggcgccaacgatggcaccaccgcctccggcgatagctgtgctcatcccgctggagcacacctccatcagaaaacccttcaggcacttgaagaccagttcggcacggctcaaacaccagctgatcgtcattgactagcgggaaaaaacattgtgtggaagaaatggattaagtcggatgagagacttcttaaatggatttataagactttttggtattagaaaaatatcttttttagatttaaaaaaaatcctctccgtttttctaccccgagggtcggggagaaatataatataaaaaactatgcaaaaacacctcagtcatgtgctcaaccaaaagtaatggaaatgtgatatgattgatgccagaatgnggtgccaaacggatgacatttcgcaatgcattgatgcacggatggcgtgaagagatgtcctgctcaaccaattgacgatcgccgacaacgtggaagacgaccttcatacaaaaaacaatgtcattttcattagggactttccacttttgaatttttctttataaaattaatttttatctaactcgaaccgagccaaa

SEQ ID NO: 10112 - DNA, 1324 bp, Heterodera glycines
  unsure (1)..(1324): unsure at all n locations
ctaaaaataaatcacaacacatgaatctaaaacagcacacatcattcacctgaacagctgataaattggaatggttggtcacgtacacgtcgccaggcctcaacgagtttacgtcaccacagtaatcatcgttgtcctcccccttcactgtatactgatgatcaccatccaaatctgtggttgaatgaatagtaggcaataaccaatttttcgtctgttatagtcaaaaaaatttctgtgccgatttggaaagtgccatactttttaaaccagtttgaaaacctggcacgaaagtgccacaaaaaaatgctcgttccgcaaaaatctgagtgattgtagactgggaccctacaaaattccggttcggcatcacatgactttattataaatgcgtgcggtggtgcactgattgtttggagccgaactgcttgttctagtgtaatacactgcaccttgagaaaactcagaattgtcgtccacaatgtcgttattacaagtcgaaatcatcaggcgtggcaatgatgctataattatatatatatatatatatatatatatatatatatatatatatagtagtagtattaaaagcgactctattgcagtttacggggtggtccattaattagagaacattctcacaatcatcagtctcataggccatcaatttttccgtaattgattggtcaaagcttacacattctttgcataaattgaagaagacttaaagtcccggaaaaatgtggtgtaaccaaatggggacgggacaaaatattgccgccgaaatatcgccgagacaaaatatcgccgcagaaatttaaaaatttttttttcaaacagaaatatttcataaaaaattcttaggaaatttcttagtaagaaaatctcaagaaaaatttttttgaaaaacttttgcgattttttcgaaattttatgaaaactgctaagtttttttgaaaaaattttccaaaaaaaaattttcttttaaaatttctgtggcgatattttgtctcggcgatattttggggtgtactgtaccctaaccaaattcaccttcttctactgctgatgcttgtaaaccggcgagtggcggcggttcattattcgccttttcactactgtcacagtcgttttgctgctgttgccgccttcgtcgttgtcgtacagcggccgccgccgcacgacgcttgcggttcgctttcattacctgtttttttttgaaggattagttagtttatagcgggtatcaaaagctctagatattttggaataagcttataagttaatagtactagtaagtgaaaatttaatttatanaactatc

SEQ ID NO: 10113 - DNA, 1457 bp, Heterodera glycines
aattatttcattaacaaaaaatacggatcataaaatacttctaaatagaaattttggataggccattggaaagagcacaaaattctctaccgaatcgccttttgtatggagggtctacgtcttattcccactgagatagagaggtgatcaaaattggacaactcaaacattcaattttttgatcattttcctttgaaatacggtagaaaattagtgatttttataatcatcaaaattctaccaaatataatttgttaggtacaagtcttagccacaccatcaaaaggtaattcggtagagaatgtactcctttcaatggcctactctaaatttccagaaaaattttcccaaccccctaggaatttttttcggaaaattttcacgattttcagtgtattatgggtgtcccgatcaccatgaatgagtgatttgatcaagttgatctgaaagacttttatgattagcatcaaaagataagtaagcatgaattatctcagatttttaaatgaactaactataaggtgatttttcatcattgaggcaagactttttttgcactcatttttcggcatctttgactttgatgccaataactcattcatttcgcgtttaataaaaaaacatattaggatctgatagagcaggaaataagctatagaataaagtaaattaaagaggatttgttttataaagctagaaaatttaatattcccgattttgttaaaaatttgaaatatttatttttgaaatttttggcgttatgctattttcaaaattaatcttcaaaatttacttagcaaaatgcaacaaaaaaaatcaaactttcctttcgtcaattcacattgccgctaattgtgttgttacgtaattaattgttctatagattattttttctaccaaaaaacttccaaataaattccatccgatgaataaacgaaacgaattgcgcgcaaaactgcacgcgtgtcacattcagcagcaacaacagcaccaacagcagcagcaaacccgcagcggcggaccgtccgccgtcaaccaaattccgaaagccaaacggccggcggcggtggtacgtacaaaaaatgattcgtttttgagccattttgcggcattttccccgcaaaatgccgcctatttttgctgctttttaaaaaagcataaaattcaaatgattgtggtaatttctgtcgcgaaaatgtttgtttaaacgcctaaaattgccctaaaaatataaaaatagttggaaaataaaccctaaaatgccgaaatacataagatttattttgaaagtatggtttttttaacaatccaaggcagagtgtatcgaaaatgtcaaatttagcatttatttttcatccgttgcatttttgtcgaaatttaggccgcaatttccgcgacagtgccgaaaaaaggccaaggtggagcacccgttccaccacaaacagcatcatcaccaa

SEQ ID NO: 10114 - DNA, 1499 bp, Heterodera glycines
ggtcagagaggcggccgaacgtgcggcgtcggcggtggacgacgcggcgggcgaagtcgtcgtggaagagagcggcggcggaggggggccgttgggtaagccacggcggagggggagagggagggcacagaaatggaaaaatgggacaagaaaaatggcatggggtgaaatgaggaaatgagtgataaatctaaaaatgatggggaccaccaaatcaaatgaatgcctccgatttttgggatcttaaccattggttgtaaatgcacattttgaggaatgtgagattgaaattgccaaaatttggaaattcaagttgagaaattaaatggaagttaggttgaaatggcataatttgagagatttaaattgaaaatgcggctctatttcagtttagggcgcccaatcaatgaacatcatcagtttcttgggtcatcatttttattttttcttatttcccgagactttaaaccagcattgaccaagtaagaaaaaagtcatggcctaaaaaacattggacgtctaaaacataggtgaacaaggggtgcgccagggcgaggcccatacgacggacgattggcgggggggggggagtgccaggaccaatttttcgtacgaaggcccccaattttctccagcgacgacctttttttcacattttttgcggcgcgcttttttcaaaaaatatggggaaccggagggggcagcggtgcccggcggtggataggcgccgccgggaacatttttggattttttaaatgaatttcgctaaggaaattgttcaaatttttaatttttcccattcgttacgacccccccccccccctcctttacagtcgccccctttacgacgaactaggggggtgtgccggcacatcccttgttcacttatggtctaaaatgcaatagggccaaaagtgctaattttgtttgagattgtaatttaaaatttgcaaaattttgtaaaggtttgaatcaggaaatgcaaagtttcttgggtttatagatcagttcttgcgcaatcggacggtgtcgtcggtgtcaacttcggacatttgctcttccccaacacaacggagcggcggcagaacagcggaagatgaccaccaacaacagcaagcagtaacagcaccaagcggcggggccgacgcgtggctgtgctgcgcggacggacgccaaattgacgtaggcgcaaattgcctgaaaattagccgttcttagggctttactcgatgccagtgaaattttcaaaaaaaggccgcaattacaccgaaaaggcatttccataatttgttattttttgcaccaaaatctgaaattgttttttacgccccccggcacaccccaaaacgcctactatttttttcgaggcaacgtaataaaaaatttttaatttttcttggattttttttgcgtctgcgttatgtcccggcaacaccccccccccccttgcgacataacatcatgtccttatttatatataatcgcccctacccccttat

SEQ ID NO: 10115 - DNA, 2300 bp, Heterodera glycines
tcagttgcttttgttgctgatcaaacagcgaaaacagttttacggtgacacggatcagctgcaacagttccctttgtcggcattcactcggcctcccccaacaaaaattgttgagccgacgacgacaacgacggatggcaccaccgatggcgatgccattgagcagcaacaaaatggcggagatggtggtgccaaaaatgagggcgacaaaagcggtgccaaaaagggcgacgacgaagacgcaattgttttgctgacggaggagcgtggccagcccaagttgactgcaggtccggcaaacacggcaccatttatttgttagactggggcaaatgccgaaaaatggaacaaattccatgattctcccctatatttgagcaatttcgaaccgtaatcctgaaaaaaaatttctcaccaatttagctgacgaaaatcggcatcgactggcgcacaaaagtgcggacgaactgcttgaacttctgttgtccgacgacaaaatggtgactgataaatttaaaatcaggaaaatctctaatgcaactccctatgcatttttcaatttgagggggtaacttacccccctcccctccttcattttccctgaaaattttttcaaaaattttccctttaatggtcactgctgccacaaaaaatgcttaactcttgtcatttaatgcaaaaaaaaaatttttcaaggacgaacagcaacaacatttggtggtcgctgaactgctcgacaaacggcccgacctggtcgatgttcacgcgaccaactttgacgcccaaatgcacgcgctgttcgcctgccgattgtctgtggcacgcgcgttggtcgcccaccaattggcccattgcgcggccgcggcggtgatcaaacggagcggtgagttgtgggaaaatggaataaatggactccaaaaatgcttaaatccggcaaaattttgtttgtccaatgccaatctaatgcccgacttcctaaaatattttaaaatggcattttccatggaatttatccaggcacaacccaaaatttcgctgtgacataacgccaccaaattttttttatttaattatcaaacttagcaattttcaagatcaaaaatcttggaaaagttaaaaaaaattcaagaaaaaaattcgtagaaagatttataaggaggatattttaagaaaaaattgaaaacttttttagggtatttgaaattttataataaatatttttccgttccgtagaaaattgtcaaatgttttctttaaattttctaatgttttcttttaaaaatttgcccattattttcagtactaatttatttcccctctttttcagtcacttttctgctcaactctttcaatccgaggtgatcgtcgtccgtctcatatattttcctcgccttttttggctttttcaatttttctcccctttttcctcagtttttgcccctctttggtggtcacttttgtggccaaagtgtgcggcgcgccagcggaggacaccaaagttggcttagtgctcaacggggagcaatgctttgtgttggccctttacgttttggaggcacttaattaattaattatctaattggttgcctaatcattttgcatcgtttaatgaacgcgtttgttttaaggacattgaccaacaattcacgcctgacatggtcagttcggatggtgtcatttctacaaaaaaatgaataataatttgctacgatattttcattgcacttttcggttttatgaccactgaaatttttaaataaaaattcatttttggggtaatttgtgacgttgatcatatgacctttattttgcaaaatttctaacctgaattcgaacaaaaattcgaaagcacccaaaaattaccctaaaatgactttatttgaaaatttcagggggtcaccaaacagaaaaaagatgaaataactcaaaaactattggaaaagaaaagtcagatttttttgagtttttaaattaaattttgccaaaatctttcttatgccctcctccgatcgggattgctgaatttagcccaaaaactcaaaattttgccgtttggtctcattttttaaaaaaactgctaacataatgccaataaatttcctctatcccccctcatttttgactttacgaaagaaatggggttcatggcttgggactccctccaactggtcgttccgtcttgggccaaattcctcactggccaaaatgccattccgccccccggggtttgggttttacaattaatgcccaagggggggcccaaaaaaaaaagggccaaaatgaaaaatttttttcctttt

SEQ ID NO: 10116 - DNA, 2935 bp, Heterodera glycines
  unsure (1)..(2935): unsure at all n locations
agtaaaaatgaatttatggcatttattattttttatatttttctttccttttgaaaacgaatccggcaaaatccgaccaaattttgatgaaatatttggcaacgaatgggacaaaaaggaaagagaaaatggtatctaatcaattattcaaatgcaaaatgaccagaatattatcaaaaatgatcaaaatacaaaagaagaacaaaataatcaacagaaaaaagaaacaattcataaatttgaaacaattaaagaaaagttaagagaaaaaggaaattatcaatggaaaaacagagtcaaaattgagagaaaatttggaaaattattaggcgtaaatcgcaaaaaaaatttacaaatggaaaaaggaattaaatttaaacaaaaagaaaacctatagaatgaaaaagagtttttatgatgaaaaaagagcgaattcaatgaacgtttagatgaatttaaaagattatatggccaaggcaaacagaaagaatttgtgatggaattgggcatttctaaagagacatttataaaatggaaaaaagaattaacgccaaattataataagagtatgagtttttttattttaatttattgtttttttattaaataattttagctcaaaattccattgaagaaaaattacaaaagatgaagcaatattttgaaattaaagaagcaaatccaaaaatcagtgacgaaataattgctgggaaattggatattcaactcttagaaaatgggaaaagtttcttaatatataatttgttaatgtacgactactggtttattgtaatctaattgctttgatgaaatgcttttctaataaattctcaacttttcctgggcttttatttgtgagcaaaccaatggcacatttaaaatgatacaaatgaatacttttaaatggttaatccaactcagaactcattgctttcaaaaatgcccctaaatttctttggtttattgacattaattaccgttgcatggagtttattttcggctttggttttgactgaaaaaaaccgaccgagaaatttttgaaatcgcttaagaaatatgtattttttgccctattttgaaaattatgtcaaatagccaatttcgagttgccaaaagtccttttttggcggcaaaataggtcaaccattcgtgaccggaaaatgagtcagatgaaaatgcgttagtgatacaaattttttaaaataaagttcgatggttcattagtattgtaataatatgtaaatttctatacgaacaacgttctgaatcacgaaccccggacccaaattgaacaaaaaggcgaaaagtcaaaattttcggaattagggtttttattaaaaatcgttttaaatacacggaagcaaacagaaaacaatcaatccttcaataagagatcattaatccgtttttgaaacaaaaaggctaaattcgaaaatttggactttcgactttttgttcgaattcaggccaggggttcggaattggccgaaatggataccggattcgtggtcagtgctctcgaaaacgcgcaaagaacttgtttttataacaaaaaaatttcaactgacgcattttctactgaagctttttccactgacgcattttccgggcgcccaaccattccatggaccaacaccgtcctgtgtaaatttaaaattttaccaggcattaaaattaacaaactttcgcgactttataaaagcatttatcttatatgacaatgaattttaatgacatattagggcgctaaatttctaaaataggcaaaactcctgctggaattctttctttttgcattggagttttatccattttcaatttttctaaaaatgcatttttggtaggccaaaaaggaaacatgaaaacccccttcaaaaaatcacatgcaagcaaattgctttttccattttctcaaagttcgacttccaatccccaattttttagcaattaattcattattaatttttgcgtttccttctttaattttaaatattgcttcatctttttcaatttgtcctcgttggagtaaattctttttgcttaaattataattaaaatgcaaaaaacaaaagattctcgcttacttttattatattttggtgttaattcttttttccatctccaaaatgtgtctttagaaatgcccacaaattctttctgtttcccttttccataaaacttttaaattcattaaatcgttcaatgaattcgatctttttctccacataaaaactcttttccatctttttattttgatttaaatttaattcttttttccatttgtatattttttgtcgatttacgcctaatgattttgcaattttcaactcaatttttgctctgtctttgttttggtatttttcatttttcttcaacttttctttaattgcttcaaatttttggatcattttacttttttgttgatcatttggttcttttcgcgtattttgatcacttttgataacatttgattggaatattcgctcatttgaccatttgggtctgtccccatttcttcacccatttgttaatcaaaataaataaattccatattttcaatttcatcgttctgttcaatttttaatcgcttgttcttctctgtggtttttatcccattcattgccaaatacttcgtcaaaatttggtcggattttgccggatttaatttttaaagcaaacaaaaatatagaaaatattacaaggcacaaagtcattttcattatttgtttctctttaaagattttaatttgaatttatgccatcaaatattgctaaaaaaatttatgattttgaagtaggcataataataaaaatcgaaaatgtcctgacttttgtgatttgtcctcaaaaaaaaagtgattacttctcatatttcttcaaaaattgtttcattatagtaaggaaaaattatgcgtcaaaatgntaaaaattaaaa

SEQ ID NO: 10117 - DNA, 2343 bp, Heterodera glycines
  unsure (1)..(2343): unsure at all n locations
aaaaaaaaacaaggtggctggatatctcaagggataaaaagcgcaaaatttgcaaaatttttgactaaatcaattcataacttttctcagacgcaaccaaattgcacaatcttggtatcatacgatagcccttgaaaaatggctgcaaaattggtcattttttggtagccgatttttatgcttaacttcctcagcggagacgcaatcgtagagacaccaaccgaaggccattttgtaaaaaattgtgtgccctttctgaaatcagtcacattcgttttcgacgaaaaaaaaattcccacccctattaaaaatcttttacaaaattttcccgttatcaagccattttttggctttagatcaccctgaaggagtgacctgatcatcgtgatgcaattgacttttttgaacagcaaaaaagttagtaaaaataaaagagaagaacaaataagaaaaattgaacaaaatgatgaaaaggagaattcacaatcagcagaagttgatcaaatgtgtgaagaaatgaggacagacccaattgatcaaatgagcgaatattccaatcaaaatttcttcgcttaaacgtccctttcgtcattagaaaatcaccattatttaggacaaatcagaaaagacagaacattttcgatttttcttaatttgtttacatccatccaaacaatgacaaatttaagcaaaattttatggaaaaaattcacattaaaatagtttctcgacatttaatcacctaaataataaaaatgaatttatggcatttaatttttgtatttttcttaatttataaaattaaatccggcaaaatccaaccaaattttgatgaaatatttggcaacggacgggacaaaaatgaaagagaagaaataatgataaaaattgaacaaaatgagcaacaaagtgtaaattcggaatttattcattctgtttttcaaaatggcaaagaaaatggcctaacaaattaacagaaaagaaaaatgattcaaaagtttgatgcaattaaagaaaagttgaagcaaaaaggaaaatttcaaaagaaaatcagttcaaacattgagagaaaaattccgattgtcaagcggtctggtaggcttcaaaaattattaccaaaataactaaatggctaatttaatttcaaaaatcaaaaccatggaaatgaaccagggcactaaggggtagagcccggagcaggaccggatcatgcgcaggattttgcaggatcccagtccgcaatcctgcattgtttggaaaatgcaggatttgcaggattgcaggatttgcattattaatccagccggatccggtccggcaaaaaattttgaattccaatcctgcaacaggatccgcatttgatttttgtgcgggatccggcaggatccgcatgcattctttgaaaattttaaaagacggaatgccaaaatttttgaataaatttataataaaatcaatcaaaataaattcaattttcatctcaaatttcacctagaatttgcaaaaaaatttaccggcggcgcctatcgacaccactggatcgacattaatcctgtagaattgagtcaaaaggtgtgacatttggtcattttttggtcaaaatcagttaattaattgataaaattttcaaaaaaaaaaattcagacggcgcctatctgcatagacggacccctttgttcctagtttttgaaaaaattgcgccgaaaaaaagcatttttgaaaagcaaaatagtcaaatttattgaccattaacagatttggtttccgatctctttttaccgtctgacccattcgaaacatcttagtcgcccttttaatgcatcccgccagcccctaaaatttcttgtcaggtatttttttttttggaaatttcattgaaattttttcaaaatttctaagaatccgcaatcctgtgcgggatcctgcaaatttaaaatgcaggatttgcaggattaatccggccggatccggtcctgcaaaattttttgaattccaatcctgcaacaggatccgcaaatttgaaatttccgggctctaggtcaagccaagtgttagacaaaattgctcataacgccaaatagcgtaattggcgtaaaactcgcttcattcccaactaaactgaacaaatttggtatctaaaaaaagattttgtaatggagaatctttttttaagcgaatgttaagcaatttgacatctcagaaaaaaagttgtgggagtttcaaattttcattacgttataactagggagtccaaaaatatggatantaaatcgcgaaatatggccataaaatatggaccaaaaatcgaaaaatatggacataaaatggccaaaatctcaaaat

SEQ ID NO: 10118 - DNA, 5655 bp, Heterodera glycines
cagagtatgtgcgccgcacaccatgaatggctgacaaagcaaaagggacaaaagctaggcaagaagatgaatgtcctgcgaattggtggcctcatggtgaacatcctgaatggatcaacacgactgatggaagtcacgatttgggtgaatgacattccgatcaaatttgtgcttgactcgggtgccgatttgactgtgctggacgaagtcgcacacaaggctattggaaagcctcggctgacccactgcaatgagcaagccgtgtaccatgacggtacaagctgtaagcttttgggtaaaggcacagcacgtttttcatttggaggaaaaacagttaatgggaaatattatgtgacgaagaaaggatcactcagtagaggaagaactggaccgattgttggagcagaaggtgatcaaacctgttgatcacacccattgggccgccccaattgtggtggtgaagaaggccaatgggtcaacgcgtatttgtgccgatttttctaccggtttgaacaatgcgttgctgcttcatcagcatccacttccattgcccgatgatatttttgcgaagctgaacggtggaaggattttctctcaaatcgacttaaaggatgcttatttgcaagtcgaattggatgagaaatccaaggaagtgtgcacgattgccacccaccgaggaaattaccagtttcagcgactgccgtttggagttaagtccgcgccaggcatatttcagtcaattatggactcaatgctggcagactgtccatttgctacggcatatttggatgatgtgatcgtcgtaagccgatcatccgaagatcatcagaagcaccttgaagaggtcttcaaacgttttgaaaagtttgggttccgtgtcaagccagagaagtgcttcttctgtcaggaccagatcaaatatcttggatttattattgatcaggacggaagacgaccggaccaaacaaagattcaggcgatttctgagatgcctgttccgacaaacgtgtccgaggttcgatcatttttgggaatgatcaaccattaccaacaattcgtgaagaacatgaggttcatccgacagccgttggacgaattgttgaaacaggacaaactgtgccaatggtcggaagattgtcaaaatgcctttgagaaggtaatcaaaattttgaaatctgatcaattgctgacacactacgatccggcacaagagatcattgtatcggctgatgcttctgagcatggaataggagccgtgatctctcatcgtttttcggatggaagtctaaaagccatagcacatgcatcatcgtccctgtcagcagcagaaaagaattattctcaaattgagaaggaaggcttagcgattgtctttgccgttcaaaaattccacaagtatcttttcgggagacacttcgttctgcagacggaccacaagccgttgttgtccatttttggcaacaaaaagggaattaaggcttgcacatcgaatcgattgcagagatgggcaatcactttgctcggctatgacttcgaaatcgaataccaaaatactgctgattttggtcaagcggatgttttgtcgcgcctaatcgcgaagacaccagtgccggacaacgaagtgatcattgcaaacattcgtgaaagcaatgaaacgggagtgttgaattttgttgcgaaaactctcccactggatcacaatgatttgactaacgccgcgaaaagtgatcaggtgatcaaaaatgtgaagaaatttgtctgctcacattggccaacaaagaacaaaatggccgcagacattgttccgttccatcgacgacgagacgctttgaccatcgaggatgaatgtctgctttatgcggacagagttgtgattccggcctcgcttcaaaaagatgtcttacaacttctgcaccgaggccatcccggaatgaagcgaatgaaaagtctcgccaggcagtacgtttactggcctgggatggacgaacaaattgaaaattttgtcaaaatgtgcaacgaatgcacaatggaggcaaaaatgccggtgaagactgagcttcagtcgtggccgaaagctgacggaccgtggaaacgcgtacatttggattacgccggaccgtttatgggaaaaatgtttctcataattgttgacgcgtactcgaagtggcccgaggtcttcgaaatcgttcatcgaattccgcagctacaatcgacaaattgcggtcactctgtgccagttatggccttcccgaaattttggtcacggacaacggcacacaattcgcttcaaaagaatttaaggaatttgtgaccgaaaatggcatcaaccatctgttctccgctccgtacaatcccatgtcgaacggacaagctgagcgttttgtcgatacgttcaagaggacatgccggaagatcaagggagaaggagcctcggaaatgttgaccacatttttggcaacataccggaccacgccttgtgaggctttgccggagtgcaaaagtccggccgaattgttcctgggaaggaaaccgcgcacgactttggacttgttgaggccaaagccaaaggcaccgataattcgagacgaggccatggagaagcaatttaataggcgccatggagccaaaccgagatcttttgccgtgggtgataaggttctcgctcggcatcgtctttctcagccttggcgtccaggaaaaatcacaaaatgtaaaggtgtgatttatgacgtcgaatttgttgatggaaagtgtggacggttccatgccaatcagttgcttgtgagaagcactgacgaaaatggcacaaacgcattgaacgtgttcaatgatgcgttcgatttgccattggcaccaccgcttgttcagcatggtggccaagcgcaactgcctgtagtggcacccgctgctgtcatcgcaccagccttggacgaagaacccgtcgtggatgaagctgatcgagcgcccgaagtgcctgctcaacgacgatcacagcgaaatcggcgaccgcctgatcgctacactccatcatgaacggacggatcagacggacggatcattggaagaaccgaggaaaagattttttttaggggggaagatgttgggaccggtactctattgtccgcccatattattttcattcctttatttctctccccttattctctcctctatctctcttccctgttgtcccccataaataccctgcgtcctctgacctccccgtcattcagttgtcaaccatttattttgcttatattgtctcaatcaatattcgccctttgtcctccgtccccttctctttatttatttatttgtgtctcccaacttgaataaaataattgtttattcacttcgccggtttgggattggacggcacaacattggcgacgccctgccgacatcgaactcaatcatctcgactttttgttttggttttgaacaaaacaattttgattgttcaacctttcagttgttgttcatcaattgttaatcgtcgtgagcagtgagcatcaaaaaaaaaatggccgaagcagcaattcgccaactgtccgacgtgttccagcagttcttgactgctcagcaagcaaacgcggcagcaccagcacaaccgactcaatgccaaatttggcaaatttcgactgttttggtcttggtgaccatggcgaaagcgacatcgagggttggctggaacgcttcgcccttgcgcttgactgctcaacaccgaaccttcaggacgaattgaaggttaagctcttgctgacaaagctgagtgagacggcctacgccgagtacagcaaacattgtttgccgaaaaagccaacagagtttgactttggcaaaacttccgaaatgctgaaaagcttattcgcgaagcacaaatcagtttggatcaaccgatatgagtgcttaaaggctgaaaagcaagacgaggaggactttcgcggcttcatcaaccgtcacaaaaggctgttaagcgattttgagtttaagaaactcaacgaagagcagttcaactgcttgatgctcctcgtggcgctcaaatcgccgaaggatgctgaattgcgaaagcgcatactgtcaaagttggctgccgacggtgacagagcaacatatgaaagtgttgttaacgacttacaaatgtttctgtcgaccatatcggaggcaaaagtaatggagagaccatcgaactccaatattttggctgtaaagcgcaggcagcaaccgaagaaggacaattttggagaaaagggctataagcagcaatcatgttggtgttgtggcagagagcacaccccattacactgtccgcatttgaagacagtttgtcgaaaatgctcaaaagttggacatgtgcagagtatgtgcgccgcacaccatgaatggctggcaaagcaaaagggaccaaagctaggcaagaagatgaatgccctgcgaattggtggcctcatggtgaacatcctgaatggatcaacacgactgatggaagtcacgatttgggtgaatgacattccgatcaaatttgtgcttgactcgggtgccgatttgactgtgctggacgaagtcgcacatatggctattggaaagccacggctgacccactgcaatgagcaagccgtgtaccatgacgatacaagctgtacgcctttgggaaaaggcacagcacgtttttcgttaggaggaaaaaccgtgacagggcaatattatgtgaccaagaaaggctcacttaatcttttgggaattgacatgttggatgcctttggcctattggacgctttcagaagagaagttgataaggccatgaaagtcaatgtggtgaagaaggaagcgaaggattcgccgaaccctcaatcaaagaccactttgaccgagctccaatcaaaacacatttggttgtagtggaagagctggaccgattgttggaaaagaaggagatcaagcctgttggtcacacccattgggccgccccaattgtggtggtgaagaaggacaatgggtcagcgcgtatttgtgccgatttttcaaccggtttgaacaatgcgttgcagcttcatcagcatccactcccattgcccccgacgatattttgcgaagctgaacggtggaaggattttctcacaaatagacttctccgcacttcacactttgtcgctgaccgaaacaattacttattttttataataatccaaaacatttttttaatcaaaaagattaaatgaaattttatgagtcacaaatcatatttgaattcaaaacaaaacaaatgaaaacagaaaagtgatactgataatgttttgtgaatattactagaataggacgtagagtttatggatagtgagtgcaaaggatttgtatgaaattgatgattaaaaattatggaaaaagacatagaaaggaatatcagtggaaatgattaagcatagtaaatgatcataaaagaagcaaagatttagaaaaacaaatgtttttttatgaaaaaggtgacgaattgaaaatgtcaaatttaatgtccgaaaatgtttaaataggaaatgatctgcaaaaagcccgtattttgacatcaaaaatgtatgaaaaggcgacgaattgaaaacgccaaatttgccatcatattgatgcttaaggtaatatttctcatcaagatctgctgcattt

SEQ ID NO: 10119 - DNA, 1851 bp, Heterodera glycines
attggatggcttttggctgtcttcgtctgctgacttgcgattggatttgcattcgactcccccttctctcttccgctcctcccttctgtttttcctcttcctcttcttcctcctcttcttcttcctcttctctctttttacggccaaataattccgtcccaatttggtcaatgtctccgctcgtctttttcatcgctttgttttttgttccattttcggcacccattgaaaattgccgcgccggcaatggcggttttcgatggtttgcgtttccattggcactgtttgtgccatttacttcgaccaatgttcgccgaggagtcttcaaagaagtggggcaatgtgaaacgaagggacaatttgcagcaattcaccgtcatcattctgctgatgttgctgttactgctccctcccccgttgacctaaaagcaacccattcaattatcccccattagttaattatccccttttatttaattacccctcgttatataatttcgtcccttgcccattttcgctccttaccatcagcagccttccccgatggtgctgctgatgcgacgacccctcggcttgtccgttttttgaatcggcagttgctgttggtgccgttgtgaatgtcggcaccgtttcagcttgtgccactgcgttttttgcgttcggctccttttttggcacctccaaattcgcttttgccgcgtcacttcccccggcttcatcctccgctggtgccgccgttccctccgcttgcattttcgtcgctttttcctctgtcggctttgttccctttgctccttctgccttcgtctttttctctgttggcacttttttcggctgttcctttggcaattccgtttcctttttctcttctgtctcttccttttccgtgctatttgtttccgtctttttctctgcctctctctcgttcgccttttcttttacatctgtctgtgttttgccttttttctcttccattgctcctttctctgcacttttaattgcggccgctgtcagactcggactgatcgatgccggcgaaacggactctccccccgcgccaccgatgagagggacagtaagcggcgacgtagcacccgagggggtcgctctcccggaagtccacgcagaccccgtgccggtgctttctgccctgaggcggctccaagcctgctaattcagtctggtgaagcctagagaccgaacggacgaaagtctcgccatatttgccaaaaagtcgagatttgtctcgaccaaaagccattcctgcccgcccgagctttccgttccattcccttcccttcccttcccatcccattcacctctcaaaaataaacgaaaacgaatacattttcggtgctttccaacactgtgaccgttaagttttcgtcacgaaagccctgcttaagccaataagcggccgctgagccggtcagtcccccgccgatgatcaaatattcgcaatgcattggcagcagttcataatcgttcacgttgactttcatgtgtgccagcggatgtcggcgacggaatgcgtcatattttgcctgcaaattgttaaatttgcgaatgtttttttttttttgcttattgttgcctcgcgatatcgccgcgcggaacgtctgaagtcgtagctgagaatgtgctttccacggtcccaaaattcttgaccaggctcaaagtatcgctcattttcataaggttgccactgtttgcattgggtaaaactgagaaaccgtgatgaggttgaggcaaaatttataatatgtgtttgaaggatccgttgatttataatatttctttgaaaaaacactacaagaaaaaaatattaaacacaatcatggacgggaaaaa

SEQ ID NO: 10120 - DNA, 948 bp, Heterodera glycines
  unsure (1)..(948): unsure at all n locations
cggcattccccgcaacantttgcgctcgcaatgcgcgcacccttccaactcggccttttcttcacaaactcggcaccgttccaagttgaatctgtggaaatgccaatgtggtgggttggctgctgcttctgctgctcctttgtcctacctctgaacatacgcttgcatttctgctgcgttcacatcgctcgcttccaaatgaatttccaaaaatgccaaaagtgtcaaattcgtcggcaaactttgcacattccctccgtctgacaatgctaaagaaacacaaaacaaacgatgcccaagaatttgttaatgaattatgtttactaccggtttcgccacggcattcggggcaacgaattcggggccgagcaatggcggacgattcgacgtaactttccaagcaagaaagactaaaggaaaggggagggaagagaaggaaacggtgagagacagagagagagagagaaaagaagggaaaagccaccaaaaagtgtgttggcagaagagaagctttggctgtttgtacctgaaaaggagctgaactttaacaaggaagaaaagaagaagctaatgaaagagagtggaagagaaagaaacaaaatttgaacaaaaagtaagcccaaaatcggagtgggcccagagaatcgagaaagccaaacttttctcgactcggagtcgacacttccgagaatatcactaaaagcattgttttttcaaaagacctacacacttattaacccccccccccatttgacctgtccaaacaaattgggcaagtgagcagtcgttcgatgcgttccaatggattgcctccggcgccgtttttctccgtttcctttggcctttcttccctttgcttctcttccatttgcgcttctttttccctctccgacattgtcgacattattgggaggagaaaataagcgaaagggaggaagaaaaggacaa

SEQ ID NO: 10121 - DNA, 3417 bp, Heterodera glycines
  unsure (1)..(3417): unsure at all n locations
ggggtggtcgcatcaagctgattaatgatgggagaggaaacagcagaagggaggtgccaactgctcccgccccgacgggtccctccctcctcttcccctcccctttcgctcctttcgcttcatccagtcaaaagaatgaatagagataaaggaagagaagaatggataagcagaggaagaagactttccccgtcaccagagcattgtgaggaaacgaatccattgaatccattcccccccccccccgccctaagcacagatcaaaagaatgggccgttggagctgaaagacgagggatgtgatgagatgggtggggaggggaggagacggaagggctcaacttcagtcagctttttattagtccttacgacgtcagctttcagggggggagaaggaatttgaagttggaaagagaactaagcgaacgaaagagagatcatttgtaagatggagagggagggatgacgagggaatgggcaaatgtgttgtttgttggggggggagtacgcaattcgatgtttctgtcagcattttctcgagcaaattggccattttaagtgggaggagagagtcatttgagtcatttggggggggggggggtgcgactgatcaatcaactgatcaaaagacaatcaccaccacgcgtttaactgatcagtcaatgaccaaaagatgtttttttttgtgttccatttgtttgactttgtttaaaaaccatccaaaaatgagtggtgcttcgatgattgtttatttatgaaatatcacaaaatccatcagtgatcactcacacattccaaaaatcaaaatttctggttgcaaaaaatgctggccaaagtgattcggctaaattcgttttgcgtttgcattgctccgatgcgtccgccggtgatcagctgctgatggacggaactgagctgtgcagtcattcgatgcaggatcatatcctggtcaatccgtttgcactaaataataaaaattcaaaaataaagcgaaatgaaaagcgaactttgtaacggcgattttggaaccaaatctgaacagagtgagcaattaatgaacaaaatgccaatgtttttctcgccttaatttgcgtcggtgtcagccccaaatcgcgtgccaattgctctctctccgaactgttcacatatttttggcgttcaaagtattgttccaaattggccacctcaaaatgcgaaatttctccacttgaaatgccattccatcccttttttggtgccaatttccaattttccccgccttcgcccaatttcttgttcactcacttgttccggcgtgaaaagcactcgcggttttcgccggttgtgctgagttcgcagtcgaatgggcggagaaagctgccgacaaatggtttggcattgctgttgatccgatgaagactgttcttttcccttttctccttttcccccttctctctctttctctccttctctctctttttccctttcgtctccttttccttttcttccttctctctccttttctctttcgcctctttctctctcttttgtgctattttcgattcctttgctctcctccttttcctctttttcttctttgtcctcctcttccttttcctctttttcttctttgtcctcctcttccttttcctctttttcttctttgtcctcctcttccttttcctctttttcttctttgtcctcctcttccttttcctctttttcttctttgtcctcctcttccttttcctctttttcttttttgtcctcctcttccttttcctctttttcttctttgtcctcctcttccttttcctctttttcttctttgtcctcctcttccttttcctctttttcttctttgtcctcctcttccttttcctctttttcttctttgtcctcctcttccttttcctctttttcttttttgcctcctcctcctttttctcttctctctccctccttttctgctgctgcttttgtttctgttctgtcttgcgcttgtctttgacttgcctttgtcgttttctcctcctttctcggcatttcttttgctttcgttgcgcattggcacattttaaagagaagttctagcgaaaaagtatgcgaaattgtgccattgaaattcatttcgtcgcaaacgttgggaatttttgtgtgcgataggccgggggggggggaaagattcgttgctcaatntgggagtgaatgacccccgccacttctgctccccccgcccctcccctctgccncttggcactccttggcatcgttgccgtgtttgccttccctttgctcccccccttggcactatcgtatccctccttatttccctttcccttttccctctgtccgttcatccgatccctcttcttttctcttcttctcccctctcagaatgctcttctccccctttcccatcattcatttagcccctttcttctcattaagtgattgccaaatgaaatggtctttccccaaatgtgccggatatcttctcaatttctcagtgccaaatgcttttcatctttctctgtccaccaattcttttcaaactttgatgaaaagcttaaattcttttacgatgaaagagataatgggggattaaaaaataaaagtaaattggaaacatttgtgcctttttgggttacatttgccgttttcatcattttctttttttattcatttgactattaatccgttcaattggcttgaagacggcgcggaaaaagccgtgccaaagggaagggacgctgctgcagagaacgcttccacccatgaagaggaaacagaaattaacaaatataaacggaaaatgtttccaacttcggcatttcgcccatttcctccgccgcgctttgctccgtttccatttgctccaatttcttcgtcgcactgtttggctccggagggatcagcgaacgtttcgccgacatttcgtcccacgcgtaaaaacgtttcgcctgaggggaaaaatggcataattaaagaaggcaatgatcccaaatgaagaaaaaagaaacggattagaccaaatggacgacggcggaagtccttttgtgttttggaaggggcgacgaaaagcaaaatgaagcggcgaaaacggagaagccgagaaggaaaagcggcgagaaccgatcaaagggacgacccttccgtgccattttatgaccgattgaaaacaaatgaaatgccacggcaccaaatgtggcgaactttcgggtcggatggaccaacacatacaattggctttttcctgcatacggaggcggaaggacggaggaagcgacgggcggaaaatcgcgcggaaaaggccaactgagcgaatgaaacagaaaagaggcaaaagtgcattaagaaaattgggcaaaaaatggacgaaaagccaacggacggacgatgaattttgaaaagcatttaaatcatttcattcgctgct

SEQ ID NO: 10122 - DNA, 1789 bp, Heterodera glycines
gaaaaatttttaaagcataaaaattttttcagccctcataatttttttttaattttccgttttcaagcaattttgggaatattgctttaccatgaaggaattgtttgatcatctcagtatcagacttcctcttagaaattaatgatatcttttatttcaaaatattttgcttaaaattgaaaaaaatttattttcgtcccttttaacagctactcaaaaattgtttttaaaataattgaagattttttgggggccggtggtcgttgatatgctccgccgccagaaaatttttttcttcaactttttgcatttttcttaagaaattttccgatattacgtaaatgcatactaaaaagtcaaaatagttttttatatgacaaaccctccaaagtatgcgtttttattattttaactcgctctcctcactctactgataaaacaccaaaaaatttcatttcgagatggaactttaatctcgtcccactaaattttggttttccaatggtgccccacatttacttcccggacatttgcggccccagacaaaatggtaaatttgcggcccgagttttgggccccaacatttgcgacccggacatttgcggcacatttcttatagtccattttcggacttttgtgtcctaatttttgttgtattttgcggtccaagccaaatcggatacatttgcggtccggcatttgaggccccagccaaaatagggcatttatagccaattcgacagtggacaatccgacattcaactaatatttaaaaataattttaggcatatgaacggaatatttactaataccattttttattgtattaaaggcgtgcatcgatcgttaaatagctaattctgtttcctttactgatttttaaaattaaaagaagacagaattaaaatttgttgttcaagattaaacaatgaaccgctggaaacgttgaaagggaatggcaaggaaaaaaagtttatgtgcaacaggtcaagaatggtaaaaatcattttgaaattttagttggtgtcggattagccatttttgtaggattgtcctcattgtcggattatccgggagccgttggtactcctccttcccttatttaattatgttcgttgggccctgtgctttccatatataagaatttctttaaatagcttttgttcacgattaagcacatctaaaaaattaaaatatgtttctttttatctgaaatttagaacgtgctaattaagccaaatttttcattccagggtttgagaagtttttttaaattttggtttgttccaaaaattgtccgcaaatgtccgtccggaaaagtccgcccgcaaatttccgtctgcaaatgtctggaagccctttttccaccttagttatcaagataaatgatatttttaaaatatttttttgaaaaaatgtaaattttaatccgggttagaaaaatcttgggagataaaagggtctgggtgccgttaggttctgattagagaccggacgggatttttatgacttttatttctttcataaaaaattaccaaaattattattttaattcctaaaacatttgataaattttatttggtagttttatggcgcaacaatttctaagattttgtccaaaaatcagaataaaaattgttctctacttatttttccttcggtgcctatcggaaccgcctgacccaagaacccattattttcttttaaaatagttcaaaacaaaatatggacagtatttggataaattaggagaacaaattacatttcaaattttcaaaaattttcctgg

SEQ ID NO: 10123 - DNA, 3204 bp, Heterodera glycines
agcacatctaaaaaattaaaatatgtttctttttatctgaaatttagaacgtgctaattaagccaaatttttcattccagggtttgagaagtttttttaaattttggtttttttcccaaaattgtccgcaaatgtccgccggaaaagtctgcccgcaaatttccgtctgcaaatgtctggaagccctttttccaccttagttatcaagataaatgatatttttaaaatattttttgaataaatgtaaattttaatccgggttagaaaaatcttgggagataaaagggtctgggtgccgttaggttctgattagagaccggacgggatttttatgacttttatttctttcataaaaaattaccaaaattattattttaatttttaaaacaattgataaattttatttggtagttttatggcgcaacaatttctaagattttgtccaaaaatcagaataaaaattgttctctacttatttttccttcggtgcctatcggaaccgcctgacccaagaacccattattttcttttaaattagttcaaaacaaaatatggacagtatttggataaatttcgctaacaaattacatttcaaattttcaaaaattttcctggcggcgcctgccggcaccgccaggctccccccttgttccccaaaagtttttttaaaaatgcactgcaaaagaatttttaaaaaatctgattttttgattccgatgcacttcacgacttgctaattttcctcaaaacaagattaaaatatttttgtccacaataattatcaaaaatcattggaaatcaaaagttagtgttgataataaaaccgtaaatattaattcataagttgaaaatatgttaaaaatttaaaaaatcattaaaataacacattttaaaatgttttatgccatcagaacccattcataataatttataatctttcgttgaaaaattacagctgtaatagttaggagtgcgtctgtcaataaaactttatgaatattcttaatgcttgcttttatttactgtttttatgaaaatatagaatttttacaaaacttgattatgaagtgaatatttattatttgcttaaaatctttatttgattttataataatataatgcaaacctacaaaggtatgggtccatccctatcaagatggaaatggtcgcctcggaaggttagtaatgaattggatcctcgatcgcggcgggctgccaaacatgaccttccacgaacgaagaagggacgaatataatttgtacacagaaaaactcagaaacgacgaacggataagcagcattgacacgcacattccggtgcgcattaatgcatttgagatgaagggccgttgcagtgtttacgtgcatgaactgtccttctttgccaaatatggagaagccgaaataaatttggcggatgggccaaacaatgagtcagttttttttaataatgggttcgattgaaattgaaaataagtctttggggctttcaagggcgctgatcacgaatctgaactcgggtttgcccatttccgaaacctgaaccagaattcgaacaaaaaatttaaaaaaatttccaaatacgcaattttatggggaaaaactttgaattcatttaactactatttaattgatgcataaaatctcgttaaatctttaccttttatttatccaaaatatctatgtagcaattggcttgtggtttatgttttttttggttgattatttcccctcaactttttaatttttaaattatcccatgacaatcaacaaccttttataaaagtcattatttatcagaatataacgattttatgataaaatctgatacacgggaaagttcggcttatttgttgtaattttttaaaattttaaatattgaaatataatggcgcaaatgaactgcttgcacaaactttcagtaaatttttccaaaaccaaaaattaatatttttgatgaaattttatttaaaaaatctggccaaaaagacgttttttgtaataaggtcaaaaaagcaaataatttgttttgaaaaacaaaaattgtttttaatttataagattttaatcgatttttaaatgtaaagggaaaattcttcaatttagtcacggagttttcggtctctaatatcgggaaattttcggtctcgagcatcactaattcatcccggcatattctttgtccgaactttgcacttattttgattttcggtcccgttctaataaaagccatgaaaaacgaaaaactatgctagaaacacaataatttcagtgtggccaaagagacgcgtcgcgagttgcattggtctctctggcagattcttttggccaaatacaaaaaattttttggcggcgacaatacaaaagagtatttctgctatgattgtgagaacaagctcttctcaacaaaatcgatcataagaccaggatctttcaaagaatttatcatcgacttgaaggtacggtacagggaccgtcccagggggaggggggggggggtacagtatccctccccaggcccctactcacatggaatttataaaatcagaatttttgttgaaaatttcgattttgcatgttggtacacccttcaagcctaccgcacacaaatttttcaaaaaatttcgctaaacttttcccacaaaatagcatattttgtgagaaaaaatctgccaaaatgcacattcttccgtctcctatcggcaccgccggacccaaagaatccttaattttaatatataaaatgtatttaaataaataatatgaaataaatatcatctcagcaaacactgatattgaacagtcgctgctatgattatttgcacaaacaaaattttgttgctttgcgcgcctctctaaaggcaattggctacgaaagaatcggcgaagtgactatcacagaaccgggctgcggtgagcaatcgcacacgcggaagtttttcgaattattgtcgtcacaaaagttatttgaacggtaggttttgttttaaatatctaaattaaaattattttcaaatattaaaacagtgaaaatccttgaaataaatacgccttttaaatttatatcattaaggaatgattttatttgtttcgacaacaaattttataatgcagaaagtgttattagaaggatcgatgatcctcacattttcgtggagggaatgcaaaaagacgtcagaattgttggtgaaaaatacaaccaga

SEQ ID NO: 10124 - DNA, 5451 bp, Heterodera glycines
aggatttttgtgcctatttaaatgcctatttttacaattttttttctgcctttttaggtgcctattttgcggattttttgtgcctaaaaaacgaatccctagtgatcagtgcaaggaacttggctctattccagtaagcgcgtccaatgagtgagcaccctcaattttttagatcataacttttttcttacttcgtcaatccatacattcttagtattgtatcaatcgaaagtaagctttcgattgataccaagaatatatgggttgaccaagtaaaaaaagtaaaaaagtaagggtggtcactcattggacacgtaaacattggttggacgcgtaaacttgaatagagccaaaatttttcttcaatataacaccccgttttagtggaaccaacccctcctctcaattccaacattaatttccgaatcaggatcccgtaaaacaagactttaatcccgaaagccggcccgggtacagtcctcgaatttatgcaatgaattttcaaaaatccggtctctacaaatcagtgatcaacaaaggaatctgccggcttatccttgcaaatggcaccccttctgatcaatcacccgctcctttcgccgatcactccgtttcgcaatcgttgagatttgccgttccctcgcgcttcagccgtttcatttcttttcgctgctttttgatcactttctttagaatttttttcagatttttataacttttatccaattctgatcgattttctttcaaaaaattaaatttgtttttccattttgtgacacgcaaattcgttaaaaaatctccaaaattcaacgaattaaaaatgcgtaatttttttgaagttttaacttctttaaattctccaatttggcataatccgtcaatgtaatttaaaattccttgtgcggttaatcgcttttttctttccaaatttagcaaattctgaaaattcgaaaattttataattaaatgtatttagataatttattcaaaattgtttgtttgacaatgcttttccaaaaattctgctcctttttactgctttgttcgcccgtttccttctaatttcccaaaactcaaaaattgaaatttttaatcctgattaattttttaattggtccatcattttcccatcgtttcctactgtaaccagaagtgccgtcttcggatacttcatccaaatgtgcagcaccgtttcaattgcactttggtgctgctcaatccattctgtgccggcggaatacacaatttgagtctctttgaaaatgcccggctgagtgcccaaacgattccgcgtaaatccgaggtacaaattgccaatggcaaaaagccttgatttccgttcatcctaattcaaaaaaaaagtgtaaattgaaaaaaccaaaatttgttttgcttttcctaatttgatgttcctttttctcacttcaattaacggcgtctctctttgttgagcacgaaattggtcaaatgcaatttcaatgagcataattcccattgaccaaatgtcaaattttgtgcttatctgttgaaaaaaattaccaaaatttaaattctggtataaaactttatcactctgagtttgacttagttttaaatttttgtttttattttttaattgccatttcattttttgggttttgtacccaattttccggcacttttttaatgttgccccgctctataaacacactgcttggctctgttcgccgtaatattcgggccctgtgtattccgggcttagtgcgtgctcttcgccgatcacaacacattcatttttgttggacgtggagaccaacttggcaccctcgaaatcgatcagtttcaccaccaaatgcccatctttctccacgtacaaataatttctcgggtttacgtccatatgaattgcgactgaagcgcaaaaaaagaaaagaaaaaattgaaactaatacatttgaattaaaatttatgttaaaatgcttactgttgtggaattcgaccagcggtcgtgccaaccctcggatggcattgaccatttgctcgtcactgtcgtattgaacagccaatcggtcgtacaaccgatcgtggaatgaatccacgcccatttccattattatgatgcgctctccatacggagttgtgatcccgcttaattaatcattagctgggttaattattgcgtgctaattaattgttttttctcacgcgtcaatcattgtgatcaaatgttttctctccatctctggcaagctttgttgaattctctccattgttttgatcgaatttctaaagagggattcgtcacccgcctctcttccactgtaaaatttgacaccaacgcaatgaattacaccgtcagcggaggtgaaatagccaatgagtaccttttgaataatacgcgttatgctaattaattgtaaactaattaattaattgctttaattaattgattatttattgttttcactttcgtttgctcatcatttctctcaactttaatgttcaaaggttctttgtcattaaagtatgacttgtaagaaatctcaacttgaagcgattctattgaatattttccgcattttgttgcattatttgtgcaaattttttgaataaaaataaataagaaaaacaataataattcttctattagcattttaactaaaattttaaaatccttgttaattaattttggttaaaagttttttttggttattatttaaataaagattaattcttttaaaattgcagggaatggaaaaatgcataagcatcagaaagaaaatttatacaatcaattaattcttgttaaaattgatattgcaaatgaattatgacagcaatagcaaatggagaataaaaatgaaggcaaactatgctttaatttttaatattgtgcaattaattaaaaaaacgctttttcgtttcccaattaatttctgatctttggggtttttgcatatatatatttcggcattatcacaagaaaattcgaaaaataatatcatttaaaaatcaaaatctttcaagaaataacactcttaaagacctaaaaattttgaaagaattcgataatcaaaaaactttttcattttcaaaatgaatatttaaaaaaaaaaaatttctttgaaaattatttttaaaacggcggtacgaaaatggcggtacgaaaacgaccctggccgtataatttaatggtttaaaattttcaaaaatttgaacacaacttttgaaagttttttgggtggccgatcatttcgtcactgagaaataattaaaaaaaaatattagttaaatattgaaaattcttttgttttatgtattttttatatacttggattggctttctcgcaacttgtagacttaagtttccgttttatttccataaaatgaccaattcaactccgacaaaaaaccagggatcatgatgcattcatcaataaatttgttaaaaggaatgcttaaagttttcagcgatggtaacatccgttgctgattatgaaaacgcgccagaaaatagcattagagggaaagtcgtaatgcaattccctctatgttgatcaagacaataatttgtgtcaaattttttgcttaatttatgcagaaagcagcagcagaaaatccccatcgatatctcagagcaatatcatttaggataacactcaattcgtgatcttcgacctcaaaacccttataaactcatttttcgactttttaaaatctaaaaaataatttcgaaaaagaggcttccaccggtggtatgtacgcttacccataaataatttttgagaattttaaaacaattaatactttcataagatagttttattgaaattagccaatatttttttaaaattatgtctcagtgacgaactgaacggtgacgaaacgatcagtgacgaaatgataggtaaccgttttttgtccattttttgctaatatatttcagcattctgccatttattcgtacagattttgaaattttttgtccatatacaataattcgggatccggtaccaataatcagtttatttttcaaaatttcaattttaacatttgttcttttatcacaaatcttttttctataagtaacgtatttttcaaaactttttctttgctgatattaatacattattgcatattttcttttacaaacaatgcttctattataagcaaaatgatatgaattaaccttactaaattgatgctgtcattccatatgtcacattttgaacggaatatttattgaaacgaaaacttttattaaatttttgcgagagaaaaggtagagaccggcgcgggacgggatccgggattttgcgggatcccagtccgcaatcccgcattttttggaaaatgcgggatttgcgggattaatcccgcgggatcccgtcccgcaaagaattttgagttccaatcccgcagcgggatccgcaaatttgattttttgtgcgggattatgcgggattttattatttttttgaaaatttttctaagacagaatgccaaatatttttaaataaattaaataataaatttaattaaagaactcatttttcatcgcaaatttcattcaaaatttgtgaaattttcccggcggcgcctatcgtcaccgccggaccctaaaaatccctatttttcttgcaaaatttgctcaaaatcgcaaaattttatttttttcggacaaaatctgttaacaaaattttcccggcggcgcctatcggcaccgctgtaccctcctccaagttcccaaaaagtttttgaaaaaatcgcgctgtaaaaaacgtgtaaatagtcactccttttcccaaaaatgttctaaaataatgaaaaatgacaaaaaaaaagattttgataaaataattgaataattttttcaagcgaatatactaaaaacatttgtgaaataccttttacttggttaagaattaaaaaatttagcctattagaatatttagaaatttttttattatattgtatattttttgaaaaatttccgatttccgacgtttttggggttggaaatccgatttccgacacttccgaaaatttttggggcctcggaatgccatccctgatagggaccgccggaccccctgttcctagttttttgaaaaattgcaccgcaaaaaagtggttttgaaaagaaaaaaatagtcaaatttatgaaccgttaatacctaatttgatttccgatcaactttttaccgtcggatccaatcgaaaaatcttagtcgacccatcagccccttttaatgcatcccgccagcccctaaaaattaatttttcagcattttttgatttttggaaattttttgaatttaattgaaattttttcgaattttccaaaatcccgcaatcccgcacgggatcccgcaaattttaaatgcgggattagcgggatcccgtcccgcaaaaaattatgagttcagtcccgcagcgggatccgcaaaatttgaatttccggtctctagt

SEQ ID NO: 10125 - DNA, 1618 bp, Heterodera glycines
aattttctgaagaattttaagaaataagaacaaaataagtacaatagcccgaaatcagaacatttcttacaaataagaacatttttattttgtaagatttggaccctccaaatcagaacattattcgctctagtccagtttatgcatccactcgactttattattatcagccaagtgaaatccgacttttttcggcgttcgttggcaaaaagaaagtgtaattaaaaatcggtaaagaaatagaaagttgttactattttgtgaaacctcgtaatacacacctaaaatcaactttcttgccattgcttacaactttaacaaattaactatactaatttgatgtgtgactatgtatgtcacactttgaatggacaatttttcgaagcgaatgcctttgcaaaaacaaagagagatgaaaaggggaaaagagaattattattgtaacaacaaaagtcaataacatttacgaaatcaacacccgtaaattcgatttctcttttcttattattgaattattattccaatattccgaatgttaaaaataaagaagtcaaatcaaacgtttcattccgttccttgaacaaaaaatcaacttttacatgaccaatcataattttcgcgatcaatcaaaggcttttgtcgatttagtatcattttaacaaaaaatcagacttaaatgttaaaatctctgaagtaattcatttattgattagttcgttgggtttgctgccgatttttttattatcggtttgttttttcaattattgtaatgatttccaattgatcgaaaatattataaaagtaattttaatgatttttttaatagttttaaatttttttaaaatttttactcccattttaaaaaacctttttcatttgttaggatttatttgcagttctgcaattttagtctccaatcaattttatgacacccaaccacaatttgcgcgattaattaaaaacgtttaccgtattatctctaattatcaagagagagagaaaaaagtgagaaagaagaaagcagtgagagagaagtaagaaaggagagagggagagagagagagagagaaattaaaagatgagggaaaatgaacgatagagagcgtgataaaaagaaggggaggaaagagagagagcgagaaaggaaaagagagagagaagaaagaacaagagagtgaaagaaaaatagagagagagaagacagaaaatttgagagaaaaagaaagagatagagagagaaaaataaagagagggataggagtgaaagtagttagagagtgtgaaaagagagagattaagagaagaagagggagagaaagtaaatgagagagcgagactgaaagagagaaagagagaagagattgagagagcaaaggagagtgaaagaaaaatagagggagagagacagagaaatttgagcgagaaataaagagagagagatagagttaaagagggggagagggagagaagggaaatgagagagcgggattgaaagagagagaaaaaaataaagtgaaaaacagagagagagagtaaggaggagacagagaaatttaagcgtgtgagagagatcggggcgtgtgggagagagaaagagaaagtgatgaggaggtaaaag

SEQ ID NO: 10126 - DNA, 3085 bp, Heterodera glycines
tccaaagagtcatgctttttatagtatcgagaaaattcatttaatcaagaaatattttttgtgtgcgtcgaaaatgtggaccgaaaaacaggagttttggttggaaaatcggcaacatggagttggaaagggggaactaatgggcgggaaagtgcttaaaacaattaggcatttggcttttcaaaaaaaacgctgagaaattttttgaaaaactttttattggtttctaaattttttaatttttccgggggggactgatccggggtcgggcatgtgctgctcccgtttgtcgcgatggacacttttttatttaacggattttctttaagttcaatttttttttctatttttcttggattttcttttattttgattccaatctctgaatatttaaattccttttttggtataagtgacagaagttttggtagaatattttttttaataacagggtttcacgggttgagcgcacctcgttttgatttgcgacgtttcggtacagtttttttcagggggatatattttttttgaattctcattcctaatttcttaaaacgaatcttaaaaattaacaacgcccccttgtctggcaaatatttgaaaatttttattttctataaatataaaaaaaaaattatttttacctgaatttgaaatggcattgaaaactgtatcgaaaacggagcaaatcagaagcggggtgaagtcatggggctttcctataggctagcatcatcaaccgtcggcaaaagcaactgcctccgctgagcatggccagtgtcaatagcaataatgtcaatgttctgctacagaagaagcacaagcagtaccagcaccaacacatggacagccctttcaacatcagcggcagcagcagcagcggacgtgccagtttcggcggcggcaaaagcaaatggtggcgcaatgtgatgtgcggcgccgggcgcggtggtgccaagcaaaggcatgtgtgttgagtgccgaaaaatggccatttaaaaatgatgaaagccaaaatgccaagattcccagcgctagcccttcaaaaaaaattgtttttttttgaaaattggcagtttttaatacttttgcatatccacttcccaaatcagaacctgatgaaaagtcgaaatttgaaaatttggttttcggctttgggttcgaatttagttgaggttcaaaattagccaaaatcaatgttttatcgtaattattaccccgtaaacaccttaattaaaaaattttcacatcgactcttcgaaatttcaaaatgttcgtttttcagtgaaaattggcccagaaaacggcgacgcggcggcgtcgacactttggacaatggtcaccaaaacggaggtggcgaagaggtgacggatgggctttatgagaaaaatattgctattctcaaactcatatttaaaacttgtccctccccttttttccccggggtaaaagttaaaaattttccaagaaaaatcatagatattttttaaaagaaattcaaggggaaaaaattgaaaaattctaacatttattgaaattttataaaagattcgaaggatttttgaaaattttatgattttttttttgctttgaattttgttataaaaaatttgaagatttttcttgaaaaatttctaagtttaaaattaaaaaaaaatttcggcgaaattttgtcctgttctcttttcccccattatattctcctcaacatcgccaggtgatcacgcttgactccgactcgtcttcctcctccacctctgacaacaatgcgcgcagcgctgccggtgccattgccaacctgcgcatttcggcggcgactgccaccgccgccggtggtgtgcgccgctcttcgtcctcatgctcctccgtcgatggcgccaaatccgccggcgtcgaattcgcaccgccgccgacggcaccggcacgcattggctgctatcaacgccggcgcagcagtggcagcagccgcacgggcagcagtagttcgtcttccgcagcgccgttcccgtccagcaccaccaccaccaactcgtcggcatcattctcttccaacacgtcattgtccaacatttgctttggcaccgcctctcacggcagcagcaacaacaaccatgccgtcgtcgcgttgtgtgcccgtgacggtgatgatgatgatgacggtctgaaggatgtcgcgttgccgcccatttgtaacgatgaggacgaagatgatgatgacggtgaactgcttgaaagcgttggcggtgaagatgatgatgacctcgacaacgttattgaggtggtttatcgatcggttgcacaccaataaatttgttattgattgatatgctcgttgaccgactgatcaacggctcttggcggactttttgttttgaagcaatgaactttatgtaaaaaatggcaggaattctccatatggaaaagcaatttgaccggattttttgctgcgatttggattcttgtttctttttgccttattattgggcttttatcgccgtccaaaaattttaatcattctaccaaaaaagcaaatttcgcatttttaaaaattttacaaaaaattaagaatttttaaatgtagtttttaaacctttttctgtttgctacaaaatctaatctgcaattaatcgccttaaaggcgaattgggtgccaaaaaatctgggtctgatcactccaaacatttttccctcctctgatcacctcttttcaacatcagattgaccaaagtgcgccgccgactgttcatcgccaccagccacaacaacaaaatgatgcttcgcaaatgatggaagaggatgaggagttggattgggactgggagtttgaactggtcgaacatgaaggcttcaagctacagccgactgccgcttccgatttgtgttctgctgcgttgacagtgccttcgtcatgttcggtgccggcagcgagcagtccatgtgatcaatcggcgagttccatggcggcgagcagtccacaaaaccaaccggcgacttccatggcaatgaacagtcttagcccatcggcgacttctattgtggcggcgagcagttcgagtcatttggcgacttccatggtcgctagcag

SEQ ID NO: 10127 - DNA, 2071 bp, Heterodera glycines
gcaatgtgagcgccatgaattctcaatttttaatttaaaattaattaatttaaatttaaaataacaattttttattttatgctattttttactaaagaatttatttggaattatttgaaaatgaattttatttttgctaaattcaatcggctctccgtgtccaattgcgccctttttgtcgcgcaaatggtccttgagggccgtaaatcaatgccaacactctctccgcttgtgtgccatttcgaaaaaggcacggaatgcgcctggcggggaatgcgtctgaatgtttctggcaaagtgttacaggacaaactcaaattattatttttttaaaattctttttaatttttcagtaccaaatttcatgttttcaaatttgctttagccgtgttcgtctaaattgcaaaattttaaccttttttaaggcactttaattattaataatttttacattattttaaattaaattaaacaaaattattttttattaattcccttcccccccccccgttttgcagctgtgccacggcttttccctggacgccatccataaactgttgcagcgttcgattggtcccgtgccgtgcgcagtgtccgtgtcgtcgacccacgcgcgcttccactgcgactgtggcgcggagcgggcggcgcgctttctctacgcggagttggacgccgcgcggcgtacgctgctgctgggtcctgcgcccgagttccacgccagccgcgagtgatggtgggcggggggcagtagcgtttcggcgcccaccatgggaatttttagtgtttcggcgcctagatttttgcgccaggaattttgggatgtcaaaaaaatattaaaatttgctaagtatattttaattactaactgcttttttaaaaaacgacattttaaaacaaatagtaatttagacatttttgagtttttacagttttttattaaaaaaaaatattttgattaaaatatatttgattttatatttaaatcaattaccgtatcacaggtggaggggggaaagagaaacggacaatcgccgacgagagagcacatgcaaaatggagtggctggcgcagacgagaaagggagggggagacagagagagagagagagtacgcggaagttgttttttgtattttgcgtcaaatttttccaaaaaatttctgtatgacaaaaacaaacgctggtccactttgtggtcaagtggttaacagcgagttgtttccgctttgccacacgaggttcggatccccgtgcggggattttgccaatttccgattttaattttaattcccctttttgttgtacaaagaattgacgcaattttttcatgggtttacttctgctgcatccactaattagcgtaattacagttttgttgtgttatatgatgtccaaaaaaaccacgtgccttttttttgtttgccatttttgtttttattgtctcacttttctcaccaaatcttttccaaattcgttctcaaatattcattcacacacatttttaattcactcatttccatatggtaattattattatttttattgtttaatttaactcatttttccatttttttttgtttctcaggacttttgaaaaacgaacaatttcagatcacatttttgtcattttaactaacatacatgcctattattatgatctgatttgaatctatatatcgatagaagcaaaaggaaaaaacaccaaatatgccattctaactcataattttgaataatttttctcttttgttggttaattattcctaaagttggacaattatggtataataaatgataattcctaaaattaaaaatggtcattgctttgattattaacatgaaatatccggaaaatttaattgagtattggttatccaattttcacattaatatttaattgtccaactttgaattttttgcaatttaatccactgaactttttggcaattttaatttttttcatcaaaataagcataatgaaatacctaacaccaaacatattttttgattgttttttaataatgcattcctctaaatttgatcaatcacaattttttaaaattaaaaaaa

SEQ ID NO: 10128 - DNA, 738 bp, Heterodera glycines
ttgtatcgatgcgagcgtggattttgtctatgtttgtcatggcattgtgttgaacttttgttattgtcgcaccgtaaattgattttttttaaattttaattttcgactttttgttcgaattcgagtccgggattcggaattcgtcgcaatggatgtcagattcgtgatcagcgaccccgaaaaccccctagaaatgtgttaaaaaaatttttttttatggtctgtaaaccacataagtaccgaaattctctcacttccatattttatgcttaaatgcgatttggacccatttcgttccgaggccaattccatgtctcgaattcttagttcatgaaccgtgagcatgtctcttaaccgattttctggtcggtctaaattttggtcaaatctcggctatgccaattttgacattccaaaatttggcgatggcgatcaggcctaccttcttcaaataattatttggccacagatttgtacaatggcgcaaaaaaaagttttaacgggatttttcccggtcccggtcaaaatacttaggtactcagttgtacgtgtttttcagtacccggtcccatacaactctagttgaaatacaaaatttttaataaaaataaaaagtcatttatttaacgacaaataagacgataaattttgtaagttaataatttgtgtacaacgattggaagtggaataactaacagcaaaatagtgctgttcgagactgaaaacacgagacttttt

SEQ ID NO: 10129 - DNA, 2135 bp, Heterodera glycines
ctatttcgaattgtttatttaatttgtttttgttatcctccgattttacaccactaaaattgaaagttttagcacctattttgaggtttttataacctaaaaacgaactatttggcagtttttagcaactaaaaaatcgtatccctagtcacacattatatgtatatattgtatgtcaccaaattaaatgccggaatttttcaatttttatatggactcaattgcggtgtgcacgacataaattagcaatgaaaattgcactttcagatgcacccaattaaatattcttgatatccttaatccgcggtctctaataatatttaataaattaaaattataaaattgcttaatttaaaaaaaagaaatcccataagtagaattttgtaaatttctttttttcatttaattcattcacgacaaaatcaatttgatatccacatcagcttattttactccatattccatttccatttctctcataagataacaaataatatttttttttatattatggattcattttgccctattcactttttattttattttaaatttaattattatttcatatttgtaataattcgatggcatttatgaattttaaaagatgaattagtagataatattcatacataaattattgattttttgccgatcaagtcaatcgacttgggcggccaatccaaaaggtttaggctttgtccaaaccaattttgggcggatgttgtgacctgctggggcaaaacctttgggctattttttggtgcggttaaaaaagtacagaaaacaggatgatacccttcactatttatctttatttatttatttatttttataatttcattaaaattctcttcaaattccatactatttcttccataatatttttgttgaaaaatagttataaaatttaaacgatttgattcaaaatttcagcgatcaaaatttcagcgattacattttttcggcgttttttggcctagggctcttttgttaacaaaatgaagtttttctttagtttgctaattcatttgatcgcttattttgggcggaggtggggggcgagaggaaaatgttgctattgcaatgtctccaagcagctgatcaccgattggaacggagaaggggcgccattgtaggtacaaaaaatgctcatttatttgatcgccgattttgggaggggggcgagtggcaatgttgctaaagcaatggtcccaagcagctgatcaccgatcggaacagagaagggcggaattgctaaaaaatcttccttaatttgtttccaaattcatttaatagatttttcggcgattttttggccgggggctctttgctagcaaataaaggttttttgtattttgctcatttatttgatcgctaattttgggaggggcggggggagcgaaaggcaatgctgctaaagcaatcgccccaagcagctgatcaccgatcggaacggagaaggtcaccatttgcacgtacaaaaaatggctaataaaatagagtggaatgcgatcattttgtcattttcaccccgggattgagccaattttcgccaattttattactatgtgacttccttatttaattcaatttaatttaattatttttaaattattttaattcattttaaattataattattttaatttaattcaactattttttactgtgaataatattttattatttcagttccaaaatgccttgggtctggcatagcgcagggcaaggtcgccgtcgccaacaacaacaacaacagcattatggatcggtgaaaattcttttttttgcatttaaaaattttctgtttaaatttaaataacaccaaaaatattgtcacgcttttctgtttttttcaatcttaagaatttaatcaatccttttctttttttagcctgtaaaatttttaattaagatttgaattactacggtcttcaaaaaaggctcaaaatgccatttttgtgttttatttttttttcagtaactttctaaaattattttgtaaattaacctacaaaaaatggaacaaatttgagactgtttgctaaatggtttttaaatagtgttaaatttttcagatacaacagaattttaaaaagtgaattgggcttaaaaagaatagtaaactgttt

SEQ ID NO: 10130 - DNA, 1117 bp, Heterodera glycines
  unsure (1)..(1117): unsure at all n locations
tgcaccttagaactctatgaaaccattcgtcgcattcaatatgcagataatgacacggagttttgatcgcgtccaaagaacccacctcaaaatgttcctggaaaatggaacacattttggggtggggggtaaattgactaaatggaatttatctgttgcgatttttaatttaatttaaccaaaataagtgtaccacaaatatcagtctgaacagattaagaaattgacaccaaattcattgttagaaaaaattaagcttcaatctcaatttgttattaaaaagagcgtacaattcatattgttagtaaatgttgggcgcccgccctcaaattgttagcaaataattatcggctcaaatttttagaaattattggctcctgacccaaatgttagcatataattggcgccttgatcaattgttagcaaattattggcgtttgactcaaattgttcgtaaattattgcccctgaccccaaatgttagcagataattgttagaaattattggcgcccgactcaaaaaattaaatggcgccaaaaaaccaataatggcgccaaattcaaaactaaaaaaataaaatggcgccaaaaaaatcaataatggcgccaaattcaaaccaaaaaataaatggcgccaaaaaaccaataatggcgccaaattcaaaactaaaaaataaaatggcgccaaaaaaccaataatggcgccaaattcaaaactaaaaaataaaatggcgccaaaaaatcaataatggcgccaaaaaatcaataatggcgccaaattcaaaactaaaaaaataaatggcgccaaaaaaatcaataatggcgccaaattcaaaactaaaaaaataaatggcgccaaaaaatcaataatggcgccaaattcaaaactaaaaaaataaaatggcgccaaaaaaatcattaatggcgctaaattcaaactaaaaaataaatggcgccaaaaaaataatgggtgaatttaaatacaaaataaatgtgccatatttattttgaaaaatagaaaaatgacattcaaaactcatntttattgaggtcgctaatgcagcccgatggtcaaatggttaaagcgcttggttatatatacacaaagttcaaaacc

SEQ ID NO: 10131 - DNA, 2546 bp, Heterodera glycines
tgggcgcccgccctttattgttagcaaataattatcggctcaaatttttagaaattattggctcctgacctaaatgttagcatataattggcgccttgatcaattgttagcaaattattggcgtttgactcaaattgttagtaaattattgcccctgaccccaaatgttagcagataattgttagaaattattggcgcccgactcaaaaaaataaatgacgccaaaaaaccaataatggcgccaaattcaaaactaaaaaaataaatgacgccaaaaaaccaataatggcgccaaattcaaactaaaaaataaatgacgccaaaaaaacaataatggcgccaaattcaaaactaaaaaaaaataaaatggcgccaaaaaaccaataatggcgccaaattcaaaactaaaaaaataaatgacgccaaaaaaccaataatggcgccaaattcaaaactaaaaaaataaatgacgccaaaaaaccaataatggcgccaaattcaaactaaaaaataaatgacgccaaaaaaacaataatggcgccaaattcaaaactaaaaaaaaataaaatggcgccaaaaaatcaataatggcgccaaattcaaaccaaaaaataaatggcgtcaaaaaaaaaaacaataatggcgccaaaaaaacaataatggcgccaaaaaataaatggcgccaaaaaaataatgggtgaatttaaatacaaaataaatgtgccatatttattttgaaaaaatagaaaaatgacattcaaaactcatttttattgaggtcgctaatgcagcccgatggtcaaatggttaaagcgcttggttattatatacacaaagttcaaaacccgggctgttaaagaattttcctccgcttgcgtagcgatgaaatgcctccgcttgcgtagagatgaaatgcctccgcttgcgtagagagataaaatacctccgcttgcgtagagagataaaatacctccgcttgcgtagagagatgaaatacctccgcttgcgtagagagatgaaatacctccgcttgcgtagagagatgaaatacctccgcttgcgtagagatgaaagctctcacgcttccaaattcctgcaaaacgccccaacgctgatgaggaagaattggagaacccgaaaagtttgaaagatgttctccgttatgcaggagctggaacattttacatcactgcaaccattgccgacttgcattaccaagtctatgatgttcgaatatttttttttgctagtaaattttttttccattagtcgtgcccgctccgagtgcgtggtatcccctgccgtcgcaaactcccaacaaatctcacatgtgattcgtgcgggcaaacagtggagaagccagtcaaaaacatttatctgaaaattgttttgcaagaccgagacgacagcacctgcactcaacgtgcaacaattttctcggcggttattcaatttttacttttttttaatatttgcacacccaggtcgcagaagcgtttctcggacttaagtcaattgatgtccaagaaatggatgaacaaaaattgtatgggcattttgaagccaaactggggaaaacaatcaacgcaaaagtgaccattaaggtaaatggttttgttggacactgctttttgtagaacaacaaatataggaagacagccaaaactttttcggcctcgactgggtggtcactcgaatttataagtcaagcgaaaagaaaattggcgatgctgaaaagaaagcggttgaaaatgaggggacttcttcaaaaattgctagattggattagacattttccatacatttggacctgttaaaaaaatataaatttatcacattttgcgtgaataatgcacaattatggacatgaaacttttttattggaatgtaatttcgaaattaaatgctctttgaaagatgattcgtcataaattacaaaatgagcaggacgtttcggagattttatttttcttgaaggccttcaccaataataaggctcagatattagttgtttgtcgcaacatgcaaaaagttacctttttaacattgtgtccgaaggaaggcgaaaatcgcgaaaatctctttcaattaatcaaacaaaatctattggaaagcatcggaccttattcatttgtacggtacgtataatattatttttatattagccaaatgaacatttttttaaaggtttgaagagcagccgctttcatcagatgaagaagtgctgaatctgttttgatataagttattaacgaagtctgggcagtggaatattttgaagttcatttactatttcatttgcttcactttgtgtaaaatgtccacgccgtttcaaaaagtttaccatggaaatcacacagagcagaaagacaggaaaaattataagataaagaccaaaaaataaaatgattttttcagaatttgtaatttgtaaagactattcttcatcactatacccattcaaaatttggataatcggttttgttgttattgttggtgtgttattacttttctgcatttttttttgtattagcaaaatttctttt

SEQ ID NO: 10132 - DNA, 6148 bp, Heterodera glycines
  unsure (1)..(6148): unsure at all n locations
tttttgtcacaatacccaacttgcctggtgaggacttcaaaagctcgtctccgacgcgtacttgcgcaaccgcctgtgctgcggcaacttcttcttcggcacgccaacgccgcccgcgccatgctgctgcagcacaaagcgttccgcaaccgaactgatgatgggcggtgttgcagcgttgccaattacgcagcaatggccggtcaccgcggtgctgtccgccgcctcgcaacagcaacactcggagcaggaagatggcggtgctgcggcttctgcgctagcgctgccgccgaaaccgctggcacccaattttccggcagcagcagcagcacgcttttgcgcctggaacgacgatggcatgggcatcatgcgcacgcagcgcgacggtggtggcagctgttgctgaccggatgactgctggccacggctgtcactatgttgttgttgctgttgccgttgctggtccatactgaaatttgagtttttaaatggcaaataatcatgccaaatctggtgggacttttggcactaatttgtaagattttggaaaaatggcggcatcctctttaagaaatgaattttttttaaatttatataagaaaatttcttatatttttcatttttttttacccaattaatctttttttaatttaggtaggagctaatttgtaaatggaagatagtaatattaaaattaattattattttaatttcatttgcagaaaaataaattataacttgccttaaatttaatcataaattaaacatggtatgacatttagaatgtcctaaattttttatgaccataaaaatttgactcattgaattccttcagaacttttttcagaaactgccaaatttcagttcctttatttattataattagggattacatttttaggctctaaaaaccgcaaaaataggtaggctttaggctctaaaaaacccaaaaaataggcactaaaaatgcaaaataggctctaaaaaaaacccatttttaggggggtgtaaaatcataaaaatttttcaaaaaaggtaaaaaaattaagccaaatcagtattgagataaatatttttaaaatcacaaattcttgtcaataaataaataaattctggagaagaatttttgaaaaattttcgagtctattcttaggggtgtattttttgaaaaaatttttggtcgattcttagggggtgtattttttgttcttattacaattttgttaataattttgggtaaaatgcaaaaataggttctttcaaaatttgttaggctttttaggcgctaaaaataaaagtctagaaaataggcactaaaaactcgaaaaatagcttaacaacagcccaaaaaacatgtttttcatgcgtttcaggccacggagagctcaggaaaaaataggcttttgcctaaaaatataatccctaattataattagatcgaccaaagagttctattatttaattaaaataacaattaaatttgagctaaagtacgatttattattctgcaaataaaattaaatttaaatatttctatcatttaaaacttttttttaggttcgccccattgatacttttttcggttccacctagcaccgttaccacatactcatttaaaggaaatttcgtacaattttttttttttttgaaaattcctatccattcagcatgacctacctatattaaattacactgtaatcttaaatttttcatgctctcaattcctgaaataaaataaaataaaatgcctacattttccgggatttgtatgcgcaacggtcgactcaagtcggaaacggagggggncggcggtggggggcggcgctgtcaatgcccgcgttggcatgatggcactccgtcgttgacgacgcttcaccgatgaccgcaagctgttcagcggacgacgccctcctgcgcaatttcgtgccgacgacattttggtgtggtttattggcaccgccgttggcattggcttccgagtccatttgtactggttgttcaccagagaatttgttgttttacacaatttacagttgagaaaagcgcgcaaaagcaaaaagtacaatcgtatcgtaacccctatttttgtttacggtattatgtaatacagtaaattcatttgttatttgaacggactgtgctgggagaaaaaatctttggattaatgcaaaagaaaatattgaaaatgtattttttgaacgctttcatataaaacgcaatgccaatctgtgcggtcatgaaaaagtgggggcggcatttatgcaactttggcacaccatttttggcacgaagtgaccgaaaaagcttattttgcgcctttttggcattgtgcagtgccaatctttgcaaaaaaaaaatcgcggcataattttatgaatatttttggcaactttttggggcggatgccaaaaatgaaatgtccggcaatttgtggagtaaaagcgaaggtcaacagaggaggaagtctcccaatttccccaagggtattcaaaggaaattcaaaacagcgctaaaaatagaacgccaaaacagtcagatttggtgtggaacagtaaataatttgccaaaatagctgttaaaatgccaaaagaaagttaaaataaataaaatttatttacgtaaaattgttacaaaaaaaacaaaaattattttaaatgaaatttcaaaatgaaaaaattataaattatttttgaaacagttttttcgcaataaatttaattgtttttattttaatacttaaatcaaaaataataaaaattatactaaaaactataacaaatttattaattgagttttaaagcattactttaaatacgaaaaataaataattaggaataaaaaaataaaaaaattttacactaaaaaaatgtatttaatttattgaaattttatgaaaaatatctgcattggcattttcccgtggcataaataaactgaaaaatgagcccaaaagcaatttttgttttgtgtgtgccctcaggggaggaaaaaagtgtgcaaaatctgtgccgaaaaatgagggcaaacaaaatgccaaaagtccaaaaattgataaattgggggcggaagagaaaagcaataaaataaaatatatggcggagggtagagatgcagagtgaaaattcattcaatcgcctaaggcagaaaaaatcccatgggaattttcattttttatttcattgaaaattgttttcagcttaacagtttgccaaggaattcccaacaataaaaaaaattaaaacgccaaaaaaaaattaaaaaaaaaaaaaaattgggcaaaatcacattaaaagattttttgtgagagataaatctaatttaattaaaataactaacattattttgaaattttaaggataactccgtgcccgtcaattttttcaaggaatttttctaattttactaggtcatatagacctgaaaaatattaaaaaacttgttttagatgctacctttattaagctttaattttgagggcctattcttagacaaaaacctaaattctcacatataatttaaaaattttttgttttttgtaaaaaaatttttcaaaaattttctttgttttgtttagccaaatacatagaatacaaaatttaacaacaaacgagaaatttgtttaaaatttaatgaaaaatgaatttagaattttttttcccaaaaattccaaggatctttcatttatgtaaatagttccgaatgcttaacacacaaaatttaattatgctaaagtgcatggggaatggcagcataggtaatggatttttcctgctagccacggaatgacgtgcccaagtcaatttggcttttgggaatttggaagaaaaattttttgaaatttaaattttccaaaaagaaggcctctgaaagaaaacaacaattaaacaatgcttttaataaataaataaaaatttacaataaaataaattcaatttaaattaactaattttcgttttgatctaatttttaatgcaaccattttcaaatgattcccaaattttcatatttttaaacaaatcaaaagccattaaaatagaaaattatttttaaaatggatgaaattagttaaattaatatacaaggaactaataaaattttaaatttttcattttaaatttttgaaaatcgggaattttcttttttcttttttttctctaccctcttaaccgccccccaatcagcaccgtcattatacgctttggttgctctcggatttgtgtgtgccaatgccattcgttggcattgcgccgtcccctcccaccctcttttgccgtgtggccaaggcgcaaattgggttaatgagctttacgctgccctccgctcaagcaaaaagctgtgagtgtgtgttgtgtgtgccctccggggaaaaatgcggtaaaaagtaagcgccggtattttggcacggggagacaattttttgcgatggtggaaaaatgccgttgagcaaaatggggatgaacggtggagggggacaatttcaaaattttaaacacttttatttaaatggtggaatttttaaattttaaaaaaggttagacagtcttttgtttataaaaacctgaattttgagataagcaagcgaaaaatttcaaattttgttaatttccacatttgtcttaatttgaattttgacaaaattatcgaacggtattgaatatggttaccgtagttcctttcccaaagttgttctatgatctgttacgtccgcattaccattcccaaaattggaataatatcctttattccgaaggtgtgcacacaattacataatgagtaaatgagggaaaggagcggcccccgattcgtacgggacagatggggagggaaggatcggacgggcacttggcccaatccccccgatcagaatgaatagaacaaaagagaggggaacagattgatgagaagggggggcggggcgagtggggcgagaaaagtcaagagcataggcaataaaatacaatgtaatgacaatcaatgggcgtcggttatcatccgcgacactgcgccggtgccagcaaaaggcggcggttgaccccattgaaaattgccgtttgtgggggtgggagccgaagtgggggaggtgtgctgggggtcaccaaatcgatgtccatatcgattctcgccctccacgagccgctccaccaacctttccaacttttcgagcagttcgatgattgggttcagtgtgggattccctgaaccttctaacaacttttcaagccggtcaagacgggcgagaatgtcctctccctcactcaaatttggggaattttgccgacgttttttgggcattggggattgaattatttggagaatgaattatttggagaatgaattatttggagaatgaattatttggagaatgaattatttggagaatgaattatttggagaatgaattaaattaaattctgaagagaaaagtcattactcttcgctgccgtacaacaaattcaagcaaatttattttattattatattaatttttaattgagtcaattttatttttgcattaagttgagattttttaaattggcagaaaaataataataattctttagtttataatatcaatttagctttaaatatgaatttttttttacattatataatattcaaacatttttgagattatgtaataaatagtttaaaattttcgtaatttatttaactttttatagattgtttgtgaaaagttttttttaagattttgttatccgaatttattgtttacattttcaataaaattccgtgttgattaattcattaaattaaattaattattgggatatttggaaagacattcaaattaaaaactcttaaaccaaaatcaaataatttaaaattgagtaagctaatgtatttttagtggcataattttaattattctattgttaataatttaaattaaatgatgaactaactgaattatgctaatagatataaatttaatatattttgaaaattcgtttttcaagagttgtcctattacgtgtacggtttcttgattttgtccattgcgcgatgagaataactgactctatcggctttanataattattttagaaatcttttattgataccaaatataataataaaaattgaatattacttaagaatttaaaaagcacaacgatattcgctacta

SEQ ID NO: 10133 - DNA, 2318 bp, Heterodera glycines
  unsure (1)..(2318): unsure at all n locations
tgtgtattttancaatagaaagcaataaaaatggagggtctttgacttgaaaattcatttattatgataacaacttgtaatatttcgtatgtgtattttctcaactggtgaaaaacaaaacaaacgatgaacagttaaatttcactatgtttagctgagtcgtatcaacattccaatcgacaaatgtttttagcctaatgatacattccaaattttgggtgaatttattcatcgcatttgaccctgaagaacaaaaactattattgcgtatttaagattgtggagcgaaattcctgacattctttgctgacttttgggccatcgttttggcagtgtccctcttcaattgattttggcaattgttgaagcccatgccgatgccttaatgggctcaccagttcatccagaaagacaaccatgggaaaacataccaacgcctgtcccaagccaaacctaaaacacatcatttgcgtaattaagatatgttcgttcattcaataacctaccggccaagacctcttccccttgaaaagcgcaagcgctgtgacaacaccaatagaaccacctgccaaaattttaagcgcagtatccgctaaacactggtccagggtacgaccgagttcattttcactcatctttatagccaacagaataaagcaaaaaaaaaaaagaaagaagctaattataagaaaaagccaaataaaatttaaaaatataaaagtatataggttttttacttggaaaggaagaaaagaaagaaaagcatgacttacctgctctttcgaaataaataaataaaatgtctatcaatttttgcaacaaatcgcaaattgagggtacagaaatgaatatagttaaggaataataatattttgttgttacttattacacaggaattttggtttctcaaaaaaggtcacttcaattaatctgtactctcataaatataaaaaataaaagcacaaatatccaagtgaaataaaaataatgcaatattccgagacagtagggcttgtctcattttcaagaaaaaatgtttaagttaaaattttcgcaattttttgagctttggtgtaaaatgcaaattttggaattttcgaccttagttcaaattcagtcaggatgagtttaaaaatatatttacgaaaattggggaccctactgatgccctattttttaccaattgcttacattagactcaatcattgcactactgtaaaacaataataacaaatagattcgtaggcggaacgacccaataaatgtcagcaaatggcagaaagggagtgaatgcctcagaaattgaatttaaagttgaatcctccatcattttctccaaacggattgaagccttctccaaatggattgaatccgccgccctgtccaccagaccagcgccactgatggaattgttggcctccaccaccaccttgcgggtcaagcgggtcttccccagcatcgtaccttaaaaatttgtattttgtacatacaaacaatggttgtacctcctttgaagaaggggtgggagagaacgatttacctcctcctcttctccgggtcggtaagcacatccttcgcatttgcaatgtcaatgaatttgtcctgagcccgctgtttctccgcgtcgtcttggaaaaggtccgggtgccattgctgtgcaagctttctgtaggctttcattatttgacgtttgtccgcatttcttaacatttttccacgtgaacagtgtaaaaagtgttgcaattaatgactgaccttcgaacaccgaggatcttgtagtaatccttctttttcgacagttttagcaatttttgtgcccgattcagttgctccttggctcgtcttgaaccctcgtgagcgttcacagccttttggaagtcttcaaccgccttttcgtactgctcattctgcaagaatgcctcgccacgatctagcaaaacatccaaatcgttttcatcgccatatttcagcacctccgtgcactcttgaatcgcctcagcaacatgaccaagctttaatataataattgaagcaagaattataaaatgcagatgaacaaacctttacgttacacttgcaagtgtgtttgtagacgtccatttgaatttgatcaacctcacgttcaaagcggagaacgctctttgcctaaataaacattcatgttttcatttccaaatatatgtgaaggattagcctaaattattcaatttctcattttagctaacaaggaaacctcgcgaactgtaagtcagaaagtgggtataaatttggtaccactggatagcagtgggtatcgacttatatactgaatttttaat

SEQ ID NO: 10134 - DNA, 2906 bp, Heterodera glycines
  unsure (1)..(2906): unsure at all n locations
tgattttttgcagccgttcatgaggttcagcatgtcagggctcatgtncaagcttaagaaagtttagttaatgaaaactaaataaacagaaaaaaaggaaattcacagcaatttcaaaatccgcttgagcctcttttagatttcctttcttgaacaataaatttgctctctgaattcgacccttaataagaaaaaaagattaattattccttttttcaattaccgctacaaaatcaggcttgagttcaacaactttgtccaagtcgggcaaagccgcgttcactttcccacttgccaaaaaaacggtcgccctgcgataataaatttgataatcggttggatccaaagcaactgcttgatgataatgctagaaaaggaagtttaaaataacatatcgtctaaaaaacacctgaagtgcttcttggaattgtcccttagacagccaatgttttccttgttcaagatgtttctcaatttctttgcgttgcgaagatgctaaaataattctttttttggtttgttataattaattatgaaaataccaaaatgaataagagtgaacgaaataaaagacaaataggaaatctgaagtattggaagaggtagaccaagaacgccaagaggaggatttagccactcgtaattgaaatttaccatatctaaaaagaaatcattaactaaaaatgaaatttacatttaaaaaatgacattaaattgatataaataaaggataaaggaaaagcctacatcaattgcttgataggatacgtaatcgtaagcataatcgatgctaattgaagatttacgctgctgaacataacgccactatttaaaaaacaaatttaaatttttaattttcaagaaatgacttttgagacttgcgatgtgtgtatgtattgtattgtatgtacataggatgtaaccttacctttttttgttttccttcttaaaaatgaaagtcaatgatgtttatgctgcgcagttgacattttctttctatttatattttagatcgcattagcaagtttatatgaataagaaatgataatcgaggacgaaacaagactaaaaacctggatatcccaagtggtggaagacatgtatttttgtttttattttatatattattaaaaaaacaagcaataattttcagaagtgatgcagagcctgatgcgttagcgaaatatgtcattgcattgatcaagaaaccactttctgatgcagacttggagaagttgtgcacagacaaactctctgtatttcttcaatcgcgtaaactcgaaaattcatattttcaaccagaaaaagaccctaataaaatatcttatttttagataccgagtcatttgtgtcacgattgtttgaaacactcaaaagcggtcaatatttaccgaaaacagatgcactgacttcatccgaaccaccaaaattgattcttcaacagaccaaatctaaaattgatcaaaaatctgctgctgagcatgacgaggtttaaagaatggtttcatccatttcgttatattgattttacttagttggtacttactgatggtgaaagtgaccatgatcaggaacgtgaagaaattttacaaccgaagcatacgagaacaccaaaaggtacaaatctggcgttagtaaggtcattgctttacgctcttttagaaatgccacaacagcagcaactccatgccaaaagcgggtgtccgttctgtcttccccccgctccgcttctgcaaaagagcaacaacattcgtcgtcacctcggcgcagcgctgccgctgcagaacataggccaaaagtgcgtgcagcttcgcctccgtctatagttgctaccattgctgcgcaatcgtcagtagcaactgctaaaccacctcgtaagcgcatttcgcccccaccacggtcgacaagcatggagcgtcgtgcggcaaaccgacgtgcgtctcctctggctccattgcggcgccgcgttgtgcttacgggtggcaacggaggtggttcgatgcgcatctcatcttcaactcgccttatggtcgaccgagaacgggaacgacaccaccggggagggaccagcgcaggagggagcggtcgaggaacaattgtcgggagaagtcggtctaagagtagatctccgcacaggtataggtcaagtaccgtctaaaaacaaaaaaaaaattttacaaaggaaggaaaaacgtaatatggtgggagttgaactcgagccgcgcatttcttcgcgcagacaccgctgccgtgactttcatggtaacaaattgtatagcactgtagtgtaacaacagattttagaaaaagggttttgtatgcgtggtgataactgcccatttgaccatggaccggaccctgttgtagtggagaatagtgctttgaaagacatcgttcgcgacaccactatttttgatacttccaccacttacggggtgaatccacctccgcctggtttggaaagcacggttacaccaagtgctatttgtgtcaacaaactttctggtggtgtcactgaaggtgggcactttaaaaatgacgggccgtaagacgtgaattcatttattttgttgttcaggctacaacccagaagctccatccatggataattcggcagcaattcctcaaatagatttttcggttccacctccgccccttccgcagcatttcctacaacaacagcgccaaatcctttatccacctgcaccaacagcttccggcattattccaacatttggtgctgctactgctacgacggctcctacaaatgcctccggtggtggcgttcttccgcttcgttcagcagttgtaagaaacaaacccagccgttttgcttcacctaacagactaatagatttttcatttcatggcttttcattcatgggaataattcctttaggactcat

SEQ ID NO: 10135 - DNA, 3296 bp, Heterodera glycines
  unsure (1)..(3296): unsure at all n locations
ccaaccaaatcgaagacagcaagcacccattcaaaatccgtgttttttcgaaaatgttgaaatgggaaatcccctttttgctcagaaccaaatcgtagaacaagtcgttgagaattcacattccggcattagaaatgaaatacagcatccaattggactcgaaattgagcggtacggacgcccgatcgctaattcctctccaatcaccagaatgggaagttcgcataacgagccacacaattcttttgaaaacgcggagtttgaagagataaggcaatttcgggccaggcaactttacgaaaatccacgcggatttcgtgaacaaaattttgtcggagaacaacgagaaaggatgaatgaatttgagcaaaaccatgctccggtcccaaattttgaaagaagaaatgtatttgttggtgatccgcacggaaatcagctaatttttgggaattttgaaaggaacatggaacggaattttggacattttgaaaattttcccggactcgcacgaggtggaaaccaaaatttgaatgttgggggaccaagaatggaacaaattcgagacccacacagagaaagaaatcagtacgaggaacggcatttcatgccaattcccgaaccaaatatgaggcaaattgatggacaaaaccaaaatttggcttttcgacaagtgcagggccaaaattttcaagaaaacatggcgagagtgatgccatacaccgaaggaattcctgatattattcttgaacttcacaaagtcacactttcaaatcagtacgcaaatgtccttagagaaattcctactctttttggcactgaagggagggacaaaatcaacgattttttcaccactcttgaattgtgtacaggagattggatacccgagaaaaagttggaaattttgagagcgaaattaaaggggaaggcatccaaagcattgaatttgtccctacgaaaatttggtcaccaagtgccattcgaagtcattaaaaggggtgacaacccagaacgtcaccggacagaacgtcaccacccaaaacgtcaccacccaaaacgtcaccaacccaaaacggcaccactcaaaaacggcaccacttaaaaacgtcaccactcaaaaaggtcaccgacccaaaacgtcaccaaaattaaaaatcacttaaaaattaatttttggtctctgatcagctatgcttcagtcacagatttaaggatagccaatgtatggtttttgatctacaaatttgagagaaaattaagaaaagagattatagaaaagtttataaagctagcaattcacttaaattctcattacaaaattattattttgctttattaatatggcttcatttattactacccaaaaaggagcaaaaaaactgctttacgatggttatgcttatttaaaacataaggatggtgctggtggcaaaatttattggcgctgtgatcaggccaaaagttcggccaaatgcagtggttttgccattgcaataaacgacgaaattactgtaactaaacaacataaccacgctccatctccgacacgtattgaagttcaaaccattaaacacagcataagagtgaccgcagctgcacaaccagcaactccacctcgttcaattgtaaatggagcaattcagggctctagcgatgctgccaaaatacagctcccagaattacgacacatgcaaaaaactgccagtcgaattcgaaaagccaatggcaacttcaaagaaacaccgaaatctttaaaagatgttgaaatccctccggagctccgtcgaacccgcactgcttcacaagaaggctttgtctttggcgatacaggccctgaagacgaacagcgtatcatctcacttgcttcaagaacggacataatcaggctgtcgagttgttcggtttggatggcagatggtacttttaaatcagctccttcactttggtaccaaatttgggtcatccatggcttatacaaaggaagagttctcccttttgtatattttttattgccatctaaggtattggttgaaattttgcatatatttaaaaattttcaaataattagtcagaagaaatctactgcagagcgattaattttcttacggattgtatccagaatgttgtgcccaattccccaaagccgaaaatgatctgcgttgactttgagatggctgaaattaaggcttttcgtcgtttttttgatgctgcaacaattcatggctgctattttcattttatgcagtcaatttggagaaatattcagagttcaggccttgcagttccttacaaagaacacgaagaattcagagtgtcgctcaaatgtcattctgctttagccttttgttcaccagcggacgttcgagagcgatttatcggcttggcaggcatccataaaacataaagaaagaaaatttttaaaaaattataggaaatattgttgacaaatttggacataataatggtgttcccgaatttttggattattttgaacggacgtggattggtagaggattcgccacccgcccgcattgtatagtagggccgaatatcaagagcaaaaccaacgtttactcaatgtgatcacggaatatgatcaaactgagccatttgaatttttgaaaaagtgttcatgtttcgttcatttcgttgaataattttttttaaaagagtggtgacgttttgggtaatttggtgaccttttatctggtgacctttttgagtggtgcctttttgggttggtgacgttctgggtggtgacgttttgggtggtgacattctgtccggtgacgttctgggttgtcaccccttttaatgacttcgaatggcacttggtgaccaaattttcgtagggacaaattcaatgctttggatgccttcccctttaatttcgctctcaaaatttccaactttttctcgggtctccaatctcctgtacacaattcaagagtggtgaaaaaatcgttgattttgtccctcccttcagtgccaaaaagagtaggaatttctctaaggacatttgcgtactgatttgaaagtgtgactttgtgaagttcaagaataatatcaggaattccttcggtgtatggcatcactctcgccatggttttgaacttcatacgtgtcggagatggagcgtggttatgttgtttagttacagtaatttcgtcgtttatttgcatggcaaaaccactgcatttggccgaacttttnggctgatcacagcgcccataaaaatttgccaccagcaccatccttatgttttaaataagcataacccatcgtaaagcagttttttt

SEQ ID NO: 10136 - DNA, 1378 bp, Heterodera glycines
ataaatgggttgttgctgtagctgttgttgttgttctggttatgttgcagcgacgacggtggcgagtactgtgccgtcgtcacagtcgctgccgacgaaggaacagtcgcgccgcgagcagtcgccgcaacgaccgccatggcattcgccagcgtcgctgctgctgtgttcccagtcgccgccgtcgccgccgcgttctgttgcaactgctgttgttgttgttgttgctggcgtaacagtatgttctgcagcaacagttgctgcaattgctcacgacttgtgctgcttccaccgccagaagttgcggtgccaatgccattcgcggcgctcaccgcttgcaacaggtgttgcgccgccgcggcactactcactggtgtgggcggggaggtgttgttcaacgcgttcaggtacgtgccaatgttggtggtgccgtcggcattactgttgccgctgctgctaccgtatgaagtggcaacggttgccaatgccaacaacgagttcaagcctatagaaaaatgcaccaaaattatgcaatgaatcatcgtgaacccggcatttgagtctcatccaatattaccaaagagatccccacaatcccagttgtaccgtatccccacccctcgcctcgattgcgtctcattactgtactgacgtattacaccgtaataccgtatattccctccccccccccaattgtcagtcccattatcaattgtaccgtatcccaccgcgcatcgacggatcaatccatcgtatctcaatcacagcactaccgtacgtatcatactgtccctccctccttctgtgatattttttctcaccggatgaggaaagtgccgcggactgttgcaactgtcgtagctgtgccaactgttgaacaagctgcaactgctgcagttgctgctggcgcttggcctgttgctgctgttgttgttgctgctgctgttgctgcaaaagtgccattgtcgcggcggccgccgctgcggcactcgtcgtagtgacgccaccaatttgcggcggctgtgccgacaggcgcaacggccacgtgcaggagccgtctcatgctgagtgccagctgcacactaacagtgtgctgactgctctcgtgtcacgcgtgacacgcccccgcgggaaagcgcaactttatgccaacaatacggctccatttccgctcaccgtgcgtcagctgccgagacaaattcgcttccaagccttggaaatattgtgagagtggtggctgcttcggttcccctcaccggatccgctcgctctgtggtcggaggaatcccgatcagtctcgagaatttatgaaaaagccatcggtacggatctcgaggtcggtatcccgatgccgtacggtctctatcccaaccatata

SEQ ID NO: 10137 - DNA, 1207 bp, Heterodera glycines
  unsure (1)..(1207): unsure at all n locations
tctctttctctctctaatgcattgntctttctctctctctctctctctctttgtctctttctctctctcctctctccgtctctttccatctgtgtgtccctctcttctctgtaccgtatccaaaaatgccatactccccctttggcccacccattttgtcccaaaagcaattccactccacccaaggaatgcgtgtggttggcacaatgccaaaaataaaaaaaaatgcccatttctcaccgccattttttcgcgctgcttctgctgcaacatttgctgctgttgttgtgccatcatcacgtcctgttgttgctgttgctgctgttgttgttgctgtcgtgccacgatcagctgtgccaatgccgtgatcaacgcctgctgctgttgttgttgttgtgccaaagtggcggaagccgtgccgttgatagcgccagcgtcgccgtcggcacggacgccgatgccgtcgccaatgagtgcacttggaacattggcatcatcaccaacagttccatctccatcggcagcaatgttcaactgttgcagcggttccactccatgctcaagggctggtgacaatgtgaccgcggccggctcagtcttgacgccgccgtttgcctggcgctgaaatggcacgcgtattaatttcttgggatggcatgagaaaagccatgcagcgaaaaaaggcactcttttagctaagcgatagaaatactcagttgtccgagtctcgagaatcttgggtctgccggagaagccggacttttgagtcccacagactctcgtgaaaatcggggaaacccattaaaaatgagaaaaaaacgaatttttttttccatccccgcctcggttcttggcaaaatgtgcgacactttcggtcttatctcgagattcttggcaatctcacggatttttaaataaaattgatcccgactcagtccgggtttggcccaaatgatgctaaagttttcggcccggccctcgtgccgggaatttactctcgagagagcaaatgccaaggactctcgtgccagattttcccgactctcgaaagaaatgccaaagtctcgcacatccaatctcgcctcccgtcgcgtgtccactaccaccaccagcacctggttcgctggttgatgccgtcttcctccccctcctcctgcttcattttgctagttggttagtggtcgtcgtcgtcgtccgtcgtcagcag

SEQ ID NO: 10138 - DNA, 1184 bp, Heterodera glycines
gaagtggcggcgccgacgatggcacgcccagtggctcgccggcggtactgacagtgccgtgctcatttggcgtcgacattttttttgttgcgacgtcaaagttttttggtcggattttggcactttttggacgagcaatttgaacaggaaaatcaccaaaaagaaatcatttgttgaacaattagtaagttaatctgcaaagaaagctggaatttaggcacaatttggtcgagagttttgtgccggcatggtctcgactcagcaaaagtgccaagaatagcgcagaatgccagtcgagtacattggcctcaaggttcaatggcacggcataaaaactaggttgaaaaccaaggggagagggctttttcggaaaatagggcaattaggcatccttaattaattgtagtttaatttccctataattagggcttaattgcctttggacaatggattttaaggcattattcaattatgtaatattaaagtgaatgaaaccaccatcataattaaattttgacaattgtcatgagtctaattaaagtggcaaaattaactaattaattataattaacacctaattagtgcgtgtgtgttttttgggagagggtacaaattgtacaacgtaataatatgtgtgttatttgttatgcgagtaagatggtagacacatgtacatattggagacaaattggcgacgagcatacctaattaccaacggcggcggaatgaatgattttattgatggattaattggggggggggggagagagagagagagagaggtttctgtataaattgagatccgcgtaagaccattggaaagagtagattgagctctacaataacgtatggtatgaaaaaatagttatttctgggacttcttcttaattctcaattacttctccaatgtggtccaaattttatgcccccagccacagccccttgcttctcccaggcttaaggcttggatttgtcaaataaattcgagactcccaattactaatcaataaattctcttaaaatttttttcaacccaattcaaaacaaggaaaaaaatttgcagtcataaaattattcgaatttctcccattttgtttacataatttccgaaagtaattccgtatcataatgccaaaacataccgaaatcgctttaaaatattcctttctggacttgacttggtt

SEQ ID NO: 10139 - DNA, 1512 bp, Heterodera glycines
tgtgatcggtgatttatcctttcatttgtcccgctcagccattttgggactgatttttggagtggaagattgaaatgtatccgtccgtccggcgcagctgattgggattgattttggaggactaaaatcgtgatcggtgctttatgaggggggttgaaatgtgtccgtccggcgcaaccaattaggactaattatgggggggggggtaaaagtgattggaatcgtttaattggacccctctccggttcgtccgactcagatgttttaaaaatattttttttggggggggaggggctgaaatggctcgtgcccattcggctgttttgttatcgtcgccgtccattcccccgccgccgggggccaaagtgtgtagtaatccatcaacatttttgcttagttttttaacggattttgactgtgaaaatgaatgaatgtgggctgatgggtttggttttgggtcgttgccgtcgtccgtccgtccgtccgtcggtcggtcgtcgcccgcggggcgatttgatggacagggcaaaaaaatgggcgcgccattttctgggaaaaacattttttgttgaaaagagcgacggctgctgcaaaaaatgatttatgctcttcgcccaacctttgactgatcaaaagtagtcacagtctcccccgctttttgatcaatgtttggtcataaaaatgctgatcagatatgatgattgatcaggggtcatcagactcaaaagggcggcaaaaaaggcgatttatgtattttccttggtgatcaaggctatccttgaaaagtcatcagtccgctgatcagtttttttttctttcgtcaaaaagacatgctgatcaggtcgacagattttcatggatcaaaattcggaaaattgtgccagtatcttgcaagaaattccaatttgcccttgaatagtccttgggagttcggcttttgtgacaaatacaattcggtggtcttcttcagctctactcaatttgtctttgatcagtcagccaatgaaattctgatcagcacagggcctccaccaaaatggcggaaaaattaatgcgcacggttcttagtcaagcagaacgatcagcaggttgacattaacaagaagtgatcagggcaaaagccaaaaattgatcaattggagtgatctggtatggtatctttgatcaggaaagggtcagtgaccaatggagagggagggagagactgattgatcaagcaacaataaacaaagccgaaaagcctgtttttgatcactgaagtctcgtttcagccctgctgactgatcgaaggcaattctaaagttttttacatattgcactaatcgaaaaatgatcagacagcagcccacttatgcataatgatcaaaatttgatcagatatcccaagtgatcagacacccaaaaatcggacaatttcaaaaaaaaaattgaatttcctctaaaaatgagtttcataatttcaatcgtccaaagaagcgcaactttgtttgtgttatgagcagctggagttgg

SEQ ID NO: 10140 - DNA, 5321 bp, Heterodera glycines
  unsure (1)..(5321): unsure at all n locations
atggattataaacatctaatagatattttaatgtgtattgtttttaaaccgaatactaattgtaatttgttgttttttttgttgttgaggggacaatggaccatattttcatgctgtgtttgtgctatgtatgatgacgtaatattattatatttattactaattattgtttagtaaatgcgaaattcgctctaatttgatgatgaaaaatgtcacccattttcactgtcatattaatcagagcgccacgtgaccagtgggtcgagtcgagaattcccggtcccgtagcatccgatcttttttaatttcaactttggcgatgatgttggcattctgttttttcacacagcgagtctttgacaaaaaagcaaaattaaaatgaattctaaagcctcaagaacagactcgctgtggaatttcgtattttacataaacaaaaagcccttttcatgtgattgcccgatcacccactcctctctgttttgggtgtgatcagaggaagccctttttcgatcactaccgattgatggtcagtgaaaatcactgctcgatcacaaccaaccggcttctgctttctgctgttgataataatcaatcataaactgtgaacactgtttttttacacatcccacaaatgttgttcaaaatgataaaattgatagggtttgatttgggacgaagaatacaaaattaattatgtctgaaaatggaatttttttttgtatcgatcccttccggcgaatttgttcagtcacagcgtcgttcaattggtgtcctttttcgagttcatcatctaaactttgtcccgatttaaaagttttgcctgcccatgaaagttttgttgtctaatatttgtgctgacatttccccctttttatgcaaattcccatataaaaactagcaggtgtttcagtttatgttttggagacaggcacataatcaaaattttcccatttcttggaatgaattaaaaggaaaaaaggtgcaatttttgaaaaatatgtatcaattccacaaaaaaagggatcttcgggttcgccgcctctccatttctggaccgtaaaggcgcctaaaacggcgaggattttcatttcctagccattgtgccagatccggcgtctggcgccagacaaggcctggtatttctgtgtgctttccaccaaaaagtgccggtcctaccccaaaccaaccgatgaagtggaaggaccagcagcagcagcagacactggcacatcatcgtcttcggctggtgcctttgcgtggccggatgtcgacggtgcagcagccgcttcttcctgctgcggcgtgtgccgtgcagctccaccaccccgtcctgtggtctcatcctcctcctccttgccgccctggccaccgattgcctccgcgatgcgacgccacaccatgttcaacagcttggagtcctcgtggatttccgacccgtccatgttgaagcgctgcaaatttcgggggcgatttttatttagtctttttttgaaaattttgtgaatccaaaattgggcttataccatttacaaaaaattggaggcacggcgtgcatttttttctatttatttgcaatttttagggtacccacattttgacataggccaaatttcgggcccgaaaatatttgaattgccatccctaagcatttaaataaaacgtaaaatggaaattccctatactanacatatagtgatgaatttagtcacaatttttcttanaaaaataaatctcaaaaaaagttttcatgacacatacactcttttgttagcatatgtacctgtgcattttcgcacagcaaatccacgtctgcgctcattgggccaacattgtgtattgtcctcctcaattttcttccgaatccgttgcaggtccattgggcgttcaatttggtcataatagtcgggatattcacgccgggaaggcaactgcacgaatgggccggccaactttttgccattgctaaacattcgaaggatatttcggataaactcaaaggatcgattaggaaaaatggccaggttcgggatctaaatcacggcaaaatcgatctgggatcaatactttttcaaaattcatggctctggcaataagtaatcagttctggcatttatttaatgccatttaaaattgaaaaaatatccataaatttgaagccgatcgcaattaattttctggacaccgaaaaccccggggtcattaatgtaagaaatactgaattgtatgtccataattctagaaaatttgcccattttctcgaaaccggtaaccaaaacacgccgtcgccgctccccctcgtacctcgtcttgtagttgagcagtgtgttcaaacatgcgttcagcttggcgtacagtttggggttggccggcgatttggtgacgcgttggcgctttccgggcccgcctccagggccacggcgtcccttcggcgccgcatcatcattgtccgagtccgcctgactttgctgtacacggagagggggaaaaatttgtttaaaattttcaaaaaaatttttttttgttttccgcaaaaacggtaaatccaatgccatgcgtaattgttcttgtgccgtgtctcatttattgtcagttcaacccattcattgtttgtttgtgtgtttcccacctccaattccaattgtgtgccttttgctaattgtttttttttgtgggatttaccgaggaatttttcctgtttcttgtttctcttttcttcggcaacacctaaactaacaataagttagcaatattgtattaggtaattataaaatttgtttgtttgtttattcgtcatcccctgggggtgcccattttgcccggaaaatacggcatttgccgggtttcgggagtccataccgggtttttgagtttcggaatgacattcatgacacattcccaatgtgacgcgcttccagtccctaattaaaacgaaaaaaccctggcatttttaagaataatttagtaaacgcaccttaaaattctgaaaaatcgctaaaaacgaatcttttttttaaatttcgaaggggggggaacgaactgctcacaaatctcggacccaattcccgtgccgtggactcgaactacaacccaaaacacacacacgaacctcctcttccgggggcagcgccttcttgcgctttcggccccgctgttttggcacagtggcgccttccccgccggcaccggtcgttggtgccgtcgacgccgacgtgcccggctcgcccggcccgccgtcggcgcttcccttgcgagcgcccgccacggggccacgcttcttcttttgctgctgctgttgctgcagcgcttgttgttgttgctgctggtgatgtgttggcggcattggctcgtcgtcgtccaacccgtccatgccgccctcctcatcccagtcaagttggcgaagccagtcccgatccgacagcaaatcctaatggataaagaataagataccaaaaaaaaaaaagaaacgtacactgatttgaaaaaataatggtaaaataaggagaagggatttatgtccaggaaatgaattgctttcttaacccgtccgacccgtgggtgccatcagagatgtatgccgatgcccccaaaaattttgtaaatctgaaatcgacattccgacagacatatcccaagtggtagtttcatttcgatattttccaattaattgaaatggatgattgaaaaatgcccaaaagttgttgccaccattttcaaactgttcagacagtatttccaacaatttctcgtatacatttcataatttgtggtgtccacctgtgagtagttgacatccttgcgccttcgtctgcccccttccgtaaaggctggtgccgggttgctgttgctgttggcctgctgagcggccgcggcctgtggacaaatttaggggttaaattttacaaaaacaggatttaatgtgacattacgggcggcttgagaatgtgcattgggaaaatttttttttagaaaatacggttttgagtgggtgcaccccaaaatctcgccggccgaaatctcgccgagacaaaatctcgccggccgaaatctcgccgcagaaatttcaaaaaaaaaacttcaaacagaaaatttaaagaaaaaaattgttgaaaaattcttcagcaattttttttgaaatttactgtttttttgaaaaattttcaaaaaaaactaagcaaatagttttttttttggaattttcttataaaaaaattttctaaaattttttccttgaaaaacttctaagtttgaattttttttttgaaatttctgcggcgagatttcagcctgcgagatttcggcggcgagatttcgtcccgtccccgttttgaatcccgatttttttttgagggagacgattcacgggtctcggagtaattttcagtctcgagcaaaacaccaccctcgtgccaaccctctcaaccacagcacctcctcatcctcggtgaagcgacgactctgttcaatgatcgtcttggggatttcgtcctcctcaatcagacgcggctttcgccgacattccatggcctccgcgcggcgacggtcaatgtccattttctaaaacggcaaaaaaattttgaaaattttaaaattcatccgtccacttggaagatctcaaactcctcctctgatctggcgatcatctgattgatcacttcatcatccggcacctcgtcctcatcgttgtcatcattttcggcctaacaaaattggaaattttgatcgtggattccaataattattaaaaatgccaaagtttcgaattgcctgaatgatcgcctccagcatcactcgtcgttcggcgccggtggaccgctggtcaaatttcccggcttggataacctgtggagaaacaaaatcaaaacatcatctagtgtacatctcctcaaaaccattttaggggtacatttccccgaccaaattttaaaatttttttcaaaaaattaaaaatttcatgaaaaattgcattttttcggacccaccttttcgtcaacattgagtttgaagcgggcagcggccaagatcttctcctccacactgttggcggtgatcagacggagcacgcgcacttcacgcgtttggccaattcggtgggcacggtcttgcgcttgcatgtccttgaaattgacagtttttacatttttttggcgtccaatggttggtttcacccgccgaaaatttgcgaggatttttgcctttaaaaaattcaaatttccaaattttttatatcttaggagacaggacatatccattgtttctcaatctgtacgtgcgcccattagaaaatagttataaaaaataaatcgtcgcattgaatccaa

SEQ ID NO: 10141 - DNA, 1358 bp, Heterodera glycines
gaaaaggtcgcgtaattgttcgctcactgacatgtttgctgtcaatgagcagtcccttctgcaagtgtttgtagaggaggcgttgcagcgcactcatgtcacatttgatcacgtactccgtcttctcgggcaactgggactccacctgaacacggaaggaagacggattaaacatgccaaacattatttacaaatttaaatggtatttttaatgaatttatcactgaaaaacattgggaggaattagaaaaatggaaaaaagaaatgaaaaatgtcaaaaatgaaaataatttcatgccatccttggctttatgccccaaaacccataaaataaagtgcccaaaacgcacttctttcttcagccgacgcaaaaggaacggacgcaacactttgtgcagacggcggatgatcagcatcgtctcctcctggttcagctccaacttctcgcccgtggcggcgaagggcgcgttgaacctgagaatatatatatatatgaatgaggaattatacaggaatcaccatcagggacggtcccaggattttggcttggggggggggcacctccccccgtgcgacgacctttttttttttttttgcttttcacacccgttttttatgtggcgcggtttttccgaaaaattttttttgggggacaggggagtaccggagcattgagactccggtgggttatgcatggcttccgatggtcaaaacggattctcgtggccttcctcacttcgtcatgtcggacaaaagtcaggagtttgaacttccagtaactgccaacttgtcttcaaaatactacgaatttaagccattgtcctcttctggcacgagagaggtgcgtcatttaacaaatatttgtttcaatttataaccgacaggtgtcccccaattttgatctcaaatttgttgaatatggtcgtcctctattccgcgttcgacttcgactcgtttcgtcagtattcaccaccgatgaacgccttcaaaacttttttcaattgtgtcacctgatttatccgaacataacccagtccaaccggaaccctttgatgcaactacccaattcttcatcgaatcgtaacttcaaacattcaaccaatatgaatttctatgccaacaacgcctccaaaaatggatgctctgcttctgatatccaagacgacagtttgtccccaccacattttgctattgaacgtgatttggttgaatcaattgaggtagcttcatactttcttacaattatatattcggataaaatatctcctagttttcaatttaaagggatgatacaaaaaaggttcctttgtttaaaaaatggtatcaattgaacttgaccagttggattcttttcttgg

SEQ ID NO: 10142 - DNA, 1851 bp, Heterodera glycines
cggtggcaatcgccagacgcacggcacgcggagacagacgtacatcaacgtcagggcagcatttgtccatgtgctcggtatttgttgagaaaggcaaataaacaaacttcgaattttgaggtgatctgatccaaagtgtcggggttttgttcgccggattgctaatttattggaaagtaatttcgaattttatttggggcaattaactaattacagccgaattggcacattctcgacccaatttgcacgttgcttttctccgcaattgttctcagcaccaccatttatatcatccgcgatgcgctcgttgtccttttggaaggtccgctttttatatcttcttttatttatttcaacttttttaggtcgtccgtcgaccatcgattttcgccatgtttttggtaatccaaattttttgcttacaattaacacttttaatgagtttcagacgcacttgagcacattgaaggggtaagttactaattgttccttcccctttgacagcaaaattaagcattcgatttttcctaagatttccgcttactcgtggacaaaaaaataataaaataattcacaaaggaagcaaatggataataaataacacaaataaagagaagaacaattaatagaatcgcaaaatataaatattatatctatattaaaaaaaatgcaattttaagaaatatataaacttcgaatatgcaccaaatatccaataaaaattttttggaaatataataattaattaacaaataattggttttcgcacttttttcggtcagaatagaccgatcctttcattaatcgttcaggtcaaaaaagtgcatgaccttcgaatttgggctctcactatggacaaaggttgttttttgtgaaaaaataaatttttaaattttaattaaattatttttcttatttttacataaataaatgtgaaaatgacttgaatcgtttctttggcagttgcaatttcggtccatttggaggtcgaatcggctgcggactcccaacaaattctgagggccaccactttgatgcttcgacgcgacttcaacgtgcacgagtcgaccattcaaattgagggctatcagcccgaaacggccaattgtggccaatgtgtggtgccgacaaagtgaaaaagggcaaaaacggaaggaaaaggagaagagagagaagcagttaaaccaagcataaaatgaagaaaaaacaactcgagtttttgttgactctttgaaaatgttaaataaattaaaggcactaattaattaattggcgagggaggtaatgatttatctattttctaccattaaaattaaccattcaattcactgttttctctacaaaaagtgatcgatcgttcgattagcttttccctctttttcgctcttcaactgttcgttttgctcagctcttcccgtccgtccgcttctcatttcctttcttttttatctccagagggattactctcgaattttgcgatgaaattttgaatattttcgccgacaatccttcgccgtttgcgtccttttccgaaaagttccgtgccaattgcttcatttcttcacatggttggcacatgcaattggccttcgacttcgttctgatcagtgccatgaggtcgattttgatctgctccttcacttccttgttgaattcccaaattgtttggtttggctttttctgctgtttgtctctctttggtggcgacccgaaaatgcccttatgacccaacaaatgcttcttcagctcattccatttgttgagcatttcccactttttgcacaccttcaaattatgatcattgatcagaaactcaaaaaccaacagaaaaaagagttttaaattctcagc

SEQ ID NO: 10143 - DNA, 3324 bp, Heterodera glycines
  unsure (1)..(3324): unsure at all n locations
cgtcgtctttggcgaagctttttgcaatttccttcaccgtttgctcgtctttgtcctcttggcccgcttttcggttgggactgttctttttgcctatttttatcggaattggattagtcgccgttttggatggcgattccatggctaaacattagtttttttcgaaatcaaaccaaatagacttaatggcaattctaaacaaataacctctcacggaaattacagaaaagacaacgcagcaaaagccgagcgaataaagcagcgaagcatttttaagaaaattaattttgtttattttatgcatttggttaatttttaaaaagaatgttcaaatgagtgccactgaaagctatggccttataaaccaaaattaatgcgtctttcatctgcatttacgtaaatcttaatcattaatcgcttaaatggtcatattatgtaattaattgacatattttttcacatttataattattatttataaatgcttttgcttaatatttatgacgttaacatccgccgagaatgtgtaaaaaataaaaatgtctgtttgcaaatgtaaaaatgggcggaaatattttgaagttgaagtttaaccgatttcaagcccttttaaaatgtgttattcttatcatttgtaaggatcaacaatgaagataaatggatgagaatttaacaaatacaatcaaagagaaaagaataaatgtgcaagtgtggagatttctttctcgacaattagtgttttcaaaatcatcaaattaattcacaaaaagcgtccgcgaccgacgaccaaatgaattactggcgacgggctttttaccagagaacgtgcttcggcgacagacatctgaagggaaatgacgagtaaactattttaattttgcacatacattcactgtcgactgatgttggatgaagaacacctaattattttaaaaaataaatgtttaaattcaaatatttgtgcaattccttacccggtcaccttgcatcaaatggccatttttactcgcaatggacccacccgttacttgatgaacctgaatatttcgcaatgttttcctttcctactctccaacaataccaaaattgaaaacggcgcatttgctggctttgatctctctgccatcgtgcgcaataataagccaacggcgccctcattaattccctgcggacgatgcagaagcacggtaataatgcgatattgtgagtagtcatcgaagctgagaacatttcggatgatagccaactgaaaaagcaattctgggtttgagttaagcttttcgcctgaattttggccctggcgaagtagggataacaaaaaacagagagactaacttcgtgttgcgatggctccatcagtgctcttttgcggcaatatttctgctgaggagttagcgcacagtcagatgaatttgacgcgatggttgttgaagcagatttggtgaccggaaggaattgggattcgacgctggtcgacggactttcgcttgttggcatcggcggtcgtccagatccaagtgccgacgcgatggttgttgaagcagatttggtgaccggaaggaattgggaatcgacgctggtcgacggactttcgcttgttggcatcggcggtcgtccagatccaagtgccgacgcgatggttgttgaagcagatttggtgaccggaaggaattgggaatcgacgctggtcgacggactttcgcttgttggcatcggcggtcgtccagatccaagtgccgacgcgatggttgttgaagcagatttggtgaccggaaggaattgggaatcgacgctggtcgacggactttcgcttgttggcatcggcgatcgtccagatccaagtgccgacgcgatggttgttgaagcagatttggtgaccggaaggaattgggaatcgacgctggtcgacggactttcgcttgttggcatcggcggtcgtccagatccaagtgccgacgcgatggttgttgaagcagatttggtgaccggaaggaattgggaatcgacgctggtcgacggactttcgcttgttggcatcggcgatcgtccagatccaagtgccgacgcgatggttgttgaagcagatttggtgaccggaaggaattgngaatcgacgctggtcgacggactttcgcttnngtggcatcgcggtcgtccagatccaagtgcatcaaactgtanaacattcatttctagtaaataggaggggatagtaaggagaaaagggggaaaaagggtcacgcatgaaaccatatttttccccattaaatctcattcaaccgtttgggctttcggctgaccttcttgatcagatagtctatctttctcggttgctgcctgccacttgttgtcactgttcccatgctgcacgttctgttccgcgctgttttgttaattcgtctgtccatctcgtcaaatattcgcgtatttggagaaggtgtcgtcggagttattgccgaaaacaataaaacagtctcggataaaatttgtggatggtgtgctggaaaaattgtaagattaacattaaaaaaaatacttatcctataattaattattatcgagtttctgacttttagggcaacgcatacggttgcgggtgtaggcatggacaaccccggggaaaggtacaaatgaaccgtactccccttccccaagtgggtaaagtcggctctactgcagcttacgcgtcaaaccaatgaccacataccttatcaaacttacattcttggtatcaagcgaaaacttagtctatagaattatttatgtaaatacctaagtcaaaaatttattcaaatggaattttggataatgattttttcagtgccaatgtttgctctttacttgtatttattaattcccgagacctaaaagctttcttttgataccaggaataggctttgaccaaggaagaaaaaagatggcctaagaaactgagatggtcattgattggaaagtcgattggatgataaattgccgtaaactattttttattaactatactactaattcgatggtgtaagtccccattttaaattggactatttattgacacgaaaacttgcaaaataataaaaaataagaaaatgatgactgaaaagtaaagtaaacaaaagaacatatttaacggggacccgcgcgtttcggcgctcccgtttcggcgctcgcgtttcagcgctcccgtttcggcgccagctcgtttttccacttaagcttttttctttggcatctaaatctaacaatcttggtatcattcgaaagctcttaacatgctctattagccttatcaaaaacgaaaagtttttcaagcctgtaaaaattttatta

SEQ ID NO: 10144 - DNA, 5608 bp, Heterodera glycines
attgacaggtacgaatgcttgaaagcggtgagaggggatggtgaggacttcagacaattcgtaaatcggcacaaaaagctgctgtcggatttcaaattcgacgacttgaaaaaggagcaatttaattgtttgatgttgctgaccgcattgaaatcgccaaacgacgcagttttaaggcagcgaatccttgctaaattagcaacggatggcgacaatgtgaggtatgacggagtcgtcgaagacttgataaactatcagtcaacgatttcggaagcaaaggcagtcgaaatgccatcaaacacgcgtgctgtaaatgccgtgcagaaaaagggacaaggaaattccccgcaaaagtggtcaactgaaaagacacaaaacaacgcagctaaaatgaagtgctggcgttgtggagaagaacgacaccggccggacgattgccggcacaaaacaacaaaatgcaataagtgcaattttgtaggccatattcagaagcaatgcgaaagcgtccatgcgtggtggaaaaagatgaagtccaagagggctacgacaagcaaagtcggtcatcttcgcattggcatggctggaacaacgaacaccccaaatacggcgctcaaggttaagattcggatgaaccgaaaaccagccaaattgtatctcgacactggatcggacgtcataatcattgacgaagggacacatgccagcgttgggcacccaccgatcaaagagtgcaatgaaattggaaaaacattcgatggcaaaagagtccaattcatcggaaaagggactacaacgtttgaattaaacggccagtcgattgttgaggaattttatgtggccaagcaagggtcactaaatctactgagtcgccgagcaatggacaaatttgggctgttaagggaattaaggcagaaaatcagcaatgcggcagtgaatgcatgcacagccggcaacaaaactggacaaattatccctgatggcgcatcgcaaattgacggaaacgaagctaaaatctaggtactataatattgcttcaccgatgagacttctaaaggaaagtttatttgctttaactcttattcaaatatgaatttaatggatttcaattttacactgattaataatcttttccgttgatttactgtatttggtatgaaatagaccgataattgtttcgtgattattaaatgagagccataacaatatcctaccatatggagtgggcagctccaattttgattgcgaaaaaggccgacggatcagcacggatgttcattgactattcaacgggattaaacgacacgcttctcgactctcaacacccactgccaattccagaggatatttttgcaactctaaacggaggaaaaatattttcacaaatcgatctgcgtgatgcctatttacagatcgaattggacgacgaatcaaaattattatgcggtttggcaacgcataagggaaattatcgcatggagcgattgcccttcggaataaaaacggcaccagcaattttccaatcgattatggacaaaatgctggccggattgaattatgccaccgcttacctggatgacataattgttgtcagcgggacaatcgaagaacacactcaacatttgaaagaagtgttcacccgaatccaggcctatggactccgagtcaaattggaaaaatgctcatttttccgcaaccaaatcaaatatttgggacagattattgatcggaatggtcgccgtccagattcaaccaaaatcaaggccatcactcaaatgccggcaccaataaacatttccacacttcgctcatttctcggcatggtgaatcattaccaacaattcgtcaaaaatatgcgtttcatccggaaaccattggacgacatgctgaagaaggagaatgaatggaattggtcggaaaattgtcaaaacgcatttgagaagttaaaggaaattttgacttctgatttactgctcacacattacgatcccaaattggagattattgtggcagccgacgcatcagaatttggaattggagcggtaattcaacacaaatttccgaatggacaggtcaaggcaattgcgcatgcctccaaatctctctctcccgctgagaaaaattactcacagattgagaaggaaggacttgcgctcattttcgccgtaaaaaaatttcataagatgctttacggaagacattttacactgcagacggatcacaagccgttactaaacatcttcggcagcaaaaaggggatccgccaatgcagtgcaaatcgattgcttcgttggtcattgacacttttggcctacgatttcgcgattgagtacatcaacacgaaagactttgggcaggctgacgcactctcgcgactcattgccaaagacacaagcggtgaagacgaaagagtcatcgcttcattttgtgttgaaaaagaaattgaactcaatttcgacacgaccattgaaaaattgccgatcaaatttgcagacctcgtcaaggcatcggaaaaggatgaaatcatccatacaagtgaaaaatttagtcaggaatggatggcctgacgaacgccaattgaagactcgaatcggaggcaatccagcttttcaacagacgaaaagctgagctttcaattttaaaagaatgtctcatatacggagaaaggattgtggttccaaaaatttttcagggaaaaattatgaatttgctgcacaagggacatcctggaatgaagaggatgaagcaattggctcggcaatacgtctattggcctaaattggacgccgaaattgagcaatttgtgcaaaattgccagccttgtcaagacgcagcaaaagccccaacaaaaacgaacttgcactcgtggccaaaatcgacgagtccatggcaaagaatccatgttgattatgccggaccatttttcgggaaagaattccggattgtcgtcgactcattttcgaaataccccgaggttttcgaaatgacgaccaaatccgcggccgcaacaattgatcgtttgcgttatctcttcactcgtcatggaattcctgagacgctggtgtcggataatgggacgcaattcgccagcacagaatttgccaaattcatggccaacaatggaatcacacacctattctcggcaccgtacaatccaatgtcaaacggacaggtggaacgatttgtggacactttcaagagggcttttaagaaaataaaaagggagggaacggcaaataaggaagtaatcgaaacttttctgatcacttaccggacgactcctaatgattcgctctcggaatcaaaatcaccagctgaaatgcttctcggacgcaagccgcgtaccacgctggatctgctcaagcctcctccaccaaggccaacggagagagatgagaaaatggagcgaaatttcaaccgaagatttggcactcgtattcaaaattttggacctcatgaaaaagtttgggcccggcaccgtctatcgcaaaattggaaggcgggaaccatttttaaaagcgccggagtgatctacaaagtgcgatttggcgatggaacagctgggcgcttccacgcaaatcaactccgcaggcgtcagacatcaactgatcagtgcccattaaatgtttttaatgatgcatttaatttgccaattccacgggaaaatttggaagacgggcaggaccctcaaaatatgcctgaccctattggggaaccggacaatgttgtggaacaacaaattgtagaagagcagcagaacattccgcaaaatcgccgcagtcgatcgccaccgccacaacaggtgcaacgtcgttctgatcgccgccgaaggccacctgtgcgattttcacccggatgagaagacttaaaaggggaggtgttcgggtggtaacacctaaggaccaaaaggaagacattttttgttcttttgttattttcttttgatgtctcactctctctctgttccatagtctctaatcgctgtctctgttcttctcgtactctgacctattgattaaatgtccatccttccccatgatgcattcattcatggtctgattatatttgttgttctctcttctccaaatattgtgcttctccgtccaatttaatttatttatttgttatttaattttcttcaaataaatttgtttgttaaattgtttttgcttcggtgtcaagaccgaacattggcgacgcccgtgattaaccaaactgtggactgccgacaattctgatctgtcgatcatacgattttgaaatcagagatattttgcgctgctgtcttagtaccttggcgatactaattcagctcatccacgcgcacccacttgtttagcatcttggcgctgttaaacaataagtggtgaacgacaatttcggcacttcaaaaaccccgaacagtgtggtttgatcattcacaatggcggcaaatgtcaatctccaagatttgatcaatttgatggcccaacagcaacagcaaatgcagcaacagcaacaaatggttcaacagcagtcacagcaaattgcgcaactgctgaaccaaaatgcaccgaatgccgcaggattggcacagccaaatctcatcaccatcatcccggctcttcccgacatttcgccgttcgaatcaaatgatgaacgcagtcgcgtcgtggaatggctggaccgtttcaagtttgcgctcgattgtgctgcaccgatggccaatgacgaaatcaaagtcaagtgcctgatgaacaagctgagcgaaaacgcattcagtgagtacagccgatcagtgcttccggccgccgtcaccgattttgattttgcgacaacaatccaaaagctggagaaattgtttgccaaacctcagtcaattttcattgacaggtacgaatgtttgaaagcggtgagaggggatggtgagaacttcagacaaatcgtaaatcggcacaaaaagctgctgtcggatttcaaattcgacgacttgaaaaaggagcaatttaattgtttgatgttgctgaccgcattgaaatcgccaaacgacgcagctttaaggcagcgaatccttgctaaattagcaacggatggcgacaatgtgaggtatgacggagtcgtcgaaggcaaggaaattccccgcaaaagtggtcaactgaaaagacacaaaacaacgcagctaaaatgaagtgctggcgttgtggagaagaacgacaccggccggacgattgccggcacaaaacaacaaaatgcaataagtgcaattttgtaggccatattcagaagcaatgcgaaagcgtccatgcgtggtggaaaaagatgaagtcaaagagggctacgacaagcaaagtcggtcatcttcgcattggcatggctggaacaacgaacaccccaaatacggcgctcaaggttaagattcggatgaaccgaaaaccagccaaattgtatctcgacactggatcggacgtcataatcattgacgaagggacacatgccagcgttgggcacccaccgatcaaagagtgcaatgaaattggaaaaacattcgatggcaaaagagtccaattcatcggaaaagggactacaacgtttgaattaaacggccagtcgattgttgaagaattttatgtgg

SEQ ID NO: 10145 - DNA, 2392 bp, Heterodera glycines
tgacttggtgtgataaatcgtatgcgggagacgattctttttgaacgggcatcagggctatgatgagccatcacatcgtatcatcgcatcgttgatacgatgctaatttgaataggccccagataaattggcgaccctcatttgcgccaccactcgcctcgcacttttcgtctcgtccttttgatagcagacttttagaccataattttgttgcatcattaggttgataaattatatccaaattttaaatggtttaatgcttaataacttttttcagaagcaattcaattttgatactttatattttagatatagctccaagaatttttattaattactttaaattgataaaattttattgttatcaaaaaaagttcgacaaaataacagttgagtctcaatttcaatattttgtggtaagaactttgtaaattttataagattgtagatgacatggcatgtaaagtcatcgcatgatatcattaaatttgttaacatcgagcaaatttatgatttattggtcccaaaaattgcttttatgatcattaatatttttcacccctactttgcttaacaaaacttttaagtatgcatcaaaaaataagatttcaataactgattgtccatttgctgttgagacgatgccgagcgaacgaatttaattgtgttttgccgataaaaagcaatgatcggggaaaaacgacgacgacaatgttggtccgtataggaggctccggcggtgtcgagaaaatttaatattgtaattaaactacgcaaaaattttaatcatttttaagaaatttaaattgcccacaatttttcaacattttatcctatgttttctacggcatcattgctaacaatttttctaagattttttaataaaattgtccaaatggtctctttttggcactccagctgaagatgcgaaatacagttttaaaatttttgaatttatatacctatttggtttagtaataaacatataatagcatttgtttatgcagtaatgggcacaaacatttcgagtaacgaaaaggctcacaactttgtgttgcataaaatttcacaaatttttgtatattttttcactttttcccttagtttgagaatttacagaaatttcttatgaaaaatcaaaaataatttttttttttgaaaatgttaccgctaaaatcgattttttaaagagaaaacatcaaaattatctattaaatacataaaaccgctgaccaacgaaatgtccaagccacgaaatgtccaagccacgaaatgtccaagccacgaaatgtccaagcctcgaaatgtcaagccacgaaatgtccaaacctcgaaatgtccataagggtaaaaaacacgaaatgtccaaaagtctaaaaagcacataaaaacccggaaaacggatctaatttagggtttttggagtcgctgagtacgaatatgacatttacataactcatttcctaacccaggacccaaatataaatataaaatttcaaaaactaaggattccatacaatatggcgaccaaaattcaaacaaggttttagattcccaaatgatccaaattctatctcttgacaaacttcagatagtgaaaatgaatgaatttattaaacattcaatgaaaaattcattacggaacatggacaatgaatcatcaaaattcccgaaatccttcaattttcctgaatgttcttcatcttgaagaccgattgccgtcaccaggccatggatttatttcaccattgttgttgcatttcgcgtccgccaaaattctcataatgacggcgtcctgcatggtgtatcgctttcgtcacatgcgaatgaaatggcgagcagctcagatcgggcagcgtccatcgtcagtcggtgctttcattgatttcacaaatgaagtccgagagtgcagggtggtggcagagacctttctaaacatatattttttaatttgcctgtagtaaattaaaacaaccataaaatgcagatggattacctccagtccattgtttgtatgagcgagggcagacgtggcctgcgaatgcatgttccaaattggaattgggaagaggggcgcccgaaagatttcctcccacacgtgaactaaattttttattaaatataaacgaaagaatcgtgaaaaaatatatccctgaaggcgttgtttcgaagtcgatagcgcgctcaaagaatattgaacaagctgttcttgtggagtctcacgatggttggccatgtaaaagttgatggcgccggtgagccgatgccgaattgtattggagtagccgcgtagctgtgttctgagttgatggtcgaaatttttgtcactagttcagcttaaaaataattaaacttttggaaatcgatgcaaaaatacgaaaaaaaacatcgg

SEQ ID NO: 10146 - DNA, 2540 bp, Heterodera glycines
gctattaaaatttttctttttttcctcgaaattaaaaaaaaaatttggaaaattacatttttttcgggggaagagagacgacatgggggagtgtagcgtactctaatcggtccactacgctggcagtgtttacgaaacgacctcgcaccgtataattgctagggctcgaaattatatgcattaacatattttttctgcgcatatgctatgaagaaaagagctcaaaatagcatttctacgttaaaattttggctctagtgcactttatgagtccaatcactggtttttatacaataactttgttcatactcgaacaaaccctatctttttggtatcattcgaaagtacagagtttaaatagtgttataatacgagaaaccaagaaaattctaacatttcaagaaagttacaaacgaaaataatatgtagagaccggaaatttcaaatttgcgggtcctgttgcaggattggaattcaaaattttttacaggacaggatccggcaggattaatcctgcatttaaaatttgcaggatcctgcgcaggattgcggattttaggaaatttcaaaaaattctgtattaataaaaaagtctttcaaagtataaaaaagtattcaaatatatttttaaaccaaaaaatgatgaagatttttgcttacactccaaacaatcgactgaatcttctttaatgcgtttaaaaagaccgatttgccaaattgggtggctcataataatagcttaaattaaagtaaaataatttttatttaaatttctttgcaaaaaaagccataatccattatgtatagggatgggatttttaggcacaaaaaatcgcgaactaggcacttaaaaaggcagaaaaatcctaaaataggcacgaaaatagtaaaaaaaaatttattaacgctttttaggtagcaaaacacataaaaattcaattgtataaactttttcgaataaggataagtttttaaacgaaaaatttttattaagaaaaaaattttgaaaaagaaagtttctgaatatttggcattctatttttaaaaattttcaaaaaatcaatgcaggatcctgctgaatcctgcaaaaaatcaaatttgcgtgccctgttgcaggattggaattcaaaattttttacaggacaggatccggcaggattaatcctgcaaatcctgtattttccaaaatatgcaggattgcggactgggatcctgcaaaatcctgcgcaggaccctgtcctgcgccggtctctagtcattagtaatcaattttccacatatatataatacactattaattttacacttctttttcattttgttattgaaatagtgagaaataataaattatagaaatgaatcgaaatacatagtgttacgaggcttgtgcctcttatcgcttgtgaatggcttcagaaagggtgggcattgtgtgccaagtcagttacgctacttcgcctcttgctccattcgaccgatgttgcccaactcgcgctttacattttcggcactgatccttttttccggtgtccaacatttttgcataacatccgcaagaattatgcagtccaacgcgcactttatgttttcggcactgatccgtttttccggcgtttgatcccaacattttggcataataacagcgatttcttcttggcagtctttcggcacacccggatccgcacctgttttgacggcatcgatcacatcattgtcatttgtatagttgtcaaatggaatttcaccaaacgagaatatttcgaagagtagcacaccgtaagaccttaaaatgcagataataaaaatagtattactcgagtttgggtcctattttttggtcaacttttttcaatttttttttggattaataagtcctgaaaacaagaacccgggatttttcaaagtcgcttatcacgaatacgatacttattttcgcctattccgaaccccgaacccaaattcgaacaaaaagtcgaacttttaaaaacttgcttttgtattagaatctgaacaaaaatatccttttttgatgtttcaatgatttgtgaactttttgcttgtttaacacttttagattcgcactagaaaaaggatgctatttaggtacctgaaaatcatcacatttcttaaaatatgcaaatttataggttttgggggtcgctgattgtgagcacgaatccggctaattttttgtcgaaagcaagtcagtgtttgaaatgcaagccggatttgcgattagcaatcccttatactattaattagaataaaaaatatatatggtgccaaaaggcatgagccaattttcggggtaaagaggcagaaaaccgtacatctattggtttcgatggtaaacgttggcctaccaaatgtccgatttgtgcgtgaatttgttcttagtaaaacattctggcgccgaccaccgtgttggcattttggaatggcctatgtagtaatccttcgaccaatgcaaatgtcgtgacaacccaaaatcggatatttaacacaaataggcggtcgtgaggcggcgtctttacaacgga

SEQ ID NO: 10147 - DNA, 3306 bp, Heterodera glycines
atcataactttttttcaggctggccaaattttataaatttggtatcattcgaaagctctacatgtttagaagcttttgataagttatttctaagcgattgaacaacttataaaaaagttgaaacatgaacactgccaaaaagtcagaatttttgcatattttaatttataacttttttatttgtcagtatatctttgtgatttttaggaagccgatagagcttgttaagagctttcgaatgataccaattttgttggatttggtcaacaaagaaaaaagttatgatgctctaaacttggctcagacgcaactggcccgtttcgaattttgggcacaatagtaaggatttgaaaaataaacaatttaaaatttataaaataacacaattaatttgaagcacattaagtttttaatcaaattcggaaaataaaattttaacgacttgtccactcaaagaatagaaaaaatatttttttcgtcaatatttatctcacatatttagtaccaaacttaaaaagcaacataaatatttaatgaatagaggaaaaatgagcctgacaatggaggaagaatcgaattcaaagttaattgatcagagacaatacacttcgaacataatatttagcagaagaccaaattgtgacgaaaacaaaatttggaatgagtcagtgaaaattgaaacggaataataaaaactgacaaaatttttggtcgtatttagaattggaaatgaaaggtcaaagatgatcgcccgtataaacgaattaacaaaaattttaaaagcaaaaactgttcgtttgttgcgaacggcacaaatttcgtgttgtctgatcagaaaagaaagttgaagaatccctttgcggcctgtttaaaggaaaaaatcattggattaacaaacaaaaagcagaaaagaaaagaacacaaaattaatgttatatttcttgttaattgcatactgattcaagagacatgctcaactgaaccatcgcttggtgaaccgcatgctttaaaaattcgttgtccgaactgattggtgggtcgtaacgaagctccaaaacgtcataatgcttcttaaaaacaattaatattattttatcatttaatgcttcagctaaaagttataattgctcgttcccaccggacaataaaatgtaatttaaattttataaaaaacactggaatggcaacactggtgaaataaatattttaaccccagaaatcccggtccggaccaagcatcaagccggggccggttcattttcaataggaattccatttgaaaattatggtgaataacactataattccaagtccagttccatgaataaaacctggttttacatatttaattatcaaaaaatttataggcacaattttttataaaatggtgaggtattgattttttattttaaatcatgactcattcggcaacttctctggatctttctttgccaagaaaatccgtgcaaaggctttttttaatgtcaaaatttaatctatattaaatatctttaaaaagtaaacaataataaaaagcatttaatcagctgtaaagcttcattaggccatacatattaaaaagtgcaaacgaccttgtcgacaagcgtaacgaatttagcacttccaaatgaaattccggtcacttttttgctgatcgcttttgctaatgcatttctctgtaagggattataacaaagtaaactaaaatagtgataaaaaagaattgtaatatgttatttaaatgcagatgaaaatagatttcttccaaattatttaagttatcaaatatcatgaataattaaaattattttaccgatttaataatggtttggtcaccgatgcaaagcgccggatcaattgccacggccacgtaaaaggtcctattggtatgaacagatttaaatgcgtaaatagtctttacatttataatatataaaagggaacaattaataatgaataggaccaacgcgtgcggagaactcgtcgtgtaatcaaaaagagtggcaaacacttcggccaatctttgcgggtcctggtgaattcgtggcacaagaacgcgcatgtggtaacgcgagtttaagagatcggcgtcaattgcctaaagcggagccaattctaatcatttttgaaaacatcagaatggatgaaaagcgcaatgaattaatgaaaaaattagttataattagttggaaaaattaagaaaattaaagagagaaaagcgattagaatgaacggaacgtatgaggcgggagggattgataagatttaaagcatatgaagtgctgatcagagaagatgattaattgccgaacagttttacccaaactgtcagtgggcgtttccaatttttgccatttttactcccggttataaaatggaaaagcaatgagttgctgatcagcagctgtctagcacgcgaatctgtgctcggcacccacaaaatcaactcgtaattcaactcccggggaagacgcaatcgttgttggactttgctgcgtggcattgttttgttttgggtcgctgcgttcaagctgatttgggtcaatggcatttgttgttgcgcagagcaaccgcggtaacacacactgacagaagggcactcgggcaagtcaagcagaacaagtcctatgcgtaagtgtcggaaaagttcattttcaattaaaagcaagcaaaaaataccaaacagcaaagaagaaacatttgattgatttcatccggcagcttttgagcaccgcttcacggacgattgtatttcccggttcaatttataaattacaatagaaaattacaaatttcaaataatttcccgtgactagtagagaatgaaatgaagaatgaacatcgagtttgatgagagaaaaatttgcgcgaattttgtgcttataaatatttcaaaataaaggcattcattacctcgattgtattaagttccatcggtgacgatttgaatagtatgtaaaaacaatccaaagatggcaaaactaaaaaatggaaatgatttgataatgggaagaaattagttaattgtatatattgacggaggaatttgtaatgaatgaaaatgcaaaaaggacaaagaaatgtaaatgaacggtggtcggagggagggaacggggggaaagaggtggcactctctgcccccggcaatttaatttctctgtcgtttttttctctgtccggaattgtcacactttctcttccatcacattacaacggcagagtttttcttggtcctttttaccattgggtcatcgtgttatgtgtgtatcatcacacaccaaatgctttttattggcaagtggacat

SEQ ID NO: 10148 - DNA, 1177 bp, Heterodera glycines
tgttttgggtcgctgcgttcaagctgatttgggtcaatggcatttgttgttgcgcagagcaaccgcggtaacacacactgacagaagggcactcgggcaagtcaagcagaacaagtcctatgcgtaagtgtcggaaaagttcattttcaattaaaagcaagcaaaaaatgccaaacagcaaagaagaaacatttgattgatttcatccggcagcttttgagcaccgcttcacggacgattgtatttcccggttcaatttataaattacaatagaaaattacaaatttcaaataatttcccgtgactagtagagaatgaaatgaagaatgaacattgagtttgatgagagaaaaatttgcgcgaattttgtgcttataaatatttcaaaataaatgcattcattacctcgattgtattaagttccatcggtgacgatttgaatagtatgtaaaaacaatccaaagatggcaaaactaaaaaatggaaatgaatgggaagaaattagttaattgtatatattgacggaggaatttgtaatgaatgaaaatgcaaaaaggacaaagaaatgtaaatgaacggtggtcggagggagggaacggcgggaaagaggtggcactctctgcccccggcaatttaatttctctgtcgtttttttctctgtccggaattgtcacactttctcttccatcacattacaacggcagagtttttcttggtcctttttaccattaggtcttcgtgttatgtgtgtatcatcacacaccaaatgctttttattggcaagtggacattcgcgggtcgccgctcgcgagcggtcgtctgcgaacggtcgcccgcgaatgaccgtccgcgagcggtcggtctctaagctaagctcattgatttgaacacagagaccaaaaaaaatacaccaagaaaaggtgtgcacaaaaatcattaatgattatcctttctcagtaaaatttacctaatcactcaccacagagaccgaaatttgaaaaagtcaggaatcgtggcatcaggccgggatagttttaccggaattcaattcccgaaaatatttaaatttttgcctgcggcaccttttatgtgaaagcaatgaacaattttggatctcttcccgtctgggttttaccttgagggaatcctactaatgagaaaatcttaattttactta

SEQ ID NO: 10149 - DNA, 5039 bp, Heterodera glycines
cggtacttgtgtacagcattcacaaagtggtaatcatccgtttcgtgcagatagtgtacgtctggggttgggtctttgccgtgcaccagcctcatgtacccgcctcgccacggtctgaactctttgagcagctccaactctttttgctttcttatggcctgttgctgtcgtttaagctcttccaactgcttttcctcctcttgctttttcttggtctcgttttccgctctctccgcttccgcctttgccgctctctccgcttccgcctttgccgctctctccgcttccgcttttgccactctctcttcctctgcctttctttcttttgccactctctcatcctctgcctttctttcctttgctactctctcctcctcagcctttttatccttggtctctttctcgcctttcttttcctttgctattctttgctcttccttcttttcccgtgccaatttttcctcccttgccttcttttcacttgcctctttctcttcctttgccttcttttccttggctgctttctctgcagtcttccttctatcttcttcttctgtcttacgacgcctctcctcttcttctcgccgtctacgttcattttctcgctgctttctctgctcctcttcccttcgctttctctcttcttgtgcccatttttcatgccgcaacgtttcttgttgagccgctgattgcttggtcaaatatgaaagtgggtttaagggcgcttcgcccgtattgtcttcttcctcctcaacaaacgagacgtcaagaatctcgccctcctcctcatcgtcgtcgtcaatgttcccaaaacttgcatgcaccggtgcggacctttttcgtgtcaacagccgttccacttcggcaatcatgccatgatgaatgcccctctcaagctgctgtggcgagagaaaacttccctttggcacacggaaacggtattttcggccgtcgtgcaggtgaacaatcacatattgtcggtctgatgtacccagctttgcccaacttaagccaaaaatcggacccaatagccatgattttcgcccacctgtttgggtaaattatgcctgacagtccaaccatccacccgaccccatcgaacaccaacttctttggcaagtgcactttgaatttgtttgttttatttccaacaaagccaggcgtgttgctcggcaaaattacaaagaaagagtttgtcatttgatcaacaagtataaattcttcaaaatgagatcgtccttatatcatggtgtgccatctcggttcactttcccccatctttgatccagcggaaactctttgccatcgtcgtcgtcgtcgttgccggttcatccttcttttggtgcttcatgatcagatctgtgcagtcaaagttcagcgttgcacagtcttggcaaaacgattgggtgaactcaaggcgttgctgctcgccattctgattgatgagtttgaatcagctgttcccctgccggaaattgtcatcacgacactctttgcacatgaacgtgaacactccgtacttaagaaattttcctatttgttttcaaattaaatattagccaaaaccttggggcgggccaatttccaaaatatggtcgggtactcaaacacattggtcggttgttttttgggcgattcatctactaaaatttggctaattcaaagaaatttgcagaaaaagccaaaccttcagcttccatggcttttgctttcttcattgcggaagcaatttcctcatggattttgtccaagcgaggcttgcgtcccctttttgagggccccggttgtaggtcaagcagtgtttgagtgttgttgtctccaattgtgattacgtcatcatcattttgaggggaaaaattttcccgtttcgactcaccatttctttaaatttaaaattattataaaaaactcaaaaaatgattacttttgttctcaaacaccaattgatcattgatttttctcggggccattacgattaagaaatagtttatgattataattgttaaaagcataaaatgaacctgcgaaaaaacacgtaattattgattgatagtgagaggggtgttagcgcgcagcgacctccagacgggctgtcccttttaagcgataggccacgcccatccacaaacacatagacgagagagtagttgttagagaaagatacaacagggcgccaattcaaacacacagtgaaacccaagccaatttattgattttttacagattatggtactccctctgactgctgccctatccaaactgctaaactgtaaacctgaaaatttagcagaatatttgaacaaccccgaggcggtgaacaaagcgaacgcttacctggccggcaaaaaactcaaaacaacataccagggtcgtgattccaagaccaaagaggtaaagttcggcacattttcggtgaaagccgctacggaaacctacgcctttgagggatttcttggcaagtttccaaaaattcagtttcggtctaacacacatgcgttcagaggttaaagtccaccagtatttctacataaagcaccggatccgcctactgtacccttagctgaagtgcattattgagtaccacaacaagggccactgcaaatactatcccttgccgccggcccaagcttggaagacggcgtaaaagaacaaaaggaaatgactcagatggcataaacacttgtccatttttctattgttgatattctgatggactacccaagaataaatgaaagtgaactcgcttttcccatcccttcggggattattgtcagcggtccgtcctcatcgggcaagacccagctggtccttcgcctgttacggcatgccaacgtgatgtttgacccgccgcccaaggcaataggtatgtgcaaaggggtttctgtgcagtgggctgttgctatttagtatgggcatacggtgagtactcgacgcagattcccgatctggagcggcagggagttgtcccccacgcaggtgccccgtctgacgagatgctgaaaaagctgccaaagccttgtctgattgtttacgatgacttgatgggtgacattgaggccaagaaattggccgatctgtacaccaaaaagtcacaccataacaatttttccgtgattttcctcacgcaaaacctgttcgataaatcaatgcgggtgccaaggtccaacgcccagtacatcttcctgatgcgggctcccaacgacatgcttagcattcgtaatttggccagccagatgttcccacgcgagcagggattcctgatggatgcctaccgacaggcgtgtgccctaccgtacggctacctgttggtgactctccacgcgaacagagacaacattatacgcctaaggacaaacattttcccagacgacgaggagagaagcatttttgcccccaaaaatggttaagcgagaacagaagatcggtgagcgggttgtgcacaactacgactattttaagaagttgggaaagacaacgtcggagaagaagcgccgtcatttgttgaacagtgccggttgtgaggaactgttaacgcttgtcgagatttgtctcaacgttttgaacgggagtttctgtctgagcagaaaacaaaagcagagacttgcgccatttgcaaaagacatcagacagttggcacgtgtgcgaagcgagaggggtgcgcgaaaactagtgcagcagtcaggcggatcactttttgcccctttgttggcccccattctgattgaggctgcccaatacctgctttcgcgcagcaataatggccaataaacttattctgctgccgtacgagcactacaaggggctggttgcagcgagggagacaaagaatgacgacgacgacattgctgagcggacaaacttgggctttgtcaaacgacaggtgaccgctgcagtacagaagcggaagggaaacgtcagcgagcggaacgcaatgtacaaccagcagctgcgccggtaccttaagatgcgcaaggaacataaggagcggcccgtccgggtacagctcagcaacggcgctcaactgctaaataaaacagtggagacgggtgtgcaggtacggcctggtccggacgaaccgaaggacaagtccgtgatggttaccgacgaagatgaagaggaagaaattgaagtgccaaagtttttaaccccaacaagccagacactgggaagcagccgatcacccaggaccaataagaaagcagcaaaacagcaaaaattgatcgagaagaaggaccacctgttggccatcattatgtctgatccgcagagattcggcgcaacagaccgtgggaaaatcattaacccaaagacgggccgagagtttatcgactcggacctggcctggtcaattgaacgcctggtggaccctcgcccggagaatgccccttcgccaagcggaaccaaagagttgaagaggaaactcgcacagaatccgcttgccagtagcctactcaatcgactgtttgttgggtctgggttcgtcggacaagtcaaacaaacgagaggatttgttccctcaaaatggacaagaaaataaacaaaatatacaccgacccggccaatccgggcgggtatgcgggtgcgagtgccctgtacgcggcggtgaagaagaagcacccaaagttgaagcgtaccgagtttgaagactttttgcagaggaacaccacctacacgctattcaagccaaagagggagaagttacgacgcctacgcactgtgcctacgggtttcatgaccggtaagctgtactggggcttattgcgaacaattcagggttcagatgttcaggcggacttggcagatttccaggcactttcgcgcaagaacagcggctaccggtacctgctgttggcggtggatgtgttgtcgcggcgaatgttcggcgcgcccgtaaagagtaagcgaccggcggacatgaaaagggcgtttgaggagctatttgagcaaatgccaagggtgccggacacactgtacaccgatcgcgggctggagtttgtggcaaaaccgttgaaggagttttacgcggagaaggccattca

SEQ ID NO: 10150 - DNA, 4132 bp, Heterodera glycines
  unsure (1)..(4132): unsure at all n locations
gaaaatacaccnctagaaatgaaaaattttctcaaaaattgatcgtcaaaatttaatttattttttcttgataaaaaattttagttttaaaaattttatttattccaaaaatattataagaatatntattaatcatntaaatgaccaaaattaagtttatttggttaagttttacctgttttgttccctaaaaatccttaataaaaaaaatttaaatgccttttttcatgcctttttcgggatttttgtgcctttttttgcgagctctacttatcagagaaagagctcttatgaatatagtgtgtcgtgcaaatcggaaattggaaaataagcgcaaaaacaattttctttttccgcaagaaattttcccttttttgtgtcaaaaacctgttttattttttacacactttcatgatgaataaagcgcttttgtgttatgctttgcttttacgcaattataaaatacaatgacaataaaaagaaagttttccaattagtaagcaatggaaaaatgattaatataaaagcaaaaatgcttttcctttttattcattttggaattaaaaaatttttctttttatttatttttaattaaattattcaattttccttaaaatcacaatatatgcaagttgaaaaaacaaaacgaaaatttattttggaattttggactgagttctttttttaaattatttttacaattattttctaatttaatttgtattaaaatagcagtatttttgaatttatttttccactttacacaatttatcttctcttctgcactaatcatcaacagcagaaaatatgtgggaatcaattccatatttttcttgtttttttttggctatttggtggttttactttacgaattcatattttgttttcgcgaattatttttttcatattttagaatttttaaattcatctaaaaaatcgaaaatattgtatgtgttttcaatactcagtttaaaatccaaactaaacaaaatatgaaacctttcaaattttaaaattcataaaaatatatatatatatatatatatttttttttttttggttttacattttcagcatattttgaattaacaaaatccaacaaaaatgcatcaaattattccgtttatttaattattttattttatttcaccgttttattcctcacattttgtcatcattaaaatcgtcggcgttgtttttttttgtatgattcattttccttttcccaatgatgaattcattcatcgcattctcgcctagagaatgctcaacaacattcattttgtttgtttgtttgtttgtttcttattcatttatttattcatggttgggaaatttttcaatatttatttggaataaaaattttcaattatcattctcagcaaaattattttttctaaatttaaaataaaaattaaactgtttaaaattgtaaaaaagtaattaataatttttgaacattctctaaattgtgaaactaattgaaatatttttatgttaatgaattttttcaatttcttatatttttaatttttttccctaaaaatgctaagaattaattatttaattttctttcctcaattataagcatcccactgattaaaagctctttagagggaagatcgaaattaagccacggagcttaatcatattttaaaaatagacaaatttatttcaaattaatccattttaatatattttaaaaactttaagtccataaaatcttccaaatttactctaaaaatgccgttgagccctcgcattggccacaacccgtcgtaccatgttgtcaaggaggtggagatcattcgtgaagtgatcacctccggtgggccaaccattcaacacgataaaatcattcatctgctcacttcgccaaataatgcccaggtacaattaataatttaaatttaaacaaattaaattttgtcaaatttttcagcgccaagaactgctccacaactaccgtactaagtacggtggtgctgatctggcccaagcgctgaaggaaaagttgccgccaagtgaagtggcgaccaacagcctgtatttggcactgttggacacaccggctgagcatgacgccaaatacttggccaaggcgatgaaggtggtaattttttcaaaaaattttactcgagacagtaaattcccgattaacaaacggattcgcacataataatagcttaactttggtaaaattattaaatccagggttaagaattttcgaaattgttttttttttgatcagcgatcttttaaaacattaaaagtatatttaatttaaaatcaaattcctcatatgatcaaaaatgcctaattaaagaaataaataatccatcaatcataattaattaatcaattaatattaattcttgctttcttccagggatgggcaccaacgaagacatgcttattgaggtaaccacataattttttttattagtttttttaaataattattttgcaattgcaaaatttgttccctagattttggtgacccgcagcaatgcccaactgcgtgccatcaaggcggcctaccagaagttgtacggtcatgggttggagaaggacctggcggccgagacaagcggcagctttaagactctgctgctcgacttggtcgaagcgaaccgggatgagtcgtaccgtactgatctggccaaggcgaagacggtactatcggattaaaaaaaaacaacttacattagccctcccctccctccctcccgaaaccgaaaaatcaaaaatttctaaccaaaaaggggaaattttttgacaaagtataccggtttctaacaaatttcgttaaaattttcttaggcggggcttgtttaaaatttttttagtccctgcccaaaatcgacaaaatgcttaatatcgtggacattaaagtcaaacaaaaatggctagctaattgaaaacaaagattcctgacaatcccgctaattaattaaattcgccacctattttattaataaatttaggatgccgagaaactttacaaagccggggaaggcaaatggggcactgacgaagatgcgttcatcaaagtgttggccaaccaaaacttgagtcagcttcagctgatgttcaacgaggtgagaatctaatttagatttaattaaatattaaattaattaaattttaaattaatttttaagtatgaaaagcttggcaagaagcacaccattgaacaggcaatcaaagctgaattcagtggagacgagctcagtgctctgttggcaattgtcagctttgtgcgcaatgggccaattggcgaaatggcggaaatgctgcacaaaagtttgacggtcagtcagcaaaatgccaaattttagaaaaaatattaatgacgtcattaaagtgcaaaagataaagtaaaatttgaaaacattaattaaaaaataaactaataaaggttgtttaatttcaaaaatgccatcaaaaaatagattcgattgtttcaagccaaaatttttaaaataaaatattttcgacgaccaccaaaacgccaaaaaacaagtatgaaaatgccaacaaaaaacaaattacctttcagaaaggtggtaaggacgatatgctcattcacctgattgtgtcccatgctgagcttgaccttggcgacattgcccacgaatatgagaagcgcttcaaggtgtgtgatttttgaaaattttagatttaaaattaaattccattttaattagactccgcttgaacatgcggtagagaccagtggaaagacgacgacgttgaagaatgcgcttgttcgcatgatcaaaggcaacaaataaacatgatcagaaaaaaacaaatgatcatttgacactctcggagagagaaattccataatagttatgttggaagataattaagccttcgctaattgctttttttttaaatttaagcaacttacgtattagtaaaggagataaaatgggcctcgtcgcagttatgcacgtttaccatgttctaaaaatatggcaaacttacactatcgtaagtgagattatcataccgttgataaaacatgccagaattataaataagcagttttaagaatgacttttcaaacacatgactcattattactaccacgcttggtcattcagngtgcaacgactctaga

SEQ ID NO: 10151 - DNA, 1302 bp, Heterodera glycines
aatacaaaatttaaatttttaaagaatttcctatttaacattaaaaaaaaaacatttttttcatatttttgaagaaatattaaataaaaatcctaatataaattatttataaataaaatttaccaatataattttgttttaaatatttaaacataattgcaaaaaataaaaatacaattttccattttaaatgtgtcttggtgtgatccctccattcattgctgggccaatgccattgttaatgatgatccatggccttggaggtgttgccaaaggcatcactgttgccgtactgcgagcaattttgccgtatattttgacaacccatgggaaatgttggtcaaaccgcgcacggtattcggagctgaatttttaattttttaatttttttaatcgtcaaaacgccaaagtagtttaaatatcttatctttgtacagaattcgagtctttaaaagaattctacggtattaacaatgtcattgtaaacatttctgtgcttttagttttggcaaattttgttatatttatgtgtattttccaaaatttagagagttttaggccctttttttgtgtgcatttttatttaatattaattcatatattttgcaaaattccttgcaagtaatttaaaataaacattttttttaaaatacgggtaaatttataaaattcatataaaaaatttcgtttccgttaaaattttggaaaatcaagatgaatttaatataaaatacaccaaaatcggcgtaattagtacaaaactgataaataaaacctatatggcccctatgttttcaacttttcagtctaattgctacctcattatgtaaagcaccggtgcatttgcactgtacacagctattgtgaggaaggaatatacggtggagtacggtatatggatgaacacgttggccaccgaacaagcttgcaaaatcagatcaatgatgatttttgtgaacactccgatcaggtttagtgcgatgatgaacatcagcgatttgttcagtttgcgattgttttctgtcacgtctgtttagaatagtaaaaataattaattaattttttatttaaaaaaagcgcgtccaacaaaaaagtcaaaccaactttgtgaggttgaagcaaatttgaacacaaagaaccaacaaaatgtgtacacaatgataatgagtgcactcattgctaggccgctaaatttcattatgggtgctaatgagctttgaagcatttcatgggtggagcaggacggcgtgctaaacggggggggtggtttaaattttcatttgaaactctctaaatatttgg

SEQ ID NO: 10152 - DNA, 939 bp, Heterodera glycines
  unsure (1)..(939): unsure at all n locations
tataaaacaataaaagaataaaccacgccanaatatttgttggcttccgttgtttgatacctaaaaaggaaatttaaaaaaaaaataacaatttaaattttcataccaaaatggacacgcaacggcaaacactcggtccaacccggtgaacaccatcaccggctgtgccaaagtgccaaacaaacatggcacaatgagtgcccaaaaacagtgctcataacggatgaattttgtgccggaagcgacgacaaaaaagctgacaaaatagccgagattcaataccagtgcacaaaagctttctgtggctatcaaaatgttgcaaatgctgcgcaaacaactaaataaaaaaaattatattaaaaaaatattttattttttttaattacggcgttttgactgtgatgtacacaatgccaaggtcgaacagaatgccaatggtggcccaaagtgcacggaaaccgtacataaaaagcagcattagccattgtggaccatccgcagtgaaatattggtaccactacaattaaaatttaaaatagaattagttaattaattctcaattaacctatacatccgtttaatcctggatttattatgtatacatatttttattttttaaattagcgcattttttaatataactcgttttctaaaaaaagaactatttttttctttttaaattcagacaatttataaaatttataaaataaaatataaaatataaaaaaaatgcctaatgatttaaaaaaaatgaaaaaatagaatatattaaacgtttttttagattaattaaatattattgtgtcgttttattttttaataatttttatacaagtttaggaatatttttaattttttatgcttaagtcaatttccctaatagagttaatctgctaattaatactttaatttataattaacaaataaaattttatttag

SEQ ID NO: 10153 - DNA, 2316 bp, Heterodera glycines
tgatcttttttgaacccttataattttgcggcttttggaattcatttttgtgttttttttgtaggggtccgttgataattctaaatttttgcgtccgtcctaaaaatgaaatttttcgattattatttttttttgttaggctattgctttctaggaaaattgaaataatcatttgcttatatattttgatcatttggttaaaaaaatgttatatggccttggggaatttgcaattttttgggtttggaaattttgcatgttttagttcagaatttttgaaaaattttctccaaaattttccaggggaccgtgttctttttcctggaatttctcaattacttggatcaactgaatgccgagccagagaacacggaccaaatttggcacaaaaagctgcgctcatggctcaaaaacacgggcggatcgaaccaatgggactcggacattgtgtacacggaaacgggcactttccgagcctatcggttacaggtgagaacggcactcattgattcgttgattttgattggagaattttcatgactcaaaaagtgatcaggcccgttgattgagactccaactgatccaaaaagagatcagaatcattgattgagactcccacttttctaaaaagtgatcagaatcattgattgagactcccacttttcccaaaagtgatcagaatcattgattgagactcccacttttccaaaaagtgatcagaatcattgattgagtccccaattgaatcagaaagtgttcagactcattgattgagacttaaactgactcaaagatttaagctgatccaaaaagtgatcagaatcattgattgagactcccacttttctaaaaagtgatcagaatcattgattgagactcccacttttccaaaaagtgatcagaatcattgattgagactcccacttttcccaaaagtgatcagaatcattgattgagactcccacttttccaaaaagtgatcagaatcattgattgagtccccaattgaatcagaaagtgttcagactcattgattgagacttaaactgactcaaagatttaagctgatccaaaaagtgatcagaatcattgattgagactcccacttttccaaaaagtgatcagaatcattgattgagactcccacttttcccaaaagtgatcagatccatttattgagactccaattgatcaaaaagtaatcaaactctgggctttcaggtggccatgaaaaatattgtggagcctgatcagcacaaattggcggccaaactgttgcgtgaaattgccgatcgacaaccatttcgcttggaaatttaccatgaggcgttcccatttgctgatcaatatttgatcattcttccgtcaacctatcggaacgtaaggctgaactgatcactgaataattctttcaaattttttttaaataagttttcaaaaaaatcttagaaaattgttctaagaaatttcaagaaaaggtaaaaaaaaatttctaacgattttttcaaaattttatgattgatgaatattaattttcacaattttccaaaaaaaaaaaaaaaaattaataaataaaaatttttcaagatttttttataatttaaaaaaaaagttttccgagggggatattgaccgatcaaaaaacacttgaaatctgatcaataacttatcccctttccaaaggtgttcatctcgttgttgtgcatgacgatcatcgccattttgttgatcccgagtattccgtccggtaataaaaatttaaaaattttcaaaaaattccccttcattttaagccattctgatcattctctccattgtgtccatctccacgggcgtgttcggctacatgacattttggggcgtcaatttggacgcgtaaatttaaaactttgaagaagaaaatacataaaatttccggcattaaaataaaaaatttcccaaaataaaatttatctttatttaataaattcagaaaattttaaacattatttttctctacgaataaacaattgtctgccggcaataaagttatgccggatgttttaaaaagttttcaaaatcttgtcacaataggccaaggcggtggaggaaagcgattgatcctccccaagggctttatggcaaaatcaatggatttattattattgtcagaaaaatttaactgatcactgatcaaaaatcaaacaaaaaaatttcctacaaaagcaaccccattaatttaacccggattttgttaagcgtctcaatgatctccatcattatgtccattggatacgcggtggatttgtcggcacacattgtgtacgcatttgtgag

SEQ ID NO: 10154 - DNA, 5004 bp, Heterodera glycines
  unsure (1)..(5004): unsure at all n locations
ccagactgatcagcattggcccatccatcattcgaattttcagcggtgctccaggcatcagcaggattttcaacagtgctgcaaccacgaaaaaattgttcagcaatggcaccaacatcagcatggtgttcggcaacgcgttgaactaacaaaatttaaattcatgcaacaaatccaattaaatcgtggattagaaaagtcgattccacatataaaaagtttaatttcaattaaaaattgagtttttctctataaaacgtaacaaatttgttagctaattttttaatttaattttttttgttgaaaaatctagatttatttgattttgtagaaaaaaatgtacgaacgaactgccattgatctatttatttattgcgccaaacattttgaaaatgcttgtttttacgccaaaataatgcatatccatcatttttaagaatttagaatggcatattatcaatatacactaaatatttatcaaaaactaaatcaagtatattgtaattatgttacgacctagtgcaaaaatgaaaattaaacaaaaaaaaaaaccaattacccatcaacattttgccacaacaaattcaaactcacatttgatgatttcacccacgggcacttccttcgtgtcgtaggtgcgaaaatcgttgtcgttctccaccatcacaatcactttctgtgttggggaaaaaaagggaaattaaaataagccatttttgaggggcatataattttttttacattcgattcgttaaaaaaaaaattttttttttttgctcatttaaaactttttgaaaatttggattcattttttggtttgaaattagggatttttctcgtaaacgaaaatatagcccacaaaagcttaatcgtgcgtgcatctattcgaattccgaactcaaataaaaaaaagcattttcgaaattcatttatgccaccaaactttttgacgcaaaaattaaaaaatagattttaaaattgttttttcagtgttttgtccgaattcgggtctggaattctagttgttcgaaatgggtgctgaattcgtgaaacccccagaaacaagttttcacgagatttgaaaaaaaaaattcgaaaaatgggggggggcgaggaaaaagttggaattttttgacctttccttcgagttcgaattaaagaattggtcaaaaactgatgtcaagttcgtgtcagtgaaccccgaaaaccttttcgaacaaattttgcacgacttataatggcaaaaaaaaaaaatttttttttcgaactacaaaggcacccccccccctccattttggtttttcgggtaccctaacttggtaaagtgccaaaaattgtcatcaaatgtaaattaaaagtgtgaataattaacaaacctgatgcttcatgtccatcgctttggcataggcaattcgcaggcatttgtccaccgggcgaatgccgacatacatttggctgagtttgtccgagtcgttgcccgtctcgtccaaatccttccattcctcacttttgctgtggccgaacaaatcttgggacatttcttccaaaatgggaaacaaattggcaaattttatatgctaaaaagcaaaaagattatttgaaaatgaaggcaattaattatagtttgttggcatttcaacggaaaattttttaatttggcatgattttttaaaataatttaatagttacacaatgataccaagattgtaaggtttggttggacatgggaaaagttggaggtcaattaaaaaaacaataaatcgttttcctcgaaaaatctttttttttttttgcaaataaacatttcgccaaataactatttaaatgtctaacaattcattcattttcagggagccgcttccacaattgtcggcatttccgtgctgtacactgttgatgcgtacattatcctgacctttttcaaaactatttggtgagttagcttaaaaaaaaattgttttagtcttctaaaaaatatttgactttttgaggaaatcaaattaggtagataattaaatttaaaaatgtattacaataaattatcaacattttaaataattttaaattaatataagtatgaaaaaattcatgaaaatcctgaggattccttgcaaaatcccatggaattatttaaaatgggaaatgatgcttcaggttgacaatggtcatgggtttggtgcatgggctggtgttcattccggtgttgctcagctttttgcccatggcattcttccaaattcggcacaaaaaaccacaaaagcacaaagaacaacaaaaagtggtggcaaaaacgaattcgttggcggcaaatggcacaaaaagatgacaattctaaaaatggcactgatcagaggcatttccatatccggtgaagaaaatgactgaaaatcttcaacaaacacacattatggccaaatttggcacattttcattttgttttgtttttttttgacaaattttcattgaactttggtttttaggggtataatttccattttttccggcaaattttcatctaagtttaatttttaaatgagttatattttccattttccatgcaacattcttttatgaccttgaccatttttcatccaccaaatttttcggtggcacaattggccctcgtgtcgggtgtagaattgggtgttgttcaattggaacggcacaaaactcaacaaaacaagagccgtttttttgtgccctacaatttctgttcttttttccttttttttcttcttcaaacagttttttgccgaaacggaaaaacgaaaattgaatttaccgaatattattatttgttgcacatatatttttttgttgctcaaactcattgaaaaggcatttcttttttttgtttgatcaaaataaaaaaaattgattgatcgaaatgttgcaaatatccgactttttttggatcaaattcattggcatagcatggagggggactaaaggggctataaccccatgaaaaagaaaaaattttatataccgtatatgctctaattatagcccatgggggattatttttncacctcctcagaaaaggggggataattagagactgggagattatgatagagggattatttttcaaacacctcgtagactgggggataattggagactgcgggattaatagagactgggctataatatagcatatacggtagcctcctttcctgccgaaaacgaaaatattttttaactttttcctgactggcgttgtttatcggtatcgccggtccctacctccaagaaatttttgaaaaaaatgcggcaaaaattaaaagaggtcgttgttcagagtggttaacccccccccccagaaaaaaaaaaaaaatctcacacttagaaattaaaaaaataattggaaattttttcctcagaaattacaagaaaaaaaaaatacttttcaaattgaatttttcaatttcggacagtttattttattttttgaaaaattagaggcaatttgggttcgttcactaatgcattagacaaataaaagtttaaatttgtaagtgatcagtccttccatccgtgcttgttttgtcagtcgtcatctcttgcggaaaccacttgttcactgatctcggtcattgcgttaaatgtgtggttaagccctgtggagaggggtaattaattaattaaaatatttactaatgagcggaggacagacttttaagaatccgtatattataatgtggattttgaatatattttttaacctacccataaaattccaccagtaaatttattgaaaaatatatttttattaatccattcatgattagccctaacttggttttatgaccgtgcagattttgggttaagaattggaatgatcagtctgatcattttatctgtcagtggatccgctcgggtggtaattgattagtcagtctttttatgccggggattaaatcttggtgaaattatcagcctttcttatcgctgatcactccagcataattgattcgtcagtcgttttatgggtgggggaggctaaatcttgatgaaattccggggggattaaatcttggtaaaattcacgggggattaaatcttggtgaaattatcagcctttcttatcgctgatcactccagcataattgattcgtcagtcgttttatgggtgggggaggctaaatcttgatgaaattccggggggattaaatcttggtaaaattcacgggggattaaatcttggtgaaattatcagcctttcttatcgctgatcactccagcataattgattcgtcagtcgttttatgggtgggggaggctaaatcttggtaaaattccggggggattaaatcttggtaaaattcacgggggattaaatcttggttaaactgcaactatcttatcgctgatcactgatcaccccacccaaatcccatcttatcccccctcacattgtccgatcatcgacttcttcggctgcggtttttgctgctgttggtgctcctcgacattgtccgtcgtgaacacacagtcttcatcatccggataatacaccttgtcatccaccgatgggccctcaaattagggaaatgaatctatgaaataaagaggctgggaaagcttttgaggaaagatttgatttgtccctcgcgtggatttgatttatcgcatatttaaataaataaaaataaataaaaatcaaacatttatttataactttgctctaaagcaaccaaattttttatccttgatgtcattcgatagacaaaaatgtttttttttattagtcagcaaaatttcaaaaaattttgttaactttcaaaaaagttatggcaaaaatattttaaaaaaaaaaacaagatttttttcggttcttttgcttataacttttttgaaacttaacgaaatttttttaaattttgcaggctaattagagaacgctttagggctaccgtaaatgatatataattaggtaaaaattttgttgctttggaacgaaattatgaagaattttttgtagaaaattttaatattgat

SEQ ID NO: 10155 - DNA, 1866 bp, Heterodera glycines
ttgtttctgtcgtctgtgaggagcattatgactattatcatccaacagagtgagaaaagggcgaaaaattaattaatttaaattaattttttacttttttaaaatacaaaataattattcaaaaatcatccaatttttacagaaaatggcttctcggcgtcgtggcattgcctttcattctgtgcggcctttgtgccaatggaatgtccgtcgccattttttcccaccgccaaatgcgccaacagtccgtcaattggtaccttctcgttttgggtgcgattcgctttttaatttaatttattttaaatattttttattttcctccatttctctcctttttaggcttcagtgatttgatcgttttgctcggcgccttcttcgttctcactttgccgaggctaagcgaaattttgcactggtggagagggacggcgataaggtgaaatattcgaattcatttccatgagaaaaaatgaaattaaattttaaaataaaataaaatgcagttattattcgacccccttgatgtattcgctgatgacaatggcgcaaacgaccaggtgacccattaattcattcattcaatggcaaataaagcattgtcttatccccccccctttttcgcagtgtttggatgaccgtggccatgtctttgcatcggttggcacccccaaaatgccaatgtccgatttgaaaaattaaatccccccaaaggtttgtcggcgtgtgctttccctaccaatccggcaccgttttggccacacgaaatgtcaaatcactgattgttggcattctttttgtggccatttttttcaatggatgccgattttttgaggtttttctcaagtttccttcctttctccactttatccgttaggtcagcttccaagtgtgtcggatgaagccaataaatgtcgaattgcccgtcctccgaatgaccgcactcagacaaaacgaattgtaccgcaaagtgttctatgaatgggcgtacactttggtcagacaaagcgccaattgggcgccaaattgacaattcaaaaaatgagctttcgtttttcagattatgttcgccattccgttcactattctgattgttgtgaattcgatggtgattttggccattcataagtaattaaaataagaaaaatttaagtatatttaataatgattttttgaggtcacggaaaatccacgccaaaatgaacgcgcataacgacgggattcggaagcaagaattagccaaggagataagcacctccatcatggtacggtgtgaaaggggtactgtatatgcaaaactgtaatgagaccatcgtttagcttgttgccattgttatcgcctttctgttgtgcaacactttggtgagttgtttttgaataattatcatcgtaattattccgccgttttaatccaacattagaacaattaccgtacccaattattttaccgtaccttccaccttttctaaattccccccgcttcagactttcgtggtcaatttgatggagaagttcgacctgaatgagctgtacgtgctgctagtgccctggagcaatatgctcgtgctgtgcaacgccagcattaacatttgcatttactgtattttctcggaccggtaccgtaaccttctgttccattatttgcactgctgccgacggaaagggggcgacaacactttcaacaacataaactcaatgagctatttatgacggaccgaacaattggccaattaaatgtgtgatattattaaaatgtaaataaatgaatgaccaaaaaaaaaactcaaattttcgtgccaaaactctccgccgtcggtgtttaaatgggcggcaaatgaaaatatatattttaaattacgaatttac

SEQ ID NO: 10156 - DNA, 2339 bp, Heterodera glycines
  unsure (1)..(2339): unsure at all n locations
tgacggagagaaaggaaaagcaaagaatgggaaaagacactcaaaacgatggaaaatgtcaaatttaaacgaaaaacgaaaggaattggcatttaaaacaaaacaaaaataagtgccattttccgaatgttttgagtaaaatgaagtgaaatttgggggaatgaccaaagaaagacaattggcatccactgatcggatgcctttctcaataaaagcgaccgttgccgagctgtgcgtttggctgcacgaggcgtgcctttgagtcggcgtaagcgtcgacgagaagcgcgccgttgagcggtgccaacgattcgggcggcgactcaatcgtgtccaacaatttctgcaacgcaccgggcaattgctgctggagggcaaactcattttgggccaattcgtcgaagagcatttccttagggagagagaggggtgatcagagtggattagagtaaagggagagatttaataggagagagcgagagagagaagtagggagagaaagggggaagagaagtgaattgctctgaaaacggactttgttttggctgacgtatgtgtacagctcgttcagtgccgagtacagcatgaactcctgcgaatgctcctgcgactcgtccgccagcagcatgctcatgtccgactgactgatcggctccatgttggcaatggtcgcgtaatacctacaaaagtccgctttgcattaccgtaccctctgtccgcttaccgttgcacccattctctgtacttgtccatttcgttggcgaacaacaacttgctgctgggcgaatccttcgtcaagtgttgctcttgcgtggagcaggcgtccatcagagtttgggcgacgacgttgagggacccttcgattttggtgggcttttggatgtcgaagatgaagtcgggattcttgatcagattgacccaaaagcgcaacggaagggcgttgcttttccaagcgtggacaacctgagaaatgggaagggagagagataggaaatgaagtagccagtaatcggaatggtaagtgatcgcaaatcctcccccctgtcattgcccaagtccatttttgcctacctccgggtcggtgatgccaagttcgtgtgcctggtcgtccaagaagtcgaacaagtactttatgcatggcgggaacggacattggggggtggaggagacggagaacaccgcctcgagcagttcctcgatgaatcgttgcagagtccccttcatcgtcagcaggcgagtgaggtaaatttcggttaccattttttcctgaaatgccatggcattgccttccctttttgcccttttccgtcctttttcctccacctgtccgtcctgcatgttcattccgcgttccgtgccgcccgtcatcggcttcaccaaatgaaacgcccgcagcgtcgcacccgcgtcggtcgcttcgcgcgagtgccctccggcggaactgccggtaccgccgccgccgacaaaaaatccgccggggcgatggacaggcgaatttgtggtggcagtgggagcaccgcggacagcggacagtccgcccgaggcggacgatttgtcggatttgtcggagatcagcgacagattgtaggaggaggaagtggcattgtgcggcacaagtgccaaagtcgctttgtcttccaccgaaaacagaaaaagacaatgccaaagcaaaccaaaggagtcgatatgccaaaactcactttgtaatgtgccaaagtgttgtagcgccaaaagccattttcacagcgcgaagtgccatccaagtcttggagaagcattcggtgggtggccgtgcgcagttccaagtcgacttcggagggcaacggccgttcggagtacggtgtggtacggtatttggcatccaaacagcgcattttgacctgaacagtgggatgatggatttgtgaaggatgccagtgaatataagtgcctggctgatcgagtcgcagtcgagcacgcgcacttgcgtatcgcaaatggcggaggaacagtccgccagaataaacagagtcaactcgcggaagtcgagcgaggcgcgcaacagcttctcctcactgagcgagtaacgcgcgtccattgtgatggcatcttgcggccccttctccgtctgctgtttggtggcccagtacagttggtacaacggtttgccagagaagcgacgcacgaatttgtacatgagaaaggcgaaccaagcggacaacttcaaagggagagggaatttggagagggatggcggagagggggagggggaaacaggggcgaaagggacaaagcatgggaggaaaagcggcgggagaggacatggaaaatggaagagggntggggagggagcactgctg

SEQ ID NO: 10157 - DNA, 1825 bp, Heterodera glycines
  unsure (1)..(1825): unsure at all n locations
gacccgaagaactcaaatttgatcgactgaccattcgttcggctacgctttccgctcttctgaacaaattcttcggatggaattttccgtcagcatttcgtctgatcagttccttcagcaattgcttcaacacttccgtacagtatgccatcttctcctgaaagggtacggtaacncctgcccattggcactaattcgctcgacctgaaggataaccatcagcaacgagcccacatagacgcggtccttcaccagcaaatatttgttggcgtcgatggaacgcacaaaagagaccaaaaagtgccgattctgaaagtgtcgggaaatggcattttgagcgtgtaatttgcgtgccattctttggccacctgaagcaaatagtgcagctgacgaagtcccgactcaatggccaaggcacggtcctggtcaactgagaggggacacagcgcgggatgggtgtgtccggggtaattcgggaacagaatgcgcgcggcataatccgcgtacggcagaaaagggataaaagaggtgccctggggcacgctgcccgcgagtgcgttgatgttggtctgcagctcgtgaaaggcctcctgcgaatcggaagggggaaggcaatgagtcagaaatgctaattgatctatcagtccgtaatttgtcaatcagttgatcatttaatctttggtaagctgtttgtttgttagtaacattgttaattagcccatcattaactaattagtttggctctaattgtccctcttttttccgctcactttgcattcttgcgcgacacgcatttcgatggaattcatttgggccttcagatagcgcaactggcggttgtgagaagtggactttctgcggtacaacacgaacagtgccaaggcgaggaaaacgccgaggaatgcaaccgccaccgccaaaatgagccattccgaagggtcttggccccgcgggcgttgggacgcttcgccaaccttttcactgaaaggacatttaaaattcgcaacattttagcttcgtgtgtacattttgtctccgatgtgaaccaaaacgtccaccgcgtcgtcgtgcgcgtcgtccaaatgcgcgggcaacacgcaagtcaatgtgttggacgcgagtgcgctcacattgcacggcaaaccgcccaccgacacgcgcacatcacgcggcgacgcggccaaattcaaattctgccctttcaaaacgaggtcaccgccgggacggatggcgagcagttcgggcagagggacgaggcgagggtcggggaagacgaggagcttggggaaagcgcgatcagcagtcaaattgctaaacggaggggggggggcgaattgtaagactaatcggaagaaaaagcgaaggggggacggacccggtcagtgtgccgtccaagtcgaacccaaagtcgagcctcatgggccgctcgacggacaactgcgccctgcgctcagttggcatttccagcggcggcgtgcgacagaccttggcataattggcgattgattgattaaggatatggcaaaatgccaacccaaccaaccatcaaatgctcatccacgccctcacatcgagcaccccaaaatgtttgtccctcgtgcacaactgacattcgcgcgcgttgcaaaaggtccaaacctttgccctgaacgtccaattggatgccgccggaaacggtggagacgggacgggggacacggtcaatggacggatttgcactgaataaaatgtaaatggtggcggaaggagaaaaatgggggaaggggggggggggacggggaggaaagagtgccaatgaaaaatggggaagggatgccaatggtat

SEQ ID NO: 10158 - DNA, 1174 bp, Heterodera glycines
  unsure (1)..(1174): unsure at all n locations
gcaacttttagtgaaaaaacttttttttttgctcaattgttttgaagaaaggagctcaaaaacgcatttctgcgttaaaattttttcatttggacgtcacttttcgtcactagaaatcactattttagcgtttcgtcacttaaaatagtgaaaattcacttttttggctttttatcactattttttcactttttcgaaattttttggaaaatccttaacaaaaatgcaataaaaacaaaaaaatacacccctaagaaccgacctaaattttttttttaaatacacgcctaagaatcgacctaaaaatttttcaaaaaataccagttagaattggaaaattttcataaaaatttttcccccaaatttttttcttacaaaatttttggttcaaaaatttcaatatttgctaaaaaaatgtaagaaaggaatgtacctcatttgtaactgcaatcagtgaataaagatttttttgctcaatttttggctgaaaattatgtcactattcgtcactattttggactttttccactattttgtcactattttggcactttttcgtcactattttagttaactatttcgggatttttcgtcactaaaagtcggttccctaaatatcactatgaatttgccgtttaggttgactaattaaaaaaatcactaatatttttgaaaaagttccaatcagtaattttaaagaccaaaatgatggaataatttgaggctcgtcggcagcgcagtgccgtggctggctggctgttcgtttggatgttcaaattttttgtgtgcttttttatgtcctcactttgaacgcaatcttcacctatcaccataatttcggcggcggacaattcttccgtctgcataacttgaccaggcccgtagccaggggggggaaggggggggggaattacacttcgggtccttcttattcagccgccgcatattggtgccatggtcgcactttcaactggaaggaaagtcaagaaggggtgtgtgaccaccggagaagtgggtgcaaatgggcaactgattgaaattggcaatgtgcaccacaaagcnaaggcggcgatggatgccaatttgttggacattatattgccatccgggaacaagaagcattttcaacgagtccggagtgtaagaaagagaggaatggtggcacattatgccg

SEQ ID NO: 10159 - DNA, 2178 bp, Heterodera glycines
aagctagtctaaaccgggagttcggtaatcagttgtcggtctccgtgagggagaaagggaaattggacccttggcagtttgtctgaaaaaattgtggaattccatgcaaattttcaaacaaaaactggcaaattcttaaattctataaacttatttgtattcgttttgcctcagcgtaggcacatcgagggaaaaactgaaattggaccttggcagtttttctgaaaaaattctggaattccatgcaaattttcaaacaaaaacttgcaaattcttaaattctctaagcttatttgtattcgttgatattgtcagccattattattttctctaaatatcttcccctttgttatttctctcatttttccacactctctctctctcttgcctgacaaaggagaggtacccaagtgaccgtgggactttcaatgaaacttacagggtaggtagattacccctcttttgtattataaaattttttttatttttgctaaatgaagcttatggccgagatatgaagcttttcctttttgctatatcaatatcatttacaaagaatgtaaagccgatgtgagcgtctctggcaattttaaccttaattttttttatttttattttatatgatagaataaaattttgtttattgacctattatttttatcagaaaaaggattaaaaattcttttcgttggtcctctcatctgttccctctccaaactttgacatttttgagaaaaatttaggaagatataaaaaattgaaaaatacattcataaaaagcactttttcattgcttacaacattgcaaaaatttttatttctttcgaatgccgaaagtaataaccagggatgatatggatggtatatctgaggctttagcatcattttgtggttttttgataggtcaatgaggctaaattttcaaaatgaggctttgaggctttttgtggttttttgagaaaaacggcaaaataatgaattttttttaatgaaaatagggtcaaaattcttaatttttcccccggcggcgcctgtcggcaccgccggaccataaaaatttgctcaaaatcacaaaatttggtcatttttgtggacaaatctgttaacaaatcgcattaaaaattacaaaatttttcccggcggagcctatcggcgccgccggacccccttgttcccaaaaattttttggaaaaagcgccgcaaaaaaaaatcaatttcaatttttcatgctaagattttcacaaaatgcttatttcaaacaaaaaattgctcaaattggtcatggacagtcaaaaatacaacatttgaacattttaaacatgttttgaataaatttaaatgatgcttttgacccaaaatgaggtttttttgcatgccaaatgaggcttttgaaaatattcatctgccatccctggtaataaccctttcccttttcgtccgtccccagtcattcttaaattcagtccgcatttgccattcatctctctctccatttatttattatatttatttgcttctgactttatttgattgtgttcaataaatattagtgtttgtgttctctcaaccaaagaacacaaacaattacatcaaattatataccgtatttgctctttttatcctcagggggataatttttcaaccccctcagatactgggggataattagagactgtgggataaatggagacttggtgattttttttcggcagatttttaaaccaatcggggtttttgtgcctaatttcaaaaatacatccctaagaattgaaaaaattttccctaatattgatacggaaaataaattatttttttaataaaaatttttggtttaaatttttttgtctttttcaaaaaaaactaatatatttaatatttgcataattcgtaagattaaaaatgcaggaaaataggaaaaccctgaaatttgagaccgaactctgagactcttttccgagggataaaccatcatgacattatattagagttcaaaaatgataaataaaatctttttactcaatacaaaaataaataaatatattttttttggtattttttaatgctttggcattgatcaaattctttgccatctttctttacatcataatcaatcttctttctcattcttccttctccagccatgctcagaaaatagctaaaatattttttttaatattt

SEQ ID NO: 10160 - DNA, 1300 bp, Heterodera glycines
  unsure (1)..(1300): unsure at all n locations
tttgttgttgcaatgtagaccttggcattcacattttccatcttcggtgcatgctttactgcatacgtattggttaggaggcttgcaaagcggtttaaaagggtcgttgtatttgtaaccgatgcaaaaaccccatcttccttggcatccgttgatgcggaacagctcgctgccatccgctgtgcgtaatgcaattaatttaattgaaaaaaaaaattattttaccgtttttctacaaaacagagaagggtcctcctctgctgctgcagctatcctaattacccccctccccacctccaaaaaattggcaaaattttcccaataaaaaagcaccaagttagttaggtaattttatttgaaaaagcagtgtttctccaaccccctctttgatggcatatggtgtttttttttgcataaattttcttggtaaaaattttctcgattttttgataggaatttacgaaatgacacactcctagcagcacctgctgctgctgctacaatatgcatatcatatggacaacaaacctcgtgtacaggttattgtggtgcaaccataaacttcgccttcgcggcaatggttatccccaaggtcaacatagttctttagatcaactgaattaacagatagatcaaatttatgtaaaagtaaacaaaaaaaaaatcaattgcaaaatttgttgattttttttttcaaagtttcagctatttttaagcattttgttattatgctgcatttattttaagttatatgtattaatatttgatttttttttaatttggctccaaaactttgtgagtaaaaataaaaatcatttttctcagccaaaaaaccaacaaaaaatatttaataataataataataaatttaaaattgagtttctttataatataataggtattattacaatctttccatttgtcttgtgcaaaaatctctccgaatcccggtggatacggttggcctttcgtgtgatcggcgtgtcggaaggattgtgtacattgaaactctgtttccaaaaaagtgtattataatttgtcgaaactctctagctgtcgttttatgcacaattaacaggaccatacaaaaatccaattacagtatgcttcttgtttacggggtttgcccaatttttcaattatgattttggcactgtaaaaaatccaattaacgagttcagaacaacagataacccgggagtttcctgagtcgagactcaagaacgaacttctagaacatcattagaaaataacctcaacgcagtgttgtttgtacagtaaacccaaaatntaccgtacg

SEQ ID NO: 10161 - DNA, 3130 bp, Heterodera glycines
aaaagagattttttttacttccctaatgattggcttttgataaacttaaatttaacacatttttggtaactttttaaatttaataaaatttgatttgcacttttttcacacggcgacgcctaaaaccccaaattttttcttaaagacatgatcaaaatcgaaaattttgtcactttttggtgaaaacctattcagtacgttcaaattttcaaaattttccccggcgatgctaacggcaccaccgaacccccaaaattccctttatttttttaattgacacaaaaagaattataaaaaatcgccgagccatatttacggagagaaaaaacttacaaatttcttgttttgtgtttttggagttataatatgtacctaattgaatttaaaaaaggaaaatggttaagaaagactcgaaaaaaataaatgatttttaagcaaaaattttttgaaaagtctcgggtttttcggtctcggagtaaaatctcggtccgaaagagtgaaaattagggaccggcgaggggacgggatccagacacggggttttgcggggtcctagtccgcaatcccatattttttggaacctgcgcgatttgcgggatccgaattgtattgtttttgaaaatacaaaagacagaatgccaaactaaataaatttactataaaatcaattaaagataaaccaattttccttcgcaaatcccatcaaaattttgtgaagattttcccgcggaacggctccactttattaattctttcaaaaatgactcaaaagcggatttattcattttttgggcaaaatcacctaagaaatagaactaaattttcaaaatttcccggcagcgcctagcactgccggaccctctccccccaatgttcccagaaagttttttgaaaaagagcagctgcaaaaaagcgatctgaaaagcaacgtaaaatcaaaaatcatcaattccgtgggttaccgccgacccaagctttaggcagaaaaattcgaaggtgggaggaatcatatttttttttgctttaaaaaaacattttttgtcttgactttagaaggaatcacttacctaatttaatgcctgatcagacttattcaattgcctaaataatctttaaaagatttttttattgttgctaaagccattgctagtagtaaaaaattcggtaacgcttgaacaaaattttcaaaattatattttcggcaatttctaaatacgcaataaaagcggttcaaatgcatgaaatatttgtcttgccttcggaatcgtattcttcgttttatttcatgcattttattgcatatttagaatttcaaaagggggggggggagtaccatccgtactatttccaaaaattcattcactggcgtaatgcccactgttcaagtcctcttctatacaaacgaattcactgtacaaatgtccactgtcgagatttccactgccctgaaactaatcttttacagtaaattttttagcattttgctagtttccttttgattggtaatggaaaatgcttggtctgctctacgagctcttcggatttcttttcaaaaacggacaccgcaaggcttagctgatgggttaacgattcaccatgtggccatgcgcttgaatttctgaatttcgttgcgacgcaaatgaagacactcgcgcaccaaatgcttctgtggaaactgcgcaaaaagccaaagtgagttcacttgtttaatgtgcaaaaaagcataagacatgaattcagtattactgggaagagtggatttttcattttgtttttattaatggtaaagcaggccttttctcggttcttttaaattgacctaagtggttttttgaaggattttttgatttttgcgatcaaacctttgctctcgcaagcccttgtttgacttttaaaaattcaaaaaaaaattctacctttcattatattaccccattctcctgtggcgatctctaccaccagccctcacaaaattcttatggcaacgagaaacctctgatttaattttggttcaaaaataagattcgaaaaagatcaaattaatgcaataaagattcagcccattaggttatacatatctagacggctctatccccttgatctttagtggaaggagcaagcatgaaggatgttcgcaattgcgcctgcagcggcgagggtggcaccgttatttctatggtgcacaacgaattcggcacaaaaaatgtgtgtgtggcaactgttcgctgtgcttgcaatagcgtgtcaaaattgacttatgaactaactaagtggggacggcgtaaaaagcaagtttattttataagaaatatttggcaccaaacatgcaaggaaaggaaaaaatagaaaatcaagagagaacaatttttgactaaagttttggtactttttaattatcggtactcacaatcagatttcactttttttagcaatgaatttgttttaggggttttcagggtaggatccgatatttatttcaaccaattccggacccggactcgagcaaaagacaaatttattttaataattgggttatttagcaatggagaaccaaccaccaacatgagttgtattcggttaattgtgatgaaaaacattcaactggaaaatgttgagaagatatttttggctatgcccgaggactattcattggtgcgcatgaatgaaaaaatttgggccaataattttatggacgaaatagtgaagttgacgaattagttgtattttcttttgtcgcataaatgttatttgaagaatacccatttttctttatttctttttatttaataggtcgtgcaattaaaaaactaaacgttggaaattaggtgtgtttgtgccaaattgtttaaggatttcattgcaatgcttgccaaatttagtcaatacccgtatcttttttcaataaagttaacgaaaagccacatttggcgctgttgtgcgaattttatttgaaaaaagtgatgaaaataaaaaaaatgtggaataataaaatgaacaaattaataaagacccgtcaattacaaaaagaaatgagatttctttgagaaaacagcaaaatatataatgtgaatgatgggatcggtcaacttcattcgtcgtcagaaccatgggtgccacgaggggtccatgc

SEQ ID NO: 10162 - DNA, 1463 bp, Heterodera glycines
gcactttgatggggttcacaatgttcaggtgcgggtcgtcctctgccgcctttgcgaaaacatcccacagaatgggtcgaagccaaacctccagcgaaagtgcgtttaacgaacgggcaattgcgggaagagcaccgacaaaatggccttaaaaagggggagggtggagcgagtaaattggaggaattaaaaaaattgtgtatgaaaatcggcataccgtcaatggacaggccaaggaagtgggaaatgttcggcgtcagacggaagggcacaggacgatttgcgtcaagttcaactgcaaaaattaaatgtacatagtaatggacaaaaatgttggcaaaaataaataaattcttaaaatgggttcaccccaaaaatttttttaaaaaatttcagcggcgagattttgtccccttcctctcgaaattatccctgcctgtttaaacgtttttattcacacaaattaagacccaaacagtaaaagaacgattttcacagaacagaaaaacaatttttatgaagcaaccctttagtgttatttatagtaaaaagaaaagaacgtactgaacggcactttgccggcgattgtctcgcacacttttttggtcaggtcaaatttgtagtcggtgaaaaagagttggccggtggacaggtccaggaacagcgcgtcaggacgcattgaggacagaaagagcgcgtgttcagagagaccgagcagagcaaattgtatggccaactgacaaaaatataaggcgatgagaacttggcattgaaaatggttggtcattccgagctagaaaggcacgggaacaaacccatacttttcaacatggactcggtgaagaaatttcgctttttagcctatttattccatttattacaaaagattttggttaaaaataaaattttaaaaaaaggattaggtcagtaaatttcaaagaaaaagatttacttatcctaaaaaacaattgtttcacctttttcctggccatccaaagcgttgtcgcgtccccgtaaaattgtgccatccaccgggacagcaaatccttcggcacagtgaccagcgatgggcgatgggagtgttgctgttcagcaccagcaatgactgcagcagcttcacttttggtgccacaaatttggttgaacagctcgtggatggtcttgtgtgaataactgaaacaaaagaaacataaacaagtttttttcttgctcttgtccatgcttttaaattaggatttcaataattattaagaaatttctctatattttctgaatttatcttctactgaaaaatgcaatgaatgtctcaccgctgctccgccagccgttcgtagtactggtcgatcaccgtgagtggtgacaatggcacgatctcacagtcagtgccaacggcggcggagttggcactgcgccgtgcattgatcatgtcgcacagaatgtccgtgaacagagcaaaattgtgc

SEQ ID NO: 10163 - DNA, 1532 bp, Heterodera glycines
agctgctcccgttttcacggatttttagaacaacaacaaaaaattatcaagagggtggggggggcggaccatcggcaatattacctaatgcattaattcattattcaattcgttctttgccttctcccgtcagaacaccgccctaatggccaccggaatgatttggacccgttactgttttgtgatagtgcctaagaattactacttggccagcgtcaacttctttgtcggatgtaccggactcgctcagatattgcggattgcgcactatcagtacattcattctgaggaaacaagcaaatgaatgatgagaatggatggacctcttaaatagattgtcttctcatgcgtgttttttgcgggttaacggctcaaaactcggtttttctgatcaaatagtattggttatttagtatgttgtgatcgtaaaatttgtattggtataattattcgtaagcgaaatattttaagagccaatggccaaatttgagattctgttttcgccggttcttttccattattaatgaaacagctaaatttcgagatgccagcagatggaagaaaagactaacaaatacagggaaaaagtatagacattttaccaggcatattttaggtgtttatgcaaagcacaataagtaattgtacatttatgtaattctttcgcttctgatcatttgcaatcgccgcacgttttggcacacgcccttcgctgtcctctgttgaatttagtcgtcccacttttggcatcgcacagtccatcgcccttccattggatgcatctgtcattttggcgtttcgtgccgttccctccctccgtcatgcttttcctttccttccctccctttggctttttccattacctttcgcctctgtccacacattccctcctccccccgctgctgctgttgtttctgttactgctccttctccccttttcgtggtttgtctccatcatcggttcaatgattaattcgatgggcggtggtccgaccgccgccacagattttgcgccgttcgctttgctcgtcgtagcctcgccacactttagacacgttttggtgcagaatttgatcatatattctgcaaaacatgcgatgaaaccaccaaaaggctaattgttaagttcgaaattctttcatctctcaaatttttgcctcatttcgaaatgattttccaaaatgtgatgctaattaactgactgattgatcagttcgccattccattattttaccccctaagctcggactgttgcaaaggtgcgcatttgtggtgcaattgtgcactttgtcagtgcattcgggcaccaccaatcggtgtttgcttttgggagggcctaaaattaattgccccttttgcgtgacaaatgctttgattgtgcgcttttccatccgatggcttcgcttttccttacgtcccaccaccaccggtcttccgctgtttttggttgtgttgtcccccttttgctcaatgtttcccttttcaacgggctctcctccgccaattgtcgcggaatttctccggactctaga

SEQ ID NO: 10164 - DNA, 2545 bp, Heterodera glycines
agacttgcgaacacggcacgaattgtctgacgaacggtttttggtacggtaaacggctgaatcctaccgtagtctctacaggtggacatcgcacaaagtccacaagagcccgcacagaagcgagagagcacgccaaaccatttcttctggtgacacttgtccaattgacgtgaacagtccacgacgcctttttttggggggggggggcgttggcaattttggaaagtgccggggtaccattttggtcatcttcgcatgcgtaatttatgtcctcgcagcaaatgccgcacgttttacggcacgattccgcaatgtcctcaagacctggcaaaaaggagtgaactcataattaatttattgatggacgctataaactgaactctccaaaaatgagcacccttctgcccctcgcctaatgaaccaaaaaagaggcattccctcccccgccacattttcggcacttccattccccgtccgcccacttttcggcattccctccccgccccattttcagcacttccctgcccctgtccccttccaccctgaaggttgcatttgatgtccctttgtcctgtccgtgtgtcaatttctttgaacagatagttgcacacctgaactaacaaaaaaaagcagttggcaatcgtttgacattttaattgccttatcacttcgcaaattgcgacacgtcgtcgccgaggggagcaattggcgcgtgtcgacgttttggcagcgcaacatcagagaaatggactgttcagtggaactttagcaaaaatataatacaatcccaataattcattcgcttttccacctcaattcgcgccaatttgaactcgcttttccaccacctcaaaatttcggttaaaaaatgcgtcaaaattttctcccaattcccaaagcatttgcaaaatgggctcctcctctttttggccttcacttttaattttctcttcttcttttccccccttcagcacattcacttttttgttgttgttttttgttcggcgtttttgcgccttttctcattttgttgctgctgctaattgcgacgcgatggccatccttcgaagagggaccatttgttaactgtgaaaatcgaatttatcattttactcaattagaaccccccccccccccatcctgaaataaagccccccttttgagtggggttgaaaaacagagccgggggctctaattcagtaaaatacggtattcaaaattctcttctctgtctttctcttcctccctctctcttgcactcactctctccttctccctctttctatcacactctctctgtctcgcagtctctcactaattactgtgccttcgtttcctttctaataaattaccttttcgcgcctttcggcacttttctcgactgatttcgaaacgcttcggtgccttcggtcctccaccattaattttgttgtcgaagtccaataattgtgccttttcggcaccgtcgtccatctccaaccactcattgtattgatgcgaatttgcggcgttggcgtaaaacccattggttcttcagtgaatggcttaaaggcaggccgaaacgaatgtttgtggtccgttccgtttacctttttctcctccgtttgtcctttttcctcccccaccgctcttcgactgattttctgtttctcccattttccactcgttggagttcgtttcttcagattctttttgcctttatcttcggcagaataccttttctttttttcattcatttgtctttggtgcgactaaaaattatcggcattttggttcgtttgttataatttgcggcaattaattaacaattactttggccactgaaaaatcggccatcggttggagaaatgaataggaagggtaaaaaaacaccggcaacttcttcacattttgtttttgcgacatacgacgtgcaagtttcaacgtgtctccgttgtcaaagtggtggtaaattttcgtaccactggcgaatgaaattgcgaaagattgtgagagggatgatgacgaatttggacataatgacaatggaagtgaaagaaagcggcagaaagggcggataaagaagtggtcgacggaagaaggaaagtcacggaatgggagcgaagtgaggaagaggaggacgaaaagggcggacggaagcgaaagtttgggacggggagaaggacgaagacaacgcatgacacgataataaatggtttaagactaacaataagacagtttctcaccctccttttatgcaattcggtgggctgttgtggtcactgctttcctccgtcagcgaatgtttttgctggccaattaaagtgggcgttttggcctcgtgtcaccgttagtcattgtacaaaaccattgtgaccaataaacagcggagttttgcacaatgaccatcaccctcgccgaatttgctcagctgaaaccaaacatttctctcattttatttatctcttcgaatggcctttcctttgctaaatgagcctttaatttttcaaatgattgaatattaaaataaaatttacaaaatgaatgaattaccgtattttagggt

SEQ ID NO: 10165 - DNA, 1646 bp, Heterodera glycines
  unsure (1)..(1646): unsure at all n locations
aatgagcattttaactgcttcgaaagtgtgcactttgccacggctttcttccgctcgctctatgacttggtggtgggncccggagaaaaacaatgggcgcgaagttgttggccccactttccacggggatgaagtgtgttgacttggcaattgtcaaattattatttgtaataatttggttccgatagttttaccaagatcgtcttgaccgttggtacccgtccattcgatttcgcaaaaatgacgaagtgatcacgcccattcgccacaaggaattgggagattggaagaagttgagcattgaggagaagaagcttatctaccgctactccttccgtcaaactttggtcacatttcgtcgtacattttctttggcattagcattatttggattcgatagattattattattttttctgtttaggccgagtttgaggcactgacgccttatggctatctcacagtcactttgttcttttctatgcttgggcttactattctgtacgcttcgtttgttaggacttacggtattcagttataggtactttgactcttatttatattttttgaacagtgacaaaattcaatgaccgattgcctgacactttcgatgatgaatataaagtttgttttgaagttttaagtaattttcaaagcaaacaaaagtattttaggaaagtcaggccgagcgccgtgtggtactggaaagggtaagcaaattgcgatgccatttgagtcctttgagaattattcgccaaaaaattcagggccatctttatgggccggcctactattacgattacgataaaaatcgctggaagaattgaagaggaagaaacgaccaaactcgaaattaaattcgtccgaatatttattttaggactacagtatatggaataataatatctatatttattgctgttcattggttattttaaatcagtctattcagaaaataaaaaatatttggctttaatcataaaaataagttgtattacctaattgattatgaatgttattttcgaaaccatcaacggcaccatcataatattttttcttactttattttgtgcctcaaccctttcataaaaggtttagtttacataacctattacaaaatccaagataccaaaaagtcctctattttttgatcatcataattaattttcacaatttatgccttctgtgaaccgtataaaaagggatcatttgttgaagttgcggtccaaggcgcgacagtctgaaagcaactttaaaaagccagctacgaaaaaatatacagagagaaagttagtgcagcataaaagcatcggaaaatgcatcaatttttataggagacaattggaagacagtttttcgaatataaacgcagaattaatcagccaatcggagctccctcataacgcaatttcttcttctgccggtttaaatgtttttatggacattttaaaaggttttgcaattaatccgactgttttctgttagtttcttacaaaaattgcccacattttcagttcgccaagtcattgagttggacgatgaagaacaaacnccaacccaaatttagaaggcgaaagtgacccaagagaagaacagcaaaagcttgtgaagaggcgaaattcggaagaaaagacgacgatggaacg

SEQ ID NO: 10166 - DNA, 3558 bp, Heterodera glycines
ccgaagtactaacgaagtaccagcaagtgattgaagagcaattcggagcgggagtgatcgaggagacgacaatcggcaccggacggagcgagtatttcattccacatcaggcggtgatcacgccaaagaagctgagggtcgtgtatgacgccagtgcgcacgctaagggagcgccctccctaaacgactgcctgctgagaggcccagtgtggctgccggacttggcaggcatgctcatccgttttcgagcgtgtcaagtgcccgtgatcgccgacgtggagaaggcatttctgatggtcggaattgaggaggcggaccgtgaagtgtgcaagttcctatgggtacgggacccattcggaccgttgacaacgagcaatttggtgccctaccgatttcggcggttggcattcggcttaacacccagccctttctgcctggctgcggtggtccgccatcatcttcgtaaatacggcacagacttcgccgaacaactcatccgggacacgtacgtcgacaacgtactcattcccgccgacacagtcgaagaagcgacggacaaggcacgagaggccaagcggatgttttccgaggcccaaatgaacctgcgggaattcttgaccaacgaccgaggtctaaacgacagcttcccggaggcggacgcattgggcaagacaacggcaaagatgctcggactcgaatggaacgcggagaacgacagcctgcgaattgtctttccgggagacactcccgacggggcgcaccgcagctcaagaaggacagtcctcaggaccatcgcacgattattcgacccactcggactgctggcaccagcaacactcaatgccaagcagttcttccaaaagctgtgggactccacccacagctgggacgcgcctctcgagtcggacgatgggcgagaatgggacagaattttggcaagttgggagggacaatcgatcactattccccgaggagtgcgggcggagggcggtcgcccggtgcagctgcacgtattcacggatgcctcggagtcagcttacgcggcggtggcttacctccgatcagaagggcaagacggaagagctcactcccgactcatcatggcgaagtcaaggttgaagccgaagaaggcggctgggacgtacaccatcccgcggatggaactgatgggcctggtcgtaggagttcggctcgcagcattcgtcagagcgcagctgcatcgcccaattgcggaagagcacatgtggagcgattccatgatcgcactgcattgggtgaggaaccgtaccccccagccccaattcgtcgcgaaccgattggctgagatacgaaaagcaaccgccttgacgttcggacatgttccgacaggagacaagcccgccgacgcagcgactcgggggttctcccccgcacagcttcagcaagccaatctctggtggagcggaccgacatggcttactaagccgtgtgagcattggcccaaggaacttacttttacagtggactcggaagacgggggaacctcgctggacgaacgagggctgaccacatttgttgcacggcgggaggacactcccgaaacttcgacagaacggactgactggctactcgatcggtgcggccggtggacgaaggcagtacgagttatggcgtggatgcgacggttcatcactgggacacatcgcccaagagatgacggcacgggcgaccctcggtgccaagacacgagtcacgggcggtgcccgcccgtcctaagcaacgaagaattgacgcgagcaaaatggcagctcattcggtcagcgcagagcgaatgccaagcacgggagggcatacggaccaaagtggacggcaacggagtgaccaggctgatcagtcggatcggctggtgcgcggaggccgaagtcagtaggccagtcatactcccgaagcactcaagggcgggagcactcatcattgacgacatccatgggcgacttcatcatctcggtgtagacggaacgctggccgaatttttgagggactggtggtccccgagcgcacggcagcaggtgcgaaaggtactcggccaatgcaggcagtgccgacgactcagggggatgccctaccccctaccgacaatgccgcagctaccgatggacagagttcggcggcgcatcccgttcgagtcggtgggccttgactacctcggcccgaccgtgaccctcgacgcgaacggacaacgacaaaagacgtgggtcttgctgatcacgtgcctgacgacgcgagccatttacgtcgacgcaacacgagacttatcggcacaaagcttcatctccgtcctgcggagattcatcgcgcgccggggtgccccgagtcggattctcagcgacaatgccccaaccttcacagtggtgggaaaaacgctgtccgacttcggcatggcgggagatgatccgcggcattttacggactcccgtggcattcagtggcgtttcactccccagcacacaccatgggccggagggatatttgagcgagcagtccagctcgtaaaacgagctttgcagaagacgctgggcagtgctgtgctcggctatgacagcttcgccacgttactagctgaagtggaggcaacggtcaactcccgaccaatcacttacgtcaacagcaaggcgggagagcctctcccgctccgcccaatcgacttcatccaagagaatgggcggctttgggtggacccacccgacacgactggtcaggcacaggacgaacggcgggacccgccgcacaagcagctagccaggcaatggcgggagtcacagcaacgactggaacatttttggcgacgatggcaccgcgagtacctaatgacattgcgagaaaaagccggatggaaccatgctcagcggcgtgtgaacgcacccgggacaccgaaggtcggagacatggttttggtggaggataaatttcacccgcggaacctatgggccatgggccgaatcgaggaactcagaggatcggacgggcacgttcggagcgtgctgatcagaatggcgaacggaagaatttgggggagaccagtgaataaaatttgcccattggaagaagcaccgccaaaaatgcacgaccaagctgatcaagcagtacatgaaccatgcggagacgacgcacgggcagttgagactcagagcgaagtgaggagtcggaacgaactctcggcagcaccaaaagaagaagaaaatgaaggaaatgtgagcgaagaaagtgccgaaaagcgaggacgagaagttgaagctgtacagcccgacggaagggttaatcgagaaattcggaacgacaattctctggggaatggccccgacgatccggacgagaaattcgatgacgcaacaacgacggaggaaatggcagttttcgaaaaagcggcagaagtgccttcggcagcagcaggagaaacgggaattttggcacacccgcattcggctccgagacatgagaaaaaatatttgggagatagttcgacggccccaggtctcctcgatgtccctacaaaagttcagccgaatccgacgagatctg

SEQ ID NO: 10167 - DNA, 2383 bp, Heterodera glycines
ggacaacgaatggagaagatcgaaatatgctgctctgacggttgctggacgaccataccgacgtcgacagtgatcaactacgaactgccggacgaaatgctcatccatggctactcctgcagcggccaatgctggcgagggttgggccccccgttcaacgtcactcagcgatgcccagcgagggccgagtgtgaactgatcagctgcgccttctgctgggaacagctagccaatccgacatgcaatccgcggtgggcttccaccctcttcgggttcggcgcagcactaatgctggcagcgctgggctgctgttgctcaattgcctcacgattctggtcgggagcgacaattttctcccgagcaatcgcatggggagtcagctaccccatcactttcatcaactgggcgacaggacgacacctcccaaggccaacggcgaaccaaatcgagagtaaagtgcggaagggagcgagagtcgcacgtgcagaggtgcgggagattcagcgacgcctacaactcagccgaagagcccgagcgatggcacaggcatggcagcaccccgaccgagcccgggggacccgcgcggggacggcagcggcgacactcattcctctgctactcatctgcggaacgacaatggccaccaagccaatctccgtcatggtccggtccgaggactgcgcgagatcggcagcgggacttgagtgtgtgggaacagcagcaactgtgctcacgctcctaccagtggaccaggtcaattcattcgtaattcgcacccaacaagacgaactgctcggcgccgttcggctacgactggccgccattaccatggtgtgcgtgccgaggaccgagagctggcaccgctcgtacacaatttcaacggtcgcagtcaagcgatgcccaacgccggctcgtgcagagagaacaaatgcggcacgattcggagcggggatcaaatccccgagcttgtctcgctgaatcatcgtcccggccacactttctgcatgcgcagcaccagcttttggcagaattcatgtgggctcccagcgccgtcctgcctcttctaccggtgggcagcggttccgtcgacgaccacagtctacgaggagtactcgtgccttgagtgggacatgcagataagtgcctgggtggaattggagacgaacagcggtcgcgtggagtcccagcgactgaccatccatccgggagtaccagagcagtgggggaacatgaccctatcggtcgtccccacctctctcccgcctatgcctgtgctgtccgctcacttcatcaccgacggacgggcggtggccatggggagacctctcccctccgatttgcattgccccgacgaggaggccgcacggggctttgacaattgccagctgtccatcagcgcatgccaaaaatgtgcgcctgaccatgacaacggcacggtgcattgccattgccgggaccttaccattggccgagtcatgaacgaccctgagcatcgtctaccattggatgtcgctcgacttcacctccacaacagcggaccagtcgtaaaggcggaatttcagtacacgcctgtgcaggtgcacatccaactcaacggattggagttggtcagcgagtacagcaacacgaagtgctgggtgacatcacccaaactcagcgggtgttatcgctgtgtcacgggcgcagcgctcacagcctcatgcaggacggaccacggaatggccttggcgaaggtcaaatgcgcggatggaactctgttcgcccttcattgcggtggcaacgactcgacaacgacggaggcaataccattcgaccgggcggaggtgttcacggagtgccgggtgaaatgccccgcggggatcacgaactttcggctaaaaggggagcttgcctttctccccaagcagcagcagttcggcttcaatcagcgagactcaaccggcgggcgggtcgagcccgggattagcctcagcctacccgactggcgaatcgaccctttcccccttctccatctcttattaagcgggaaaggactgctagtggcggtgggagccaccgcgatcggactggcagcgctcctcgttttcgtcaagttcagtccgcacttcagagtgtacagatcattaatggctatggccctaattacggtggtaatcccgatagtggggaccaattcagcgggtgaagtcacccgggccaaattcccggggacaacgaccaaagcggcgatcaatggactcagcaacggcgagctggacggggaaacgatgcggcattttcaatcggatatgggggcctacccccaccgtgccgtcgctattcttctgtttggcgcagcaggtggcgtacttggacgattcctcctgcaccaaaagcggcggat

SEQ ID NO: 10168 - DNA, 1022 bp, Heterodera glycines
agcgccgggggcgtacgagcccaaaaggggtggttccctaagcagcaggcggccgacgcccctcccctcccagcgacggccaattcgccgccggcggatttattcattcttcatttcgttcggcagggagatctctccctttgtcccaccggccgggccaagcccagccattactttcaatttgatttttcagattaatccccaacttttgtcaatgtcttttcacgaatttggccgagcgaagcaacgcgagagggccaacagcgggagttctctcccgccggcacaaccaaggagagaaaacggacgccaacagggtgagcagggagcacagccattttgggaggacgcccgcagggctcggcaagagcgggcgggacgccaaagcgttagcagcccgagagcgggcagcacgcaatggcagatgggaccacggcggagtattttgggagcaccaaggcctctcccaccggctgagcacgcggagacagtggcggacgaggtggaggcgctgaacgtcccgaattggacgaccgacccgtgggagcgtgccaaggtggaaagccacctccgccggaaggaactcaagggctggaggatggttcatctgcggacggggattgctgcaccaacaccgtttgtgctgggactgactgcggctcaccaacaactcatcgcgccgggatggacagtcagcaggtacttagctgagcaccgagagttgccgctgagacacgacgattgggcgtgcgtgcatgtgccgggcggagtggtcggcacctcgaagcgcagccgacagcgccagcagcagaggggagcactcccctggcgagcaaacgaagtccatgtggattggatgccgctggccatgattgtgtggaaggaacaagccgtgatcgaccgtgaggcagaggaagaaatggacggcgcaccagtgggtcataaggaggcgatgcgtgcccagccgggcggaacgggggctaggaggaacggagatgtcccgcccggagagtgggattggg

SEQ ID NO: 10169 - DNA, 786 bp, Heterodera glycines
atttatcaataatggatgatcatgaataatgttgaatagtgagtatccattgtttatataattgttgatcgcacagcaaccgacagaaagtgccacaaataatttgttaattttggcacaaaattctagcaaattatttcaatgaatgtgtaggtcatttgagaccggactcaaatggcgtaaaacttaaaaagcgccaaaattgttcggaatatgtacctaaattggctgtggtcataaatccggcctctttcaatcatggtcacttgagcatatatcatcaatcaatcactctgatcagcagtgatcgtcgctctgatcacttcgcccattgtccattacactgatcattttcggccataactttttggcagctgatcgacttccgcttgctccacttgtgacgcttccactacaactggttgcttcggtggtgcaacaccagaagcaaccggttggtccgctggatcaactgctaaattattgacattcgccagcgaatcactctgaacacctcctgccagtgctgctactccttcaattggtggtgctggtggtggtcctcctatcaccggctcggccagcgcttgatttggcgccacaatggacagaatgccaaaagcgacagtgaagcagacaaacagcagcaacgggcggcacatttttgtgtcgatttggcaatttgagcgataaaatctgtttttcggctgtaatttaaaaattaatactaaaacccgtgaaatttcattttttggcaataatctaaaaaacgatttacaatcacgt

SEQ ID NO: 10170 - DNA, 2313 bp, Heterodera glycines
aacaaagaatcttttttttgtgttgaaaattattttttaaaaatttcaaattaattttctttttttattggctttaattgtttatttgttaaactaggggtcaaaaggacagctcccttaaatcacaaaataagttaatataattgtcgtgttcttttttaaaaatttttttttatttttttgctttagatacataaattaatggcatatttatcaaaacaatattttaaattcatcattttatatagaaatatttttcagtttttgaattctaaaagaatcgcgtcatgggcaactttatattttgtcacacaattttactattttattttgttgtatttgtttggctcaaacagtttgtcgttaattggtaaacattggaccagttgcattatcgcttgtatcattattatatcttattatgatccatgcctaatttcgtggcgtccaagttcagagcaattcacccccccccccccccccctcctccgatcaatcatttctttctttcctttcgtttcgccgctttttggcgatggcggcgacggcgatgatcacgcaaaagtcctccccccccgtaaaacaggttctgagccgttcatttcgcagccaaattgggcacttcaccaatcattttcattccatgtcaaacatgaaattctctccttttttgagtacattaatatcattgtttaattgtttgattggacctttaaagtcagaccatttaaccaattgaaactgtttatcattcactgattattccgcagggaaatgaataccacgcgcaaaagctttgactgaaatgaaaatttgggaggcttaaatgcatccgatcacttcagccaagtaaaaaaaaaaattttaccactgagattctcatggaaattccgaggcttacatgtcagcccaaaataatacacataataaagcatttttttgtttttaataaacctaaaacagtgacaataaagacaataggtaaatgatagaattttataagtggtcagcaaattatattcattcttttggtgcctttcggttctgccccccccccccccccctccgaaacttatcggtgatttgattttctctgattggtctgatctgatatggttaaggcaaggtgtaaaaaaatcaatcgtccgaattaattttatttttaatgaaattttaattttcatttattttacgaaacgaaaaaaatattagtcgaaacaataaaatatttaaatcctttctttccctgcctctaaaaataagtcaacaacaatccctcttctgtgaaatgaatgctttagctatttttagtctctttgtccaaagcacaaaaagccgcggcccgggcgaaatattcagtgaaacatccatcagctgatgatgatagccaaaaattgagaagaaagccatcattttattcactgtgcttttattttattttatatttttagttttttttattttacatttatttttatggtggacaaaagccatgcgccattcattgtcattttgctgactctcgtcgtcgcactgcttatttttattgcgatttcacgtaaataaattaacttttgaattaatattttaaaattcttctttaagtaaatattatattttattagtttatttggctatatgaattcggtaataaaaaaatattatatgttatattcaacatttagaattttggtattaaatatccgacttaaaagaatcacagattcatgcaagaattaaaatttaacaatttttttcaggcggaagaaccgaataatttttttgcttatttttttacttttgaatgccgcaaaatatttttttaatttggatattatttaaaccttttttaaataattaaaataaaacaatcatatttttttatttcaggtccatcagttaatgtgcaaaaaagcgttgaaaatgaagtgtcctcacaacaaacacaacgaacatgaacatttttcaaatgatcaacagaaaggacaaaagttaacataattaaaaaaataaaaatgaattaacaattaattaattggcagaatttcgaaaaaataattaatatttaaattaattattaaggatgagtcagcacagtcattggcccactttagccttgaaaacgatgccatttgagcaccaaatcacttctcactgttctcatccgctgatgatcgatcatgtcaaaagcaccgatgctcaatcaaccccaattttttgataaattgccactgatattcagctgatttattttttacaaaattttaaaattaataaaatgatgaaaaatttattttatcccgaaaaagcatt

SEQ ID NO: 10171 - DNA, 1326 bp, Heterodera glycines
attaattggcagttgtcgcgtttgccactaattagtgacgaaaattttgctattaatcttgccataatttgattcttaatttctaaattttaacttaataattttttggcaaaatatcgtattgaactcctaaattccaaaaagcattcatccggtggcattgttttgagtttatgtcgccactaagcgaaaactgtttgcactatccgtgttctgtgcacaaattggttggggagttttccgggtttatatggttccggcttaaactcccaaccagcctccggttctatcccgaaattgcatcaaatattttaatatttatttaaggttaagtcgggaattaacagtcagtaaataataagcacagtgaggaggtgggagagaagcaaaataatcttatcagtcggcatttgttaagggtcaaagagaaggaaaagagggcaatacaatgtttaggaaaattacataataaatgctgggtcaagatttggaggcgggagtaaatggagaaatttagtgagatcaaagtacatgaaataaaagatttaatttccaaaagaaagtgttaacggcgaacactgcactgttcgctagaggaaagcaattatattttatacattttgccaccacaatttggacacagatcacttcgatcagctgtttttgcgattatccactgctgatcgcccgaaactttgccctcccttccccttatcattggctattatcgcccatttttctttatccaattcatacgatggctctcttttttgtttcgtctcgtccatttccttcgtcatttcctcctcctcccccattcttcttctgacctcctcctcccttctcccctcaatcttcccgtccattcgtcttctttccctccccttttcttctcattttctcaaatccgtccatttttctcgtcaggcgaaggacaatgtcaaggccgcggtgccgtccaatcgccacgctcaccgcaaaattcgcacaaccgctgccgatcgccggaagaatgctgcgctgcgggggaagacgggggcgggggaggacgggggcaccgcgtccgtcactcattaggaggaggcgtttttgtcattgcggtgagcgacgtgtgggagagcagcgggggaggagaaggaatggaggaagacgagagcatttgccgaccgaaccgagttagaattcgccgcaatgatcaaatcactccgccaactaactgatcgcattcattgccaccgaccgatccgtgtcattcattgcgtttgatacgaaccaaaataatggttgtttgccgtgtcgaaaattggggaggaagaagccattggg

SEQ ID NO: 10172 - DNA, 1230 bp, Heterodera glycines
  unsure (1)..(1230): unsure at all n locations
atatttttcaatcaatttaatttctctccccccccagggtgccatttgtcggaacagaatcagctgagcaagccgagtgccattcgggtgaacaacaaccncaaccttcgcattgttactacgagaacaactgctacaaccatgagaaacaagcagaattaaatttaataaacatggttcaattcttagacagtttctcattcacttcgacttgtgagccgggcggaattcgggtgagtcactaattaatcactcttttttggaatttgaattttgcaattaaagtttgatatttatttatttattttttaatttaatatttcaatggaaatattgagttcaaatttggctactttctttatttaaatatttcaacaacaaaagtttttatttgttttttttaatttagaaataattttttatttcattatttgacttattttattcacacctttttccaataaattcaaccaaaagccgagtttttgtcattttcttattcacacttttatttaaaaatataaacaaaatttaaaataatttttttacgatcctttttaatctaaaattaaaaatttttaaaaaatattttaggtccgagtcgattcgcgcatcccttacactggcgcactctacggcttgtacgacttcttctcgtgccgaattgagcccaaggagtccaaactgttcgactttctttttccctacccgcacatttccaagaactgttcggacagcattcgcattatggtcaaattaaattaattgttgatcatctgattaattaactacaagaggaggggatgccattttacccttgaaacctggcatttggttttggggtcccgtgcccagttagttttgacagtcacccggttttttagaaatatcgcacaaaactcaatttttaaattttcatgattaaattcactaatttgttgagacggttgaaaaatggtgctaaatattctattttgatgcacgaaaatctcggtcctaaagagtctcgacatatttcttcaacaaaataaataaatttgctcaaatttttaattactacatataaaattaaatgttcctcaaatttgtcagggccaagaagcactgctcgaagttgtgctgtctacggacggagtggagccgctgtactttatcacagccgacgatttgacctatcagacaaaatgccctctgcccgagcacagcaggtgagcctgctgtcactttttg

SEQ ID NO: 10173 - DNA, 1222 bp, Heterodera glycines
cgtagtttaattagcttttcttttcctttattactttgcacaatgttttgaagaaggaaaagtgaagttgaaatcgtccgaattttcgaacacatacaaaaacatggatctgaaattcaattggtcaaatggcatgtgccgattggtccaaggcagtgcccaactcaccggtcgtcccttttggaggcactgaccgctttgatgttgttcgctttgaactcccacctatggcttccgctcgccaacccgccgttcagttgcatttgtcgtttcatctgcgccctttggctgtcctccaacacgtggtacagaatgatctgacatttcgtggaggggttttgttcagctttttccagttaaataatccctccatatcctccccccccctctttttttctcacatcgtccgcattcacattcaaatagctcggcgtcagcattttgttcagctcctgaattagcactgggaagcgcgaagaagtaatttcgatgtgctgagattcgatgctttccatgaaaaattcggtccaaaacaaaaaagttttcttgtcgcgttccacgggggacagttggagagtggcggtgcattgattgatcagtttgatgttctccatggtcgacttcagaaaccaaacaggtggcttcaacctgaagagcaatcaatcggtcgattagtcaatcaaaaggtgttacagtaatgacagttcgtacaatggaattcggtataataaactttttttgttagattttatttttctctcacattgccattttctctgctgccaaacaagccttgttgtaatcttcggccagaactgaataaacagtgaatttcactgcgccgaaatggcttttgaaacccgaaacttcgaagaatgtggccacgtcccaatagtccgtcatattggccaatgcgccctttcggcccaacaaactgttcagcacaacagcaatttgctgaagttcgggcgactcttcgaactgttccccgcgggcccgcagcatcgttgtgaggtctaaagatcaaaaaatgaaaacagaaatcgaaaagtgacaaagcaaacgcactgattccgctgtactccaagggggacagtttgaaagctttgcgatacctaaaaaggaaacgatgcgaatttcagataacaataagccttgctaaattattttgccgacctccccccctccccggacaagaataaattagccatttctccgacca

SEQ ID NO: 10174 - DNA, 1958 bp, Heterodera glycines
agttagcagcgatttgtccctgtcgccgtttttgttccgacgattcaacgcaaaggcatacaaaaaacggacggcctaaaagtgaagtgcattcattgtcagagggacggacaaaggcggaaaacacctgcgcatgggtaatttgcttctggtcaattcgctcgaggtcgtcaataagtccgatgattccgtcataatcttgagtgtccctgcaaacgaagcaaatggacagaacgaagcgagggaaacctcaagcaaagcagaaactgatgcacagtgtccacggagagaacatctgacgggggaagagaagcgggtcaaatgttgctaattgaaagaacggcaaatgccaaagggtgagccaaaagcgagcgattagcggtcaaagtgaaggaaaggccaacaaccaccgatcagtcagtcagtctcacccgggttgtccagtcgcgtgcgcatcctttccagaaatttgttttggtcgggcggcgattcgatgtcgcgcactttgcgcaggtcgctgagaaacttctcgcgggcgtgcgcattcgcctcgatggtcacattgttcagtgcctgccgaatacggtcagagaacgtgccctggagaaattatttggtggtcaaaattgaaaattggccaaattaaacaatgccatgagtacgtaagaatcgcttcggcctttcttcaacattttctgatatcgctcgtgttgtgagccaaactttgaggatctgtccgcggagagtaacgtgggcaaatcgtctttggacagaaagtaaacaatcagcgaacaatgtgccaacgttttcttaagtccctttcaattatcactttggtatttttgcccaactttcaatgcttcgatttgcatctccgccttttggtcgtccggcaaatcgggcgagtacattatgatgatgttgtaagtttggcccatcgattctcgtacactttccaaatgttttatataattcggaaataaacaaaacgaataaataccccacgtggtaacagagactctgaacggtggggatgaaaagtattcactggtcgttgttttcgaatttgaactcaccggctgttgctgagtgatggaaaagtctatgagggcaatgtcggcgttgtaaaagctgagaaatattttggcgttttgcttattataatttcgttctcgggtccttttacttgtcaagtgtggacgactcgccgaagtcaagccggtcgaagtcgatcaactaaaaatgccagcattggttttgttcaccaaaaaagggcacttggaggttgacgttgagcatcgccgccatcgcctctatctcttggcatgccatctcccgaacccgcaggcatttctgcacctttttgtccatcaccagcaccgtcttcagcctgcgcaagttgccgctggttgagccgactccgccgtatttgtccagcgaatgcgacgactgtttgaagacattggcccgaaaagtcggcggccctaaaagagaaattcaagcggtgggttgcggcagaagagcggctgacccgagccggcaactgagttcgaatcgagagtttgcccaaaatccattcaaaaaaaaaacaaattaagggccaaaaggacgcattcttaaaagggaaattattaaattaatggaacgaaataataaacaaataacagaaggggaaagacgcatttctcttccctgcttcatctcatgtgccatttccatttcaaatgctcacccccccccccgcccatcccttcgaattccatggccattttagacattctttggcaatttgacgatgaaacagagaagcataaatggaagggaaaagaaaagtagagacggacagaatggagagaatgcaaaaaaggggggggggaagggaagcatttgctggaaatgtggcaggaatgagacggcgcggaattaaagcaaaaagaaaacagaaacgttttttatgt

SEQ ID NO: 10175 - DNA, 926 bp, Heterodera glycines
aagcataaaatataaatctcgaattagtaaacaataagcttagaaaagtgccttttatattcttaggttgagttagcaaaaaaaaaaaatgacaaattgctaacaaaagccgcttcgaaaatatttctaaaaaataattttctaattatagtgacggcttttcggatccatttgttatgcttggcttggtgccaaggggtggcagtcaaaggagccctggcgcagatgatcagaattcgccaaccaatgtgattaaattaagaaaaaaaaatagttttaaagattttaattatccactaattttattttaggaaatttcggaagcggattcgtctgcttcagctgctgacggtggtgccggtggtggtggcaattccgcgcgaaaaaatccgctcctgcaacgcttcagcggctcatttcgccgcaaagcgcgcaaggcgcgcggtgagacgcaaacatttgacgccgagaacggcattccggcacgcatcatcaaagcgtcatcagtgcagcggaagacgctgaacccgaaatggaatgagaagttccaatttgtgattggcgatgtgactgatcgcttccatttggacatttggtgagatttcggcatcgaatttttaaaaaattgggtgccagaccaataatttacagtgcctaatttaccggcacttacaagggaaccgttcaaaaaaaatatgggttgtaaacacgggaatgtttataaaaaaattttgaatatatgaaatctttttaaatttagcaggcagaaagtatttgtactaaggtatttctctgcaaaaattcatatttttctgaaaagtacgaaacgaacaggaaaatcagcatttttaaattccgtgaatcttataatttaaaaatcattttaacacagaaaaagtaagaaaattttctttaatgaaaataat

SEQ ID NO: 10176 - DNA, 4822 bp, Heterodera glycines
gagattcaagataaaatctcatcaacaaatttcaatttttttttaatatttcaggcattggtcatcatacaccaacatgccatacaaagtgatctcaccgaactgcatcaacatgtttggtaaatactatttttgttaattaaaaattattctcatttaaataaattgcagtcaatggttggcctatcttcaaatgattgaaatgggcatttcatttgactgtttgtttaatgtttttgagcagctatgcgctaaatggaagcccatggaacttgataaggtcctccagctaatgaataattgaattgaaatttattacaaaaatggaaataaactattaaaattcattaaacatttttgatttatgaaattttataaaacaaattattttaaatttatccatgaaatccttttttacttattattagttaatattaattaatccttatttaaattttaggatgaggagcatgtttttgcagattcactgattcaatttattgagcattgccgatccacaatttcgaaccaccggcttcagcttcgtgtacgtcgtgccggatcaagcagacgacgatcaccctcaccaaaacgcagtgatctagaagcatttggcgaaatagtgcgatgctttaggcgtgttttggaaaaattgtttttttaattaaacaaaatgacatggatccattgaattttaaatttagagatattttttatattttttccattatctggtttataaatgtattttgtattgacaaatttaggctcgtcagagagagtgccgtttttgcccaattggtggcacaacctcagaaaaatttttcgtcagaattgcgcgaactgttggcgcaaagtgccgtgctccattttgataccatccaagcaaatatactgcaacgctataaggcacaaattgatgctctccaagcattggctttacttgtccaagcgttgaacacaacaatggcacggtgtgccaaatttgagtcaatttttcggcattatgcaccggaatgtgactatgccgacattgcatatgagcaatttgatttgctggtaggttaaattcgctattggcttaattggaattatcgtaaatttgtaattgctttttttcatccaaatgtattttcaaatttattagtagtcaaaattttttcgattgaataagagtgggattaaggcaaaaaattttttcaatttctgatcggattttattaccatttagttcaaaaactatttagcttatttttatcattgcattattgaattcaaatttaattgaaaattctctgagttttaatttggcaaaaaaaaaaaaaattcatcagcctttcagctccatgaacatatcatctcgaaaatgatggatgaacagcggggtgcacttcggatgattatgcaaatttgtcacgctgatccatgccctactgacaatgtacagcttaccaacgtgttgcatgtgcacatgacactgaacgagttcagcacgttgcggcacggcacaacacgaaggtgtacaaaaatggaccaattggactggtccgaacattttgacaaagcaattcaacgatggcttgagctggcattgggtgaggaattattttttgtccatgtacataaataatgtgcatgctgagttttttttgcagcagttttttaatgcgaaattcctttaataaatttttttatcgcgaaatttcatttattttcaataaaaattgaaaattgggttaaattattttattattttaaatgcatttttttaatttaaaattttttacattttgtttatttttttttaatcgaaattgcatccttttttattttatttttattttcttccaaaacatatttctttgtgaaaatgaatatttatttttttttcagtaaaagcttttgctcgagttgatttctcgttggcattggacgtgcaaatgccgatcattccaaataatgacattcgtcaaactgtatccggactggacacttgtcatattatggaacaactgttagctgtctgggagcgattatctgtacatgaataattttgtttaattgtgtagaaaattttgccaagaaactgacgtcatagcgaaaaatccccgtttttctggttttaaaacatattttaaatccatgaaaaacctcgaaaatggttaaaattgtagaaaatataccatttttgcaaaacttttaattttcatcacaaaccaatgaaaatacaaaaatattttaaggtgacaaatgtattgctcagagcagaacttacagtacggtaagctttaaaaaacaatattacaaaattaattttaaattgtttttgctttttaagattggtacgattgttatgcaaaattgccaagcattttgctgatcaactaatgatgcgaaggccatttgaaaatatggccattcatcaacagaatcagccagcagcacaaactgcttccacttcatctgttgatcggctgagtactgatcaaatcgaacaattcgcttcaatggtgccaaaaataatttatacattaatttcgacaaaaattgaagaacagatttaaaaaaattaattcgaaaagagcttttaaatacatttttcataaattgatttttttacaaatcaaatcaaataatattttttatctgaaaaatttcaacccttggtcccaaattgctttgattcattattattattcataatgaatactaataattcggattaaataatatagataaatagctgtgagcaagttcgtcgtactttggcatgcactgaccgtttacggcttgatgaactgactgaactctacgaaaggaagacaaaggcaaaacctaattatgaaatttatcatagcattaattaaaataaaattcaaaggattaaaaaatttttaaaatttttgtagaacaaagaatttcgttcacatgttgaacgaccgttggacgcgtgcactcaaaacatggtggaacaaattgaactgctaattgaccaatttgtacggcggcagacggcgcttataaaaaggtaattaatcgggctaattaaaaattcctcttataaaattctaattttaaattaattttgccaaaatttgaaggccattttccatttggtgtggagccctgccgcatgtccaactgatgagtgcttgaagccattaattaaactgttagacgaggagctttcgctcgtccatcggtgccttatgcataggtaaaatttaattttattaaaatatttataattgtttttttagaaattttacgcgcgtaatgcaagcgcaaatgcaattactactcaagcttttccaggttgtaaaaaaatagaaaaacaattatttcgatgttcaatttatatataatttaattttccaaaaattgctaaatttacaaaaattgaattgctctgcccgaattttttttttaattaaagcctaaaaaatgttagtaattaaatttagtattaaaaataaatcaaaattaaaattatattttttgcgttaattttttacaaaataaaacaggagtgtgtgaatgagaatgtgggtcttgagccgagcttttatcgacgcttaaccgatgcgttggcaattttgcttgattttttccatgccgatggcaagggtattgccgtcgatgttttcgctgcttccaacgagtacaaacgatttcatgaacaaatttcgctgtatcaaatgccaactgagcgactgattgaacatttttatgcccttctgttgaaagcacaagatgaggcagtgaaaaatttgaaaaaactttaaaattttaaatgttttcaatttgtaggtaaatgagtgtaaatatggaattcttaaccttcgtgcctattataatccacattcggaacttctggtcattgacggtcagcggttttaattgatttaaatttttacatagatataagaaaatcaaaaaatatttaatttattttaaattatgctaggaggaagggacaaaaattaaaaaaggaattttcaaaaaaaacaaaaaatttttgtgagaaaatctaaaatgctgaaaaattctaattttttttcttgaaatttcatataaagaaggggcaaatttttgaaaattttattgtcatgggtgaaattattaatgaaatattgaagaaaatgacaaataaataattcatttttttaaattaaaataattatgattttttagttttaagtgcaaagcagatcattccactagactctaatgggcttagtgacccttatgttgttcttgaactgctcccgcgtgttcattttcctgatcagccaagactgaagacgaaagtggtgaatgcaaatttgaaccccgtgtttggcgaaacgtttgaattgtgggcattttatttatgatttttttaattatcaaatataataattatttaattatatttattattgtaatcagtcaataataatttggaactaaataaatgactcatttttcagtcatattccaccatatttgccacagagtgccttggtccattttgttatcatggatcacgattttttgaaggtatcataattttgcggcaaaattttaatatttttaatcaattattgggtaaaattaaatgtaccaaattatcaaaattaaatttaaaaaataataataaattttattaggccaatgattttgcgggtgaagcattcttggacctgagcgaggtgcccggctttgcacaaggtggcattggcggcagtctgaagcagttcaaccttgtccttacgcacccatccgcgcaaccttcaaacgagtcaattgttgtggtgctggcatccagaaaagatgacaa

SEQ ID NO: 10177 - DNA, 3543 bp, Heterodera glycines
ggggggggagtgaccgcgattcattggcaattatcctcactttttcttttattacctgctgctgctgctgctgttggctgatcatttgttgatgtaattgcctttgtttttccaaatttggcgaaaatggctaaaaatttcacatttttcccacgaagccaaaatttaggataattcagcaaattttaaggaccagccaaacaagaccacaaaaaagtcattttgctcatcttgacaataattagcattgcccatttgtctggaaacaaattggcattaattagtttgttctgaacgaagtaatttgtcggcatattttgcactcggcacggacggcacagcacacacagttcttttttttgtagcgtctgtgtgaagtgccgccgccgtcgccaagtgattttgtacaatatttgcacacattagggaggcaaaatttgttggcactgtgttggttgtgagtttttgaaatgccaatggttgagtgataagaaattggagggaaattggcattttggtattaaaaaaattttccaaaaaaaaaactaaatgcttttatgttaaatcaattaaatttttaagagaataaatgaaatttatgataaaattattatttttttgttaagagaaataaaattcatctgccgcttagctttaattaacattttttagccaaatcttcgattataacaaaaaatagtaattctaaaaaaccctgaaatcattttcaaattagcataaaaattgcaaaaagaattaaaatttcaaatttcaaaaattcaataaattaattaggaatttactgttaattgaatgaaaatgcttgatggaaacagcatttttgggtctgcctttgtttaaataaaatttgttgaatgagaaatggcaacatttttattgcgctcacgaaaatggcacggtttttttgttccaaaatttgttagccgtgccaaaatcattggtccaacatttgttgctcgcgtgccgaacgcatataaaaacagaaaagttttttccgggcattacctggggtggtgtaaatttttgccgccccgggggctgtcacgcaattttttttttcactattgctggcacaaatggtgcatttcggcacaacacatcatcgctcatcagccaccacattctatgcgcgcgatgtgccaatgctccaatatttgaataattcataaccattgcgccaatttcttgccgagaatttctcgacccatttcccctcgggggctaaacttacatcttttctttttttcttttccatttaaatttttcttttcacctccgccgatgtatttctctcatcattttcttgtggtgtgagcggtgtgccgttgttgttggttgtgccacacatttattaattgactttgtgccgtgagaaagatgcgcgaatgttgttggcggataatgaagccgcagcatgccgagcagtggatggccaaggcttggcgccggaaaaccggcggaaaaaacagagccagaggcacaaaaaaatgactaaattcatatcacaatttaattgttttgttttgccaattttggtaggcatcattaaggaagttgaaatgatgaaaataaattatatatccaaattaatttaccgcaaatttttttgtataatttttaatgaaaaataaatttttatgtgtattaaatttcttacaattcttaattgaaacttatttgaaaaaaccaacaaaatcaaacaaataaatcgcacaatttgccagacaatgcctctgaacagaattccagcgaggcgatcttaacaagcggaaaaccgagtttgaattgaggacagacaacaaagccacaaaaatgtgaacggaatggagtagagtgccacgggaccgggactttttggctgggaaaaccgggaaaaaaccggaactagtcccggtcccggtcaaaaccgggaccttggtactcagttgtactcagttgtccgtgttcaggtcccggtcccgctgcactctagaatggagcgataaacttgccattatttggtgtcattattttttgtaattattggattttttcttataaattcttaacaaaaatgcacagtaaatacaagaaatacacccttaagaataaaaaagaatttttaattttcgaaagaattatatggcaaaattgtcatttaattgaattattttgggattttttgccagcaacaagggcattattgtacaattccattcaattattaatcaaggtcaccagcagcagcagtcctcggcaccagggatggcattctgagtccgcaaaaatttttcggaattctttatgaggctcaatgtttcgaaaatctgaattaggacaaccaaaaaatcggaagtcggacttccgtgccatccctgcttggcaccgtccttcgtctctccgctaagcgccaattcggtacttaccgtattttctctaattatcgcccaatctccattaatcccccaatctcctccaattatcccccagtctaggaggggtttgaaaaataatcccccagtctccatttatcccccaggggtataaatggaattttttcaaagcaattaggtaattctaaattacaattcgtttaaatgtttaatcaacatgaaaaaataatacggaaaaataatttacttcaccctgcttccgaaccatttttgtattaaaaaaaatatccacttgaaaactacgtaacaccagggctggccatgattgaatttccaatcacggatatccgtgatccgtgatcacggcacggcaccccaaaaactccgggattgccgtaatcacggccagccctgatgtacacccacccccgtttggtccgaattccaaaatgaattttatttttaaaacttactttaaaactatgataaaatataaaataaaataccgcttgtaatgcaaaaaattgcggctttttcttgtgttttaatttgtgaaaacacaatttcagaacggagttctgattttttttgaaaatcgaaagtttccagaattctggaaaatttttcatctttaatttataaaaactagagtccggtaaaaaattttccgggaacgggaaaacgaaaaacaacggggcgggattcccgaacggaattcccgtgttttcccgtgggaatctcgttcccgccggactctaataaaaaccaaataaaaaattttattcttcctgtaccaagggtacccgcattagcaagatgccaataaggatattatccatacaaattttctaattttatttttgttcgagttcgggtcaggggttcgacattggcaaaaatgggtgctgtattcgtgatcagcgaccctaaaaaccccttaaaacttattttctaaaacacatttataggcatttaaaaatgtatgttatttatccatgcgaataacttttcttatttctattttcgtgcatttagtatttgattggagcaataaatgcgagttttgatgaacaatgatattttcgactttttgttcgagtttggagttcggggttcggaattggcgagaaagggtgtcatattcgtgatc

SEQ ID NO: 10178 - DNA, 5345 bp, Heterodera glycines
gcggggcacttcactttgcattccgtgaatatttctgcacggtcgaagggaatcgcctacccttgctgagtcattaccgccgcagtgaagggcaaacagtgtctcattagcgcacttgactttggccaaagcagtgccgtgatccgcgcggcatgttgcgttgaatgttgcgccctgaatgttgcgcccgatgtgcatctatagcacacactgagtgtgggtgaggacacccaacattttgtattgctgtactcgctgatcagctccaggcccttgagttggatatgtacctgaacgggtgaatactgaaattcagctcggatcgaagagccgtgattgtgaaggtgcaatcgtgccacgtccaatggcaatcgttgttccgggttgttcaacacccgtccaatgtcgaggtctctgcagtgacagtgtaccgtgccattgtcgtgatcgggggcgcatttttggcacgccccaatggagagttggcatttgtcgaaaccccgtgctgtctcttcgtcggggcagtgcaggtctgacggcatgggtctccccatggccacagcccgtccatcggtgacgaaatgtgctgaaagtgccagcattggcgggagagaggtgggtatgactgagatggtcatgtttccccacggctccgaaactcccgggtgtagcgtcagtcgttgtgagtcaatttggccgttgttggtttccaattccacccaagcgctgatctgcatgtcccattcgagacacgtgaactcctcgaagactgtggtcgttgtcggcaccgcagcccatcggtagaagaggcatgaagccgagggcagcccacacgaattctgccaaaaactggtgctgcgcatacagaatgaatgcccaggccgatgattgagggcaataagttcgggaatcgtctcccggttgcgaatggcactgcacgtgtttccgcgacacgatcctgccgatggacatcgcttcacggctgtcgttgagatggagtaggaacgcagccaactttccgtttttggcacacaaatcatcgtgattgaggcgaggcgaagtcggacggctccgagcagctcgtcctgttgggttcgaatgacgaatgagttcgtctgatccgatggcagtagtgttagcactgtcgccgctgttcccgcgcatttcagtccttccgccgatctcgagcagtcctccgatcgaaccattacggagatgggcttggtagccattgtggtgccgaagacgagcagaagagggagaagtgaagccgccactactcccgtcctggccccatggccccgttcgggatgctgccatgcctgggccattgctcgagctcttctgccgagttggagtcgccgctgtaactcccgtatttctgcccgcgcaacttttgctccctttcgcattttgccctcgattcgttccgctgttggttgtgggagccgtcgtccggttgcccaattgatgaatttgacggggtagctgactcccaaggcaattgctcgggagaaaagcgttgctcccgaccagaatcgggagaccaatgagcaacagcagccgaaaacggctagcacaagtgccgctccaaaaccgaagagggtggatgcccaccgcgggtggcacgttgggttggcgagctgctcccaacagaaggagcagttgatgagttcacattcctctctcgctgggcaccgctgagtgacattgaaaggggggcccgacccccaccaacactgaccgctgcatgagtagccatgaatcagtacctcagccggtagttcgtagctgatcactgtcgctgttggcacagttgcccagcatccgtctgggcagcaaatttcggctttccgtagccgccgaccgctgcttgtcttcacgccgcgtttcgtgcattccatgtggcacggcaacatcgtcgtgcgcatgtccgggtccgattgttccaacggtggtagcgatggggtgggttgacacccccatgccaaagttgggcagataagtgccatcattaccgccaaggcgaccagggggaatttgctcccccttttatcgaccttccgatgctcaggtgaccaaattctccgtggcttgcgattccgctgtgattttcgtcgttcatctccctgcactgctcgaccctccgacaattgttcgttccgctgcgtcactggcggttcttcccccagcatttgctcaggctcgggcgtgctttccttcgttcgttcatccgtgctgaagggagtattgctctcccttttgtccttgtctgcgccgtccgcttcatttgcttcgccgggatcacgatccggcgcctctcgttgatcgctttcttccgtctcgggacccgcctcaatggggcaaattttattcacaggtcttccccaaattcttccgttcgccattttgagcagcacactccggacgtggccgcctgatcctttgagttcctcgacgcgacccatcgcccacaaattgcgcgggtggaatttatcctccaccaaaacgatgtcccccactcttggtgctccgggtgcattcacccgtttctgcgggtgattccatcccgccttttctcgcagtgccatgaggtactctcggtgccatcgccgccagaaatgctcaagtcgttgttgagagtgccgccattgtctcgtcagttgttcgtgcggtggttcgcgtcgttggccgttcggttcggaggatcccggcggtggattcactatgagccgaccattctcctgaactagatcaatcggtcgcagcgggagcggttctcccgggttgccattgacataagtgatcggtcgagaattgaccgtcgcttcaacttcagccaaaagcgtgctgaaaccttcgtaatcgaggacacagctccccagtgtcttctgcaatgctcgcttaacgagttgcacagcccgttcgaagattccaccggcccatggtgtatgctgcggggtgaatcgccattgaatgccccgggagtccgcgaattccagcggatggtctcccgttatgccaaattcgcccaaagttttgccaacaatcgtgaatgtcggtgcattgtcgctcagaatccggcttggtgctccgcgacgagcaatgaacctcctcagtaaagcgatgaagctttttgctgacaaatcccgggttgcgtcgatgtaaattgcccgggtggtcaagcaagtgatcagaagcacccaggctttctgtcgttgtctactgtcgtcaagagtggctgttgggccgagaaaatcgagccccaccgattcaaagggcacccgtcgccgcactcgatccatcggtaatgggggcattgtgggaagggggtaggccatccccctgaggcgtcggcattgtcggcactgcccgagtactctccgcacttgttgccgcgcgcttgggcaccaccatcttctcaggaactcggaaagtgtcccgtcgggtcccgcatgatgaaaacgcacatgaatgtcatcgatgatgagtgctcccgctcttgaccctctcgggagtagcactggctggctgacttccgtttcttcgcaccatccgatccggctgagcagtctctggacgccattttcatccttttccgcccgaattttgtcctgaatttggcaagtgagttggactgcgcgaatgaccgtccattgggcgcttgttagctcgtcgcaacttgggacggacagcgattgtccgccaagtttggttttgctccgcagggggctttcttcccccgtgtcaaggctgggagttttcggtctcccattttgtttcctctgacagcgttttcgaacattcgtggtgaatcgcctgacccaggcagtcacgcggagaacttttgcccatttactgcagcgggttaagcagcgaattgggccattcttccttttgacagggagtgccctccctttgggctacgagcgtggcgctggtgagttcctccgctggggttgcttcctcttcgtcgtcatccactttgaactcgagctcatgtggccaggttgcgcaggaagtcgctaaccaaactgggcctttccaccataactcgaattgctgcaaatgcgcgggggagagcccccgagttgccgagtccgctgggttgttgctcgttggcacgtagtggaatgttgcgtccgtggatttgcgtatctcggccagccggttggcaacaaactgtggctggggtgtccggttcttcacccagtggagagcaatcgtcgaatcgctccaaatgtgctcttctgaaattggcctgtgtaattgagtcttgacaaacgctgccagtcgaacgcctaaaacgaggcccatcagctccattcttgggattgtgaacgttcccgaagccttctttggcttaagtcgggatttggccatgatgaggcgggagagaatgctcccgtccactccttctgatcggagatatgctgcagcggcatatgcgttttccgatgcgtcggtgaacacgtgcagctggcaatattcggccccttccgctcgggcgactctggggatagtgatgaattccccgtcccaacttgccacaattctgttccattctcgcgcatcgtccgcgtccagcggggcatcccagctgtgtgtcgactcccacaatcgttggaagaattgcttggctgggagagttgccggcgcaagcagtcccagtgggtcaaacagtcgggcaatagtctttagcaccgcccgccttgaactgtggcctccggcaccggcgggagtcactcccgaaaagaccatccgaattgagtctttctccgcgtcccattcgagtcccagcatcttcgccgtcgttttgcccagggcgtccgcctctgaaaagctgctgttcaggttttgatcatttgtcaggaactcgcgcaggttcattttcgcttccgtgaacattcgtttggcttcccgagccttttgcgatgcttcttcgactgtgtccgccggtatgagcacattgtcgacgtatgtgtccctgatgagctgctccgcaaaatccgagccgtacttgcgtaggtggtgccgcaccaccgcagccaagcagaacgggctgggcgttaagccgaacgccaatcgccgaaatcggtagggcaccaaatttgccgtcgttagcggcccgagtgggtcgcgcacccacaaaaacttgcacacttctcgatcggcttcttcgattccaaccatcagaaatgctttctccacatcggcaatcacgggcacttggcatgcccgaaaacggataagcattccggccaggtccggcagccaaaccggccctctcaacaaacagtcgttgagggaagggactcccttggcgtgtgcactcgcatcgtaga

SEQ ID NO: 10179 - DNA, 943 bp, Heterodera glycines
tttttatttgccaataaatctctgtttttttccatctttcaataccttttgagcattaaattcattttcccttttcttcaaatgtaattgaatgagaaatggacattaaatatgagaaacggagaaagatgcaaaagtcggcgtaatttgcataaattgacccttaatgagactgacttttggttccttcggcggaattcaatccaaagcaaaagagttaaaagggaaacggagggacggcaaatcggcgaagaaaaccttcaaaattgggccgcatttgttcgaatttccataaccataaaaggcattcaccgcaaaagggcagaaatgggcgcggaaaaggacacaaagccaatgatgagcttaacttcactctgctcctctgcttgtcccgcttcactcccttccgtcgcttttccttttcgccccttttccctttcctctttctctcctcttcactcgctttttccccttcctttttctcttcctcttactcttccttttactctttctctacctcttactcttcctcctctttcttcctctccctcttcacccgccttttcccctcactcttcctcttcccatcccttctccttccctcttcctcttccaattccttttcatcccctcttcctattcttccttcctcttccctttcatctttcctttctccaatttgcccctccccccacttcctttgactgaatgaatccttccgcgactgttctcatccctccattttctctctctcttttctgtcccattggcgcaagggacatttttcactcttccatcgttaattttgttttcctcccgggaaaatgccgtacaaagaaaattagccgagggttggatttggcagtgtgcggggggaggggaggcgtgagcggcgggggttatgtcattgtcatgccggaaggcccggggggggggggggggg

SEQ ID NO: 10180 - DNA, 3161 bp, Heterodera glycines
tcattctcttcacttgtcagactgtgccgaacatgttcatcttctcgctgtcctgctccgatatcctcgtctgttgcatctccgccactatcactcccatctccgcctttcgaaaagttattttcgttaatttatttttacacagttttggtttttccaggattgggtcttcggacaattcttctgctcaaccgcccctttcattgcggtcggtcttttccatttgtttctttctctctctcccctattttcatgccatttcgtctctggcattttttttggcatttcgccttttgtctcggctaacttctccgcttcttcagggtgtcagtttgtgcttctccacttttacactcgccgccatctccgtcgatcgttttatgctgatcatttttcccacccgaaaggctttttcccatggccaagcattgtttattataatggtcattaatttttgaaattccaattttaaaatctttccctcttctgaagaccatttgtctgttggcttccgcttttagtcttccgatgattttcatgcaaaaattgcggaattatgacaatttctgcggcgagttctgcttcgaagactggggacaaaacattggcattcgccgaatttacgggtcaattagccgattagaaattgtgcttttccctattcatttattgtcattccgtttagcactcttttgctcactgttcaattcattgttccggttggttttgccttttttaattaactaattaactgtaaattggttcagctcgctctgatcattttttgctacaccgccatatcagtccgacttggcaaagtgcgttcggtggtatgccggagggggggggggtggggggaagccccccttctgatcagtaaatggaacttcctctgatcagtgaccaaatgaagacctatttccgatcagtgaccaaatagaacaccgttttgatccgtgatcaaatggaacgctcaattctgatcagtccgtccccttccacaacagagtgccaattttcggaacaaaaaagcaggcgaatggcaaatgccggtgagtgctcaaagaaatgccgccacaaaacgacgacagcgtaccaatcgaatgtaagcatcaaattaaagagttaaaatatttaagtcatgccgctaactctgcaaaactttaaggatcttaattattgaaatttgtcttttaagtcttcttaagtttcttaaaaatattaatttatttgctatcgaatttattgaaaatatatatttttaaatctaatcaaaaaaatttacaatttttttcgtgaaatattcaattttttactagtcgaaaaatttttgatcataaaagcgaatttggatcttttgcttgctcctaatattcatctcaggttgaagaagtttatgaacatttagatgccaaagtgatgactataaggatgcaaattatatgcaccaaaacgtgcaaaaaagtgaaaatatgtaaaatataaaattgtcagaagtgagggcaaatttttttttaattctttaaattcgttaaatttgagcaaaaatctcgtaaatagctaaatatggtaaaaaatcatttaaaaaatgcttttactgtcctcccccaatttattaggttcatcgccatggtcatcgccttctctctgagttgggtttggagtgtgctgtacaatttgcttcgcgactacgagtgccttcccctgctcatctctcgccaagagttcttcttcggcattctcacccattgcatcgctatgagttccaccgtttggtccgtaagccatttcaatgccattgagtcgcttttgactcattaaaatggctaattgccccgttaattcgcaggaatccaattttatacgctttgctgaacctccaactccgcgccgccttcctccaactcattcctgaatgtgcaaaaaatgttctggtcgaattatgcgggagggaacagacgcagcaacaacagaggaattcggccgagaaaagcaggtgggccaagcgaagcatagactgagagagacattggattgatcagtcaagaaggaactgatcggatactgcgggatgatcaaggaatattgattggactgatcgggattgaggctgatcagccaagacgggactgatcggatacagcgggataatcaaggaatgatcaaaattagagctgatcagccaattatactagttgaactcattaaattacattaagcaatttaagattaaaacataaaggatttttggttactgtattaatttttttttcaattttttcagacttttggacataaataatggcataaaagaatctgaggaacggacaaagaaattgctgagctgtttcctcacttcgcgtggttcggtcgaagtgtcgacaagcagcgaatttggcaaaatgtcggagggaaaagcaaagacagcgcaaaacgcactcaaactgaagacagttcagcagaagaagaagacgaagaaggtaaaggaaagaaaagacgagaaaagaaaagaaaagtgattggaatttaaagggcacggaaaaaagaaaagatgaaaacaacggaagaggggacgaaacgaaatgggagggaagtgatcggcggaaaggggacgaagcggaaacgacagaaacggcacaatgggagggaagtgatcggcggaagggggaagaagcggaaacgacagaaacggcacaatgggagggaagtgatcggcggaagggggaagaagcggaggaagagaagcggcagcagggagacggacatggcacagcggcagacatcaaagagatggacatggacgaacagatctgatcagacggacggacatgggacagatcaaagagagggacacgaagagcacatatgctgatcagctgaaaacggcatacagcagatttgaagagaaactcaaagtgacactttgtattgtaaattactttttgcttttttatttactttttttttgtacatatggacagctgagagaaatgatcatttataatttgtgtttggcaatggatttggggggggggggactcgattaattcattttcctttccaacatcattcatttatgggtgaaaatgatgacgagatggagggaggggggggggggggatcttcttcccctgctttagcttctgcttttgtgccatgtc

SEQ ID NO: 10181 - DNA, 3761 bp, Heterodera glycines
caaagacaaaaaacctatttgtcaatgaattaccccgtaaatgtgaaccatggtcaataattcttccaaattatttgttttgttttttgtaaggtgttgcctagtcatgcaaacttttcttatgtttttaagagtcgcttatcacgaatctgaatcgatcattccgagtgtttaatggagtttgaaacaaaaatttgaaatttgttaaattaatttttcgaaattttgttcgaattaggattcgaaattaaccaaaatggatgtcagattcataatcagcgaccgctaaaactccggtgaataatttttcacgattttttatcacaaaaaattttcaatgattttccactatggtttttgataaaattcaaaatatacactttgcacatatattacttggaattttcaactgatttgtccctttgggtttcagatgtttttgaataaagctcgcgatgttgctgacctgctcatgccgtcatttaatgccagccctttcgggattccgatgtctttaatcaatttgaggaccggtcgaacagggaattacggttgggcaagcggtggttgctcaattctgtccgagtttggctctttggaattggagttcaactatctgtccagactgaccggcaatctgacgtacatgtcaaaatgtgctcgagttcgggagtatgtcattgaactccaaaaaccggatggactttatccggttggaaaacaaaaatgtttaccactttcaaacaaaaaaactttactagaattatctcaaccctcaaactgggaaatggtgtcaaagtatgttggtcttacttttaaaacattttggcaattaatttttgcttccattaattgtaagaacatgtttcggtcggagcgcttggcgactctttctatgaatatttgctcaaaatttggtagactttacggctgtgcgtttttcttatttcattctgtttaggattttcaatgggaaaagagacgaccatttgaaagaagcgtatcggaatgccataaaagcgatagaagaaaagcttttacacaaatcaactcaaaataatttgtggtattttgcggaaatgaaaagcagccgaattgagcataaaatggaccatttggtaattatttgggcaattagtttccttatttccatttcaggcttgttttattgctggaatgttcgcacttcagtcgctccaagagaatgatgaaacaacgcgcgtgaacactttgaaattggcagaacaaattggacacacatgtcatgagtcataccgaaagacaggtgcattttaaattgcaacaaatcttttgaaaactttgttttcagtgactggcattggacccgaggcatttcgcttctcatcggacgccgaagcgcaagcgacgcgcatttccgaggcgtattatattctaagacccgaagctgtcgagggatggttttatctgtggcgggccaccggggatgagaagtatcgcgaatggtgttgggaagcagcgcaggccattgaacggcattgccgggtggaggcgggctattcgggaattcggaatgtcaacgcccagcaggtacagccgtttaacaaggaaaccacccgaactgtctagtaaagtgcctataaatttggtaccaatgggcaaagcagtttatggcgaaaatcaaaaagttatggggcctagctggacttaatccgaatggttcccttgcaaatataagcaaaaacctttttagattgaacatgacgatgttcaacaatcgttcttccttgccgagacgctcaaatatcttttcttgatattcagtgactcaacagaaattccactcgatcaatgggttttcaacacggtaattcagagtttagagaattcaaacaaacattatttcttattctaggaagctcatccttttccgattgcacattctgctcaacaagttcagtgaggtcaaaatagcgaataccaaaattaaatggctttgttttaaaagtcatatgctcccagtgatacatacattaacagacgcacaatttaccgaatttacactgctttcaattgtattctacgcccttctttttttgcttctaatgtcagtatatataatgttatccttttattttcttttcatgtcagtacacactattttcgtccagttctgcctattttgtttcattaaaaataaagtgtttaacgttggttgcgtggcttcaaattgtcacagtcgttttcaagtaataatttaatttgtgaatcgattaccgatatagaaattaatgggacttgttagatataatagaaatttggtcatcatcataaatttttgtcgggcattaagcatcaattctctttttcgtctcattgtcagtgcttcggcaatcattaatctcattccgatcccttcgtttcgcttccaaatttctcccagtgctcgagtgcctaaactcatattttttgttgtcatataaaaagaaaacttacgcgttgttcactttcgagcagtccttccaagtaggagacaattgccttctggtaattaataatttcatttttttaatagttaataatttatttgttcaattattcatttttccctccattccgccccatcccccaatttgccttaatgtcctctctacgctgcttgaacagtcggctgtactcctcgcgaatcactttgctcatcaccagaaagtctttctccatttggtccgctttgttctcacactctttcagctcctctctgcactgagccgctttgtcagttttaccggttaagtccctttgaaattgagtaaaaatagcataaatttaataaacgccacaactcacagacgcgccttcgtttcgcgctttcgcgtcaaagtttgctgctgattctgccagttttgccaacccttcacgcgttcgtagaaaacttctttaagcaccgagaggagctggagatgctcctatataaaaaaatgtatgaaaatttaatagtaattgaaaaatttgcaattcgtgggaaaaaaatgccggacctttttaaggggaggaggtgggggtcgctaataaattcattaaaaaattccataaaagtttcccggcggcgcctacaggcaacgtcgggcctcccaatcccgataagtttttatctgatttacatggcttggtccccttcgtagagttaggcgtcgaccaccccgccccccttgacacggaaacagccagaccgacttccccctcacattgacgacttcctccaattgctgtgcgtcctgttccgcttcatgcttctccactatggccaaattctcgtgggtctccgctaattttgatagaattcgtgccaacactgtgttctcctcgcacgatgccaacatggacaatgctttgcttgactgatcatcgctgaatgccaaatccctgcgatgagtgaccaacgaatcgacgtgcgtttgaagacgggtcagcatctcctccaactcatccacctgactatgcacttgctcaaacctgcaaatacggaaatggcatataaggaagaaagcagaaatttcagaatccatgttaaaaaaccaaccaacgatcattctcatccatcggaaaggcgatttttgaaaacacatctccaacagatttgaacatcttaaacggaacaattaaagattgatttagttccaatggtttctattactgatgttggatgttcccagcagtttcttatttttacccactttccgcatactgctcccgctgaatgcagaagtgtggaagacttggca

SEQ ID NO: 10182 - DNA, 2625 bp, Heterodera glycines
cacgcgtttttatcggatacttcaaaggtgggcaccacaatttttctctgagtccattttcctctttcaagcattcgataaacacatgaacataattctggccgactgtgaagagatgcgccgcattaagcccaaacaaggagctaagaagtcaaacgtcgaggaggaaaagcgcattcttggcctggtgttgctgcgaggggacaaaatcatctccatttcggtggaaggaccgcctcaaaaggaggattctggtgtgcagttgccaaaggctggcggactcggtgggcctggacaaggacgaggtgccggtcgaggaatgccgatgggtgtggtgccgccaatgggagctgttcctccgggttcgcatctcatattatttcaatttgtttacactgcctttgttttttcaggtttgcagggcgccgttcgtggaattggtggtcctggaatgggtgggcccatgcagcccggatacatgcaagggatgccgcagggaatgccgccacgtccattttgatgctcgattttgttttctttgttcgaccattatttgttttcttacttttacacaatgatctgtttgtttgataaataagttatcgaactttgcttttgacatgtgtttggctgtattgcactttgccagtttataaattattcgttttattgtatcattttttccattcattcttgatattagaaatagaaatgccgccaaaaaagcaggttgagcagcaacaccagccaattctcggtcgattaggcacgaatttaaaagtgcatttaatacttttttcggttgaccaattccccttgcctaaattgttttcagatgggcattcttggcttaccgaatgttgggaaatcgacgttcttcaatgtactcacaaaatcggaagcccaggcggaaaatttccccttctgcaccatagacccaaatgagagtcgagtggctgttgaagacacccgattcgattggctggtggagcactacaaaccgttgagcagagtgccagcctatttgaccgttgttgacatcgccggactggtcaaaggtggatgaagctttttcactattctcatgagcatttcaaattcaggcgcatctgaaggccaaggacttggcaattcatgtaatatttgattgattgtcgtccttcactttcgttgctcatttaatttttttagtcctttcccacgtcggcgcttgcgacgccctcttccatttgtgtcggtcctttgaagacactgaagtgacccatgttgaaggtgtgccaaaaaatcaccagaacatttattgaataattttaggtgacgtggacccaatccgtgacttggaaattatcaacagtgagttgcggttgaaagaccaggcatatttggtgggagcgttggacaaagtggagaaattggctgtccgggccaatgacaaaacgaagaagttggagcacgacactttgttgaaggtcaaagagttgctggagacaaagtttgtacggcaacacgaatggaatgagaaggtgagacagaaaggggcgaaatttggaagaattttggcaaagtttaggaaattgaagtgctcaacaaacaccttttcctcaccgcaaagccaatcgtttatcttgtgaatttgagcgaacaagacttcatcaaaaaggtaggacagccaacccaaccaagttttgttcggttagcccgaaatataaccaaaaacattttcagaagaacaaatggcttccgaaaatcaaagcgtggatcgatgagaatgacccgggcgctgtgagtaaacaaaattctaaactcccattccgtaaatggccctttacaggtattaatccccttttcgggtgcctttgagttgaagtcggttgaactggaccccgaggcgagggcccaattcttcaaagatacgggtgcttgcagcgcacttgacaagatcattaagactggctacaagaccctttgcctcgagtatttcttcacgtgagtaagcccttcaatttccaaaacaattaatcatttgtcaaattgaagagccggcaaagacgaagtcagagcatggaccatccaaaaagggaccaaagcgccgcagggggctggacgaattcataccgattttgagaagggattcataatggtgataatataaagggaatgatggttggataataaatatgacaatgcttttgtttttaggccgaagtaatgaaagtggccgatttggtcgaattgggcaacgaaaatgcagtcaaaggagcggggaaatacagacaacaagggaggcaagtgccaatggggccaaatttgatggtaattccggtcttttaacaggaactatgtggtggaagacggggacatcatcttcttcaagttcaacgctggtgctggtttgactgctgccaaaaagaagtgaaagccgaaggtcgcatttggtatttattttctcaatgcctctcaaaaaaattgaaatgttataatattttctgaaccaatgtgaggttttgggattttgcaaaatttgtgtccttttaataggaagcttccttttttgttttattgtatttgaatttcttgttataaataaaactgcttggtttatgatggtttttgaaattttaattt

SEQ ID NO: 10183 - DNA, 354 bp, Heterodera glycines
cctccccccccccccctccccctcaatcctttcggggaaaacgctcaaaaacacattgaaacgtaaacccgccccttcaaacaaaacctaaagcgggtgggggatgaagcgagtttgaatttgaattgaatgcgtacggaggggggggggggaacggcggaaggggaggggcccaggaagtcccacccgtgttctttgttctcgccaaaacacccaaaatttctaccgagaattggggacgggaatttgatggaagagcaaagattaatttatgattggcttttcattgatttctccgtcggatggcacgcactttcttccgttgcgttgtgtccattccgtttcgtttaggtg

SEQ ID NO: 10184 - DNA, 2486 bp, Heterodera glycines
caatcattgggactcaacccaccaacattgcaatcattgggactcaagccaccaacattccaatcaacgggactcaatccacctgcatttcaaatcactgggactcaatccaccaacattccaatcaacgggactcaatccaccagcatttcaatcattgggactcaacccaccaacattccaatcactgggactcaattcttctgcatttcaatcactggtactcaacccaccaacatttcaatcattgggactcaacccactaacattccaatcattgggactcaattcttctgcatttcaaacactgggactcaatccaccaacattccaatcaacgggactcaatccaccagcatttcaatcattgggactcaacccaccaacattccaatcactgggtttaatcactgggactcaacccagcaacattccaatcaacgggactcaattcaccagaatttcaatcactgggactcaattctcccgaattcatatcactggactcaatctcatcaatccttcagcaacacaattaccgggactcagttctccgacatttcaatcatcggaactcaacctcagcaacggaatacagaactatttaaaaggaatccagaaattgaaatataacccataaatcaaaacactatggtgtataattattgcccccaccccataaattcaaattaaaactgacctgtttaaaactttccacctaaatttgatcccgcaagtggcacgtcaatatcccaattgcatataaatattccactcgaacacaggcaaaacatgagatgtagcatttatattgctttttctatccatcaaaggctttttctttcattttttattactatcataacatgctttttattcaaaacaaatatcaaaaccaaatcagattcttttcatattataagcaaggaaaagtacaaaaaacttttttaagtaacaaacctttttcattcaaacgaattctaatgcatttttttaaccaaacaattctccattatcgtttacataagcaaaacaaaagctttcacatcaaaatcaaatcaattaacaaaaacgaaaatttagacaaaaaaataatgataacagcaaacccacaaattttttcttacacacaaaaacagaaccttcatataccggattttccactcaaacaaacacaaaaatgtgctcattattttattaattattttatataataaaagatgggttataaataaggaagggatgcgagacaaatttcccattatctctccctttcctttcttttactctcttttcttttccattgcaatttactctctttttttcccactccctccttctcccacacacacgcacgcgtccaacagactgctgctgcacagcagcacgcgtctgttcactgtatgccccctctcacccgccgctgcccgcgtagacagacaatcagacagtgcactattttcccacctttccctcgctctacttttttcaaatacatttttaacgcaaaacaattacaaaacgccacacaaattcaaacactggacacacacaacagacactcaactttattatataagattttgtcaatgtccgttgccatccctcgttttaagtgcaaattataataaatacaaaaatctatctccaaatggaagacattacgacacataagtcagttcatcatgaagaaaatgaacgaggcaagtcgaagtggatcaaaattagtgagtttcattttaaacattttatttttaattgttcttatatgaatgctcaaaagggtaatactgcagaatagcggtcccgacgaaaaatatttttatctttcgtggggtaaaaattgtactgattacgaatctgaactcaaactttgaaaatcattgatttttatcacatagattttttcaaaagttttaataaaattaactccttgtaccctcccccccccctttctttgaaatgaaaattttcaaaaaaaaattttagaaataagttgttttataggttttcagggtcgagaatacgattctaacatacatttcgaaccttattcatttcgccaaatttgaacccttttgaataacttccaaaattgttgcgcaaatttttgtttcagtttaaattgtttggctctattccagtttacgcgtgccaatgagtgaccaccctcacttttttagaccataaccttttttttacttagtcaatccgaacattcttggtatcattcgaaaggctaaaggttaaggaaattataaatacaagaaaagaacaaatacttatattactgaaaaagattgcggtgctagacgattgtcgcattctgtgcccttcttataccgacaaagaaacgtgggaggaccacttttggtgaacaatacgtgggaggaggagtaggtggagcactttttaggaaaagaggaaaaaatatgatgaataattggacctaaaaacagaaaggacagaaaattattaagaaaaaa

SEQ ID NO: 10185 - DNA, 2719 bp, Heterodera glycines
  unsure (1)..(2719): unsure at all n locations
ggtaaataaaaacaagacagtgggcggcataagtgggggcaaaggggggcctgataatgggtgggaatttttctttaatcccttgggggaatggccacaaaaatagtgatgtgatggagggaggcatgggggtgagcaagactgtcatagtagagcctggcgtatccattcccttcgcataaatggcgcaccaatgagagccctccttgtggtgggcggtccctgttcacggcgagcgctgcggggtactgtagtgtgaagggaggcggcaattggtcactggcgaagcagccccgaaacgctggctcggtctgccgattttcgctcaatatccgtataatttggaggcgtgcgttcgttagccagagagttgatacaaagtagatgcagaatcggaggggggaagagcctcggatatggcagcaacaacgacctctgcactctacgaaagccattttgatgaagcaatttcggaaatgacacaaaactgatcggaatttacaaattatttcattttttcaatatttatttataaaatgatagcataaaaataaatgatcattgatcaaaaaaatgcctttaaaaaaggcttctgcttaaaaaacgtattgacgctgtattgtccccctgcggcagcattacttttgactcaatgctcgagcaacaaattcagaccacccaaaacatcatcgacacaatcttcgaaattgcccccaatcttcggcattagccaactgcctattctgcaaaagcttatcaaaagcctctctattctcaatcattttttattggcgtttcctttaccgttaaacggtttaacatattctaacacatcattaataaaattaaacacaatttggtacgcaatcgattcttttgactcgggtttgcacacattatggtgtccttcgtcaaggtggtacaccggtcctttgcccattatgcccgactccacgggcacgagcatcacttctcttccgaaaacccttgtcttcttgcactccaatacggtcgcaatgaatgggatttgttccgctgctttgttgaaacggttggccaatttgttgttctgttcacttttgggctgaagaagcaaaacgtcgctagacggtctgatgaaataggggcggagttgagaggccacgggagtgcccaaatggggggtggccatgaaaagcacaccgacagtcttcgagaggagctgctcattttctgaaccaaattgctattttaagtccaaaaatcaaggacctaatgtaaaacaaaatgataaatagtattattgaccattnaatgtaaaagtggaccgaaattagacactttntgaggtgtacctaaaagcaactgtttggccagcagtccgcccatactgtggcaaatgaatacgattggtctttctccaattccgtttctcttaaactcttcagcaaaaagttgagcgcgtgcttcaaacgtttccattgatttgctcagttgaaaaaaacgcgaagaataatcgacggcgatcattcggacggattcctttaggtcgacggccaaccaatcctaagaaaagcgaggccatttggcacgctgacaaaacgaacttttggccaaaaaagtgtggtcctttcgttcggtctgtctttttggcgccatgtccgaaacgcacttccgcgcagtccgtggacaaacacctgataaatttgaaaaaccaattggctttgtgtaaggaaaataggactgttttgatagctttttgtaagttttaatatataattttattattagggcccgtattattttgtgggtcctttgtccgtgggccctttgtcactgcaccttggtttttggtaattaaatttacaatgtcaatttgtggcattttgttgctcattggcttatgcaattcgtaaaggtgcgccggcaattcatttttctcgcgtccaaaggcgaaaagaatgttggacagaattttgtgtgataaaattcgttcttcgtcgtgtgaaggatttttgagcattgacgaaagaagcggaatccaatctgaagaaagccatcggaattaattgtgcgttttctcttcgcttaaccttaataatacaaataaccttttccttggttttctatccccccgtcgttccccccccccgaaaaacgttttgaaaaaaaaattccaaatgtagaaaatttgacaaaaaaagttaacgaggaaattttttagtaagaaatttcaagaaaaaaaagtttaaaaatttcagcgattttttgtaaatttcttttgaaataacttattagttcaccataaatttgaaaaaatcgctgaaaaattttcaaaaaaaatttttgaaggagaacgacgcggggggggggggagggagctctgttagagagcgaaaaaatcagtcaatccgtgcccaaccctttttgggccgtccatcttataaatgccaagtttcaattccgtccatttgatcttccgaatataaaacgcaaagggtcaccggaattggcgacagtttgagccaattcctttgaagacgcgacagaattagcgagaattttcagcgacgtcagcacgatgggtttgttgagagtgcggtaagtgtccaccaaattaatgagaagtcgcggcaattccctccgttcgctgttttggctatttccatttgccagcatcgccccttttcgttcccgtgtcatctgaaaatggcttttgcttccatttctgcccttttca

SEQ ID NO: 10186 - DNA, 2804 bp, Heterodera glycines
taaataaaagcgaggacctgagacatccgttgcaattatcgcaattgtcagtgaattgttattttcatttttgccgcattttcgtccatattttgggaaagaaatatttttattaattaattatttaaaaattttgattgaaatatttcaaaattcataaaacagaaattacatatgttttttaatatcttattattttccttacaaatcaaaaactaatgaagaaaaaatttgtacaaaaattcaatgaaatgacaaatgaatataaagaaaaaagaaaatattcaagaaaaggaatggcaccaaaattatgatgaaatttgtaagaaaattggagtaagccaaggaacaattaacaattagaaaatggaaggaaaaactcggattaagtggtaaaagaatcactgagaatgaaaaaaatcgaaaaaatgaaaaatgttggcaaaataaaaaaataaaaattcaaaaatgagtgacaaagaaattgatcaaattatgaaaattgatagaagagtatttctattcgtacgaaataatttggagaagaaattttggaagaatcattaatttctgttattaagtattacacattaataaaatgagaacaattaaaaaaaagttttgcaaaataaaacctaaaaaataaatttttgttatttttaaaaatttggcatattatgatcactcattttgtatttttttttttaatttttttttcattaccaaattatttcttcaatttcctaattatataataaattaggcaaattttcttgctaatttcggcgagatcagaaatggcacacttattaattaggctcattagatcctttaccttgacactaaaaatgagttggacagcatttacgcacctttgacaccgactcttcagacagatttgaagttgatgacgaaatacgattaattttttcaaaaaaaaatgtttatcttgagaaaatgaataaaatatttgaaatatttaaacataaattgtcctatttttgcacatttttgtcatggttttggtcaatgcaaagcttttcattttttaatgggtaatgcttagcgtttgaaataatttcctaaattcattaaaaaatattaattttatatagagttgagcgggaccgggaccggggcgggtaatcccggttttttcaggtcccggtcccggtttttggaaaaacagaaatcccggtcccggttttgccagtcccggtcccggcgggactaaataagcactggtaagaatgggggtctgggtgagaaaagagaagggaattggtgagggatcagaaatttttgataaaaataaattaaattatttattttcatttatagcatctgtgcatctgcataagtggtcaagtggctaaactttataataatttttctaaaatctctttacattgtgaatttattttatttttattgaaaatatgtttattattttcgaatgagctccagtagaaagtaataaaattttatttaatcattaatttaccaattggcaattattttgtcattaagataaaattattattattatttctttgcaattaaacaggatttccttattttattaagtaaaataatgatttattcagttttttaatcagaaaaaaatcatttaaatgcctcaaaaaatgaattgccatttaattgaagaaaaataaaataaaatcttgaaaatgaaattctgtattttattatttttatttttgattgccctaattataccaattgaatcagaaaagaaaaaacttcagcagaaatcatttggcgaaatatttggagaaaaatgggaagaaaaagaagaagaaaacgaaatgaactcaaaaaaagagaaataattggaaaattttataaaataaaagagaaaattaagcaaaaaggaagaaaatactcagcaaaagaatgggataaaattaactcaaaaatagcgaagaaattggggacaaatcgacaatatatttataaatggatcaaagaatttggtcttcaaaaaacgcaaaatcctataaatcaaaaactgatgaagaaaaaattgaaattgtcaaaaaatttattgaactgacaaacgaatataagcaaaaaagaaaatattcgcacatcgaatggcaacaaaattatgccgaaatttgtaagaaagtcggagttagccatagaacaattaaaaattggaagaaacaatttggaattagcagtaaattaacggagaaagaaaaaatggagaaaatgaaaaaatattggcaaataaaaatagaaaatccgaaaatgagtgagaaagaaattgcaaaaatattgaaaattgatagaaaaagcattacaaattggaagaaacaattagttttgaaatgaataaatgacccaattctttcttttttttattaagaccaagaatttgttttgttgagtgttagagaggcaaataattcaaatatttgcaattccctctcttgggctctttgaccccatattgattttccccatttattcatgcccttcccttcatccatcccacaattcattctgttaattttccttccttttgtgtgctccccaatttgctccgtccctccgacaaatattatttgtattatttttccatttgtgttaataaatttatttggttgttcgacttccacaaataattgtttgagcaattaaccggctcaacattggcgacgcccgtcttcaggacttcacttcgaacatttatcgtgttgaaatcgttcgaaatattggaaattcaaaaatcaagtgttgatttttggatttcgcagaaattcttcaaaaaacca

SEQ ID NO: 10187 - DNA, 2215 bp, Heterodera glycines
tttttactagagttgagcgggaccgggaccggggcgggaaatcccggttttttcaggtcccggtcccggtttttggaaaaacagaaatcccggtcccggttttaccagtcccggtcccggcgggactaaataagcactggtaagaatgggggtctgggtgagaaaagagaagggaattggtgagggatcagaaatttttgataaaaataaattaaattatttattttcatttataggatgtgttcatctgcataagtggtcaagtggctaaaccttttactttcattatttgtctcttcggttcaattccccgatggaacagaaaatttttttatattttctttaccattattttaattgaatttaattaataaaaaatattttaatttaaaattattatttttttcatttttaatagcctaaaaacccataaactaaccaaatatttggtcattttttgacaaattctgttaaaaaatctcgctcaaaatttcaaaatttttccggcggtgcctatcggcactgccggactccgccccctcccactgttccaaaaaatttttttgaaaaaacattgccacaaaaacagcgatttaaaagcaaaaaatttaaaagattgtaaatttatttaaaaaatacagaattttgggactcagaaaattccaagaacccccctgaaaacaaaatttttaaaaattttcctcgaactcgtcccccaaaacgtaaatacaaaattttatgggtacatttttgaatattggcaattttcgtaacaaagcgcacttaaattttcaatttttttcaaaaaaaaaatttcacttgggaaaagtcccggttggtccccgggttttttcgcggtccgtcccggtcccgacgaaaatcgatgtcccagtcccggtcccgacttttctagtcccggcaagtcccggtcccggtttttgtcaaatttcccggtcccgctcaactctatatttataaaatttcgctcgtcaaattattacattagtaattttttttgcaattaataatttttatcaagctttatcattgagaaatatgaaattgcatttatttgcatttttatttttaattgttgaaattacaaaagttggaacaaaagagaaaaagctgcaacaaaagtcatttgccgaaatatttggagaaaaatggaagaaaaagaagaaaaagaaagaaatgagaagaaaaaaagagaaataatcagaaaattttataaaataaaagaaaaaattatgcaagaaggaagaaaatattcaaaaaagaatggaataaaattgaaggaaaaatagcaaaaaaattggggacaaatcgccaatatatttataaatggattaaagaatttggcctatataaatacaaatcaaaaactaatgaaggaaaaatagaaattgttcaaaaatttattgaaatggcaaaggaatataagcaaaaaagaaaatattcacgaaaagaatggaaccaaaattataaagaaatttgtaagaaaattggagtaagccgtgaaacacttagaaaatggaagaaacaatttggcatacgcagtataaaattaacggaaaaagaaaaaatggaaaaaatgaaaatttattggcaaacaaaaaaagaaaacccaaaaatgactgacaaagaaattgcaaaaattgtgaacacttctcaacagaatatttccaattggaaaaaacaatttgtggctgaataaaatcattcgatttttagaattaacatgaaaacttttttgataaattttataaaatcatttaggtttgctgtttttttcaaatgtcgtaaatataccgaattattaaataaatatttaaatcaaaaaatcgaattttccgagagaattctatgagaggcttttggagaaataaataaattaaaaactgataaacagaaaattgaatacgaaaattcattaaagcgaataatgcaaataacaaaatattcaaccaaagaatggcgacaaaattatgccgaaatttgcaaaaaaatcggagttagcctttttctctaatgagttaattatttttcaaaatttttccactttctccttaattactccgattttaacccatttgtgctgtcttaattaatatataatacatacacgattaaatttggaagttgattccatgctggaactttcattttataaaaataattttatcaaaagaaaggaccgaaatttaatataacc

SEQ ID NO: 10188 - DNA, 1141 bp, Heterodera glycines
ggccttatcgtgaaatttaaaaatctcggaacaataaaatggccattgctctccgcccctctactcatgctgcaaagcatttgttcgatgcaaaatttctctcaaaaaagaggagccacttttctggcctaatcttgaaatttaaaaattctcggaacaataaaatggccattgctctccgcccctctactcatgctgcagagcatttgttcgatgcaaaatttctctcaaaaaagaggagccacttttctggcctaatcttgaaatttaaaaattctcggaacaataaaatggccattgctctccgcccctctactcatgctgcagagcatttgttcgatgcaaaatttctctcaaaaaagaggagccacttttctggcctaatcttgaaatttaaaaattctcggaacaataaaatggccattgctctccgcccctctactcatgctgcagagcatttgttcgatgcaaaatttctctcaaaaaagaggagccacttttctggcctaatcttgaaatttaaaaattctcggaacaataaaatggccattgctctccgcccctctgctcatgctgcagagcatttgttcgatgcaaaatttctctcaaaaaagaggagccacttttctggcctaatcttgaaatttaaaaattctcggaacaataaaatggccattgctctccgcccctctactcatgctgcagagcatttgttcgatgcaaaatttctctcaaaaaagaggagccacttttctggcctaatcttgaaatttaaaaattctcggaacaataaaatggccattgctctccgcccctctactcatgctgcagagcatttgttcgatgcaaaatttctctcaaaaaagaggagccacttttctggcctaatcttgaaatttaaaaattctcggaacaataaaatggccattgctctccgcccctctactcatgctgcagagcatttgttcgatgcaaaatttctctcaaaaaagaggagccacttttctggcctaatcttgaaatttaaaaattctcggaacaataaaatggccattgctctccgcccctctactcatgctgcagagcatttgttcgatgcaaatttctctcaaaaaagggagccacttttctggcctaatct

SEQ ID NO: 10189 - DNA, 5766 bp, Heterodera glycines
caagtacaactacacgggccaggagaaagcagccatccccttagtgagggagagcaaggccttattgttagccagaaaacattttggaggggaaagcccggacttttttttgttcttcgggtcaacaatttcttctcaagtcttattttaaaaatcgcagtgctggagagcaaaaaacaggaatttatattaattttcgccaaaaaacaggactaatttttgccattttggggtcaaaattgttaatgtacctttttctttaggtcatttcaatggccaagggcgtccagtcgcttatggtcaacatggacacggactttgccgtcgccatccgacagcacatttacgctgagctgcaggactttgtcggcggaccgttgcgcgaccttttggccaaagccgtgaagcacaaaaaggacattttgacggggtatcaaatctttttttttttaatttttcatcaattgccataatcatttgctatatgatattcatttaaaactaatggaagaataattttttcaaagatttcgttagtttttttgggctaaccgttcattttcgaaaaattcaaataaattatcagccaaacaccggaggatggataataattctctacaatctggcgcattgcactttccatcacttcgatttcagtgtgatcagctcaatcatggagacgtgctctgatcagtcggccaacagcggaggaattgcagaccatcggccgttgaacaaattcaattcccgctcctccgacctttcgtcatcgatgcgttcgttgggcggcggtggcggcaaaaagtccaaaaagggcggcgccgacacgggctcaatgcccgacttgcgcggccgaaggcgcagcgtggtgccaagcagcactcaggtgccatcaaaacagtcaaaacccattttttaaatttaattaaaaataaatttggaggaaaactttttcgagttttccattgcttgccagtcaaaatgttgttttttcgtagctttatttggctcggacgatgctggaatcgctggtgcatgagaagtcgtcctcgacgggccgacgaatttatcggaaggatttggacgaaaaatatcgcgagaaaatggtaatgaataagaacgggatggatctatggaaatgccaagaaatggcactccaaatttgcgttttcaggtgcatttccttcgccagtcgtatttttggcccgcactgctcgacctgaagcagtcgctggacgaaagtgtgaatttgtcccagctgtggttccgcgagttttacttggagatggcaatgggcaatcgcattcaggtggcaaaaaaagatggataaattaaaacattggcagtgagtgccagggatggaaaaatgaagcaaatttataaaaattggtgcggaacgcaaaataaatgaaaaatcaacacacaacagttagtgcagatggaaattagagctttaaatttcaaatgttcgggagcgaaactcaatttttaattttcaattaatttccccctcatttttgtatgattctcccctctcatcagttcccaattgacatgtccatgccgtggatgctcaccgaccacattctgaccacgttggacccctccctgctggagtgtgtgttgcatcagctcgacctgtacaacgacgcggccgccttcgcactgggccatttccgcaagcagttcctctacgacgaggtggaggccgaggtgaacctgtgctttgatcagttcgtctacaaactgtccgaggcggtgttcgcccattacaaacagcgggcggcgacgtaattcgggaaaacacagaaaatgttaaaaaggcccctgcatgacaaattgttattgttattcagaaaatgaattgaaattgattttcatcatcattttttggtcctctaatccctaaaactaaatgattttttttaattcgggtgcattatgaacactttaccgtacagaatgctgctcgacaagggcttcaaggaggactgtgcccgttatggaattgccatttttatgcccaattcggtacgctttgaaactctgcttcgacagcgtcatgtccaagtaagccgcagcaaatttccgactgtcttttagctttatcgtctcaatttgctttctaattctgttttatcttcagttgttgggccgttccatcgatttgaatcgccttatttcgcaacgaatcaacgcggtacatttttccaccgggggttatgtaaattttgcattttataggctttattgcgctcattggacgtggccatctccaaatttgaagcggacggtctcaactgtattatggtgagttttttttggtggtctgtttttgaaaccccttagaatcgattcacaattccaactttaaatgaattttaattcattttgccgtggtcattaggtgctggacaatctgatcgaggtgaaccgtttgtgccatcggctgctctccgaccatttgggctctttggccgactttaacgaccttttgctggaggcaaatcgccaagtgtccgcccccaacggacgcatcactttgcacgcgtttgcccagctgacggacgacgtgttggtcaacttctgcttcaacacggccacgcgccgatttgttcgcggaaaggtgattgagcttaataaacgattgtcatattgcactgcaaattcgactattaatttcgttttggtggctcagttggttatttgctgtccattcgcttattatggcgttggatcgcttcccgccacgtcccgtgtttttaaaaatttaaccggaaatgatgataaatacagacctgtatggaaatgcaccatgtcgaattaaacctctaagaagttctgatccggttaatcctttttaaattagccattgtttttttaatgttccctgttcagttgaactatcgtaagccgtcccgtggtcgtccgcccgctgttgcggcccagtatgaattcggttccaaatcgttgaactcctccttctccaacttgtcgatgatgtacggcggtttcgttggtgtgccccattttcgtgtggtggccaaattggttggctatcaggtgtttaaaacataaaaactaagaaaataaataaaatattaacgaaggccaatgaatttaacatttagtttattacaatttccagggcatttctgccattctgttcgatttgttgggcctggcccaacggctattgaacgatcagataaagacgcactttcggtcactgctcggacttatgcccaaaatgtgcaaattgcaacgcttcgaatacggcgttgaaggtgaacaagaaggaaattgggtggcactaaattgttattttttccacttgccataatccgcgcattcatttggcattccggtgcgcttgtcggattcccaaattaaattattacttaaaatttgcgtttcaatcttgaaaatcccgttttgaattaggcaatctccaatatttcatccaccaattgcgcgacttttccgcctacggcccgctgagacgcgaatgttgccaaagtttgcgtgaattgggcaacgttttggcggtcgctttgctgatggagttgggcatggcgcaggaggaaatgttcgatgtgtttgccgctgccgcgttcaccaaccaaattccgaaaccttacgcaaaaagttcggtcaattaattaaaaaggaataaaaatattatttttttttattgggggcaatttgttttttcaattaaatttcataaaaaatcacaaattttatcagacttggaggatcaagcgataaaaatgcacaaattggagagcaaatattcgcgtcttcaaattggcaaaattgtccatcagtttggcactgaaacggtcagtttgcggccacaattcagcagaaacccaattattttccattttctgccatcttcggttcagcaagccaaaatcgcgctggacagtgcagtgcttaccagtgaacggctcagttgcggactgaggatcttcgacatggtgctgatccgactgcacgacactttgctgaccgaccccatttggcgtggcccggtgccgaccaacggagtgatgtgggtggacgagtgccacgagttccaccggatttggtgcgtttttaatgggagggaatgcaattgaggctgccaactaatcatggatgttgttgatcaggtccgccttccaactcgccctttcgcttgcccacgtgcaaacccacggactgtcccatcagacgtccgccattggcagtgcgtcgtcgtcgttgtcgtcgatggaaaatgtttatggaacgctgaaaaagggcggcggaccaccggcaccaatcggtgccaatgtgacattggacagcggtgtggcatcgacggctgcacaacagcagcagcaacaaggaacgaccattgagtgagccaatttgggggaggatgggggatacacgactgaataaacgaaagggggggggggaatccgcggaggaagtatttggagtgcttctcgtggcgtgggacacactgatccgttcgttcatccacacaaatccctgtgagtgcttaaagggagctgttcggcgatggcatttattgggcgggctgtgccatcgttcgtctgctgggccaacatcggcgctttgaagtgctcgacttctcctaccatttgttgcgcgtgaatcgggcggttgggtcggcgcctaatcagcagcagcagcaacaacacggcacaacggcagggccaaaggaagggggaagcggcaacaaagcgcagcaacagcagcagcaacaacagcgaaatgtgagcaaatggaaaagggaaatctttagccatttccgccaaattttggcctttttcagacaaatttttttgcaaaaatatacgaaaataaggatccgccgggaaaatttggaataaatttattttttaaaaattagttaaattttaaaaaaaaactattttttctgatacaaatttcgggagaggggcctctcgcggggcttaacccaccctttattgtcacatttgtagactttcccattttaataattgtggaaatattatgcacaatgggaatatctcaggctaacagcaaaatgtatcctttccgcagattgtgcggctcatcgaacgaatccgtcgagttcaggcgcaacacaaacaggtgttcgccctgctcggcaatttctgcgttcacgtggaggaacaggagcagaaaattcggcattttgcaccgcccgtctatcagccgctgcaaaatccgtacgcaaatggccgcgaaggcattgcgttgtgacaaatgggcggcgctgtgaatgaacacgacaaaaaagaagcgacagcaataaaataataaataataatgcacatacgtaaacataattaattacacactgcctaattaattactaattaattaacattattcccgctttaactgttcactttttaatttattattttgtaattatttttaacacatgaaaattaaatgccatacaaaaaccaaaagtcattcgacatgttgccaatcacacggcagggacggtcccaggattttggcttggggggggggcacctcccaccgggcgacgtttttttttttttgcttttcacacccgttttttatgtggcgcagtttttccaaaaatttttttgggggacagggggtctaggcgccgccgggaaaatttttgcggtttaaatgcggtttgttaacagattttgtccaaaaaatgaccaaattttagattttgagccatttttagcagattttcattaaaaatttgtg

SEQ ID NO: 10190 - DNA, 1820 bp, Heterodera glycines
gtaacgaaccatcattgttatgatttccgactgtccatataataaatctatctacaaattatttagaaaaaaaatatataaaaaattttgaataaaataaaaagcatgtttttcacggcggattttcttgtgaattaataaacattttataattaaattttaaaatcattcaccagtgcctccttgttaaataatcgtaaccggagctttggtcttaaaattttataaatcctcattgaaacgcagaaaatcttcaaaaatcttcatttggataggaaaaattctaaaacttttataaacattttgaattaagtgaacaaaaccagcttaacaataaacaaacatttttttaatatttacccaaaaaccttaaaggcttaaaattatttagcaaatatattctccatacgctgctctctcttccgggtgaagaaagtgcacaattaattaaggtgaaaagagagttaaaaattaaaaaaattattattttggcatcttgcgtaatgtccagttcagtcccacacacatttgtttttctccattgacccattcaaatcattttgtttagggttggtcggaaccgggaccaaaacacggacaactgagtaccgaactgccggttttgaccagttttgatcgggaccgggaaattcccgggttttttcccggttttcccagccaaaaagtcccgggttttcaacccgaaaggtcccggttccggttttgcccaaaattcccggtccctaccaacccttgtactttaaatgatacgaagaaagttgagctttttaataaaagttataaagtgttaaagtccgtcacctatgttttttttcaaaaaataccccctaagaaatgaaaaattctaaaaaatttctcaaaaattcattttttttatttatttattttcatgacaagaatttcagattttaaaaattatgtatcgcattaatgatttgacataaaggcccaacccaaatgtgatcgtatttaagccccatgatttgttcatttcatggctccgatcgtacaccgaataaagagagaaaacccagtaattgggtattcggtagcccctccccctctccttcctctcctacccccaccccgaaccatggacaacgaactgtcccgttgcggcttgtgggccgagccgcaacaagtggcgaccctggcagggacaaactttggtggggtttttggagatttggtagggaagggggagtagggacctgaagaggcgcaaacaaagcacaagttgaagcgctcgctaatcattcagggcagagagcccggaactcaaagggtggcattgggccgaaccctccaaacgtcagtgtgccgagccaattgaacaagcggcaaaactgaagatgcgaaattgaagaagcgcaagcacaggcgcacacattggagaagcgcaagcacaggcgcacacattggagaagcgcaagcacaggcgcacacattgaagaagcgcaagcacaggcgcacacattgaagaagcgcaagcacaggcgcacacattggagaagcgcaagcacaggcgcacacattggagaagcgcaagcacaggcgcacacattgaagaagcgcaagcacagacgcacacattgaagaagcgcaagcacaggcgcacacattgaagaagcgcaagcacaggcgcacacattgaataagcgcaagcacaggcgcacacattgaagaagcgcaagcacaggcgcacacattgaagaagcgcaagcacaggcgcacacattggagaagcgcaagcacaggcgcacacattgaagaaagcgcagcacaggcgcacacattga

SEQ ID NO: 10191 - DNA, 2151 bp, Heterodera glycines
gcgttagtcagtctttttcaagtcacaggttcgaatcctttgagtgcaaaacctcaattgaggaaagcaatttaatttaaaaaaacaataaaaattgaaaagcggatgattccatgaaattgaaaagaattatttcagatttttcgccccaatttgtcgcttttttcgctcctatttacgtccataaattttttcaattttttgcacctaaaaacccgagccatattaatgagaaaagcattataaatatttatcaatcagcaaaatgctcactgctggagggcgtgggttctattcccagccgaggcctaagattttgtcaattcttattaataataaaaactcatatactactgtaagagagagagtcgaaattgtcggggttttactcgtttaactgccgaagctctaggatttcattattttcacatttatttctttttgcatttaatttccctttttactaattgtaccgtcctcccagcgataattgatcgatgacatttcacttttcacttgtatttaatgttcgccttttcaagcgaacggagctcagtcgtcccgagaataaagccacttattgtgtgaccagcgagtgtgggaaggcaaccccgggcttgatcaccccgtggacccatccttcgggaatatgtggcacattccctttccctcccaattccgaattccaattcccaacgccagcacgaccaccgcgctcggccgcgctactggtagcaccggatggttcacttttgtgaacttttcatcaacctgggcggaacaggaacagcgaaagggaggtgagtttgagtgagggacattgaggaggcgcctggtgtgaaggaaaaggagaagaagaaaaacgcttcggcgatttaaatgccccggggatgaaaaatgaaaataaaaggcactaaatatgagagaaatgtataattgttgcctgcagatgtactaattgccgatgacagcacaaaataaaaagcaaaaagtgccaataaaaaaattttagaatttttcctatccaaatgaagatttttgaagattttctgcgtttcaatgaggatttataaaattttaagacaaaagctccggttacgattatttaacaaggaggcactggtgaatgattttaaaatttaattataaaatgtttattaattcacaagaaaatccgccgtaaaaaacatgctttttattttattcaaaattttttatatattttttttctaaataatttgtagatagatttattatatggacagtcggaaatcataacaatgatggttcgttactaagaaaaaattatttacaatagaagcaaattcagcgtatccaattgagaaaaataaacggattttatgccagttattttgacaatggttcgataaaatataagaattaatcagtttttatgtcgtaaataattttcttgtttgaaaatttatccaatttttcttataatcatccatttaaatcctccaaaatctctcctccaaactgtttcttccattttgaaatggtccttctatcaatttgcaatattttagcagtttctttgtcactcatttttgggttttctctttttattttccaatattttttcattttttccattttttctttcttcgttattcgtttacagctaattccaaattgtatcttccattttctaattgtgtcatagccaactccgattttcttacaaatttctgcataattttggtaccattcatttggcgaatattttcctttttgtttgtattcatttgacatttcaataaatttctgaacaatttcaagttttcgttcatcactttttgatttataacttttctttttttgaagaccaaattctttgatccattgttggatatatgtgcgatttgtccccatttttttcgctatttttccataaattttatcccattcttttgctgaatattttctccctttttcctttattttctcttttattttataatattttccaattatttctctttttttgagttcatttcgtttttcttcttctttttcttcccatttttctccaaatatttcatcaaatgacttttgttgtagttttttctcttctgtttcaattggaataattagggcaattagaattaaaatcagacagaataataa

SEQ ID NO: 10192 - DNA, 4893 bp, Heterodera glycines
  unsure (1)..(4893): unsure at all n locations
tttgataacggactcaacaccatctaattgatgcttatgagagaagttaagaagtttttaacatttaaattttttaaattaattttaattcttaaataataatatagttgaatttattttcacaattataatcttcattcatatttatttttccaaaaaattttcataatatataccaaaaataaaataaataaaatagcattctcaatatatctaaaatctaaaagcacaaagtcaaccgttatgatcaatagaattagagaaaaacccagcaattttattaggtagaataaattttttaagtaaacaaaataaatgcaataaataaaacaaattccttaatttaaaaattatgtaatagaattttaataaaatagaccatcgaacaacataatctgaactaaacgaccaattatgattatttatttttatttcccataattaatgtattttgatttctgatcccttctttgagcaccccctccccccgtaattctccttttccccggggggcaattcaaattgtaaatagccccgcgtcttctgccgtcctttgttaaaaatcccatttctgccagttgggtttgcccctttgtcccattttgtaccatcccttcacaaaaattcaaattcctttcttcagccggctcaactccggccaattttgtgcaaaaaattttgcagaaaatttctcacaaaatttttcttttattaaattcgtttgctaatttgcatttttttgttcgtccattttttgtgcaaatttttgtcccattttgcaagatgcgcttatttgtgcccgcccctcgcaaaaatttttcctatttaagcgcccccagccaaggggtcgctcattttcacttttctgctgctcctctgtattccctcttcctcctctctccatcttctcctccccctctcttcctaattaactttctctctctctttctttcttcccctcccttttctctcgctccgcttctcttttttgtctctctcgtccttcctcccttttctctctcttttttcacttccccctcccatttcccctttttacctctcaactttccttcttttttcctctccctccttttccccctcgaaaatatttattttttttgcagttttcttctattctttataaaaattgaaaatgggcttcgaactcgtggttactgcgaccaataaccaagactgctggtatgtgccggtgcaggaaacagatagaattgtgaaagttagaggtattgcggcaggactgatgggcaccacgggggagaatgtgcgtctccttttgaatggtaggtctatttctggtggcatctattgatgataaagcgtatccccgtttaggacgaccaatggatctacaacgcacggtcgcacagtacgcacagtatggactccaccaaaaaagcaaagtcactgttgagcgcttgtggggcgccgggtcgtctgctcggggaatccgaaaagcccaagatgattttgccgatgacctattgcgatgatttttgtgacatgcatgaatgtgtgaccatgaaataggacacctgtggtgagtgcctattaaactttcccctaatattgatcaaattatgaacaattaaggaattgtccaccccttttcaaaggggctatggtgcagcacagcgggggagcgggcgttggttacgtgtttcgaggactttggcgcttctttctgcccattttacgtcgtgttggcatcacagtagggtcagaggcgttgaccactgggaaacgagtgctggagcgcgttgggaacgatgggataccgactaaggaggcgctggtcaccgagggaaagctaggaatagacaccgtgctggacaaaggaggactgcctaagcagtttggtactggacagaagggtataaaaagaagacgaatacgtgcgccaagtcatcaaacaataattggcggacccccaatcgccgtaaagcagacaacaagaaagcgtgttcggtcggacgcctttggactctactgattagcagcaaccagcaggatgacatttcataaaatcgacaatgactccgtgaactcaaccaccaatgcgctggactttttccgcattccgccgacaaatgtcagcgtctcttcatcaaaggtgtttgaactgcttcccagcaaccctctgacggacacacctaccatttcaaacttcattcaagtcaaaattacattgacctctccaaatgctatttgctcaccgagttccgaatccggaaggaaaatgcgaatggtcaacttatggacctgaccattgacgacgaaaacattgcgccaatccagatgattgggcaaacattcatccgaaacatcaaaatgagcatcaaagggcgtgaagtgttcaacgcaaatgcactgatggcctacaaaacctatttttcacatgaactctcctactcaacaacagcaaaggactcgcacttgaatgctgcaggctattaccgggatacgggcgagacattggagacggggccgggatgcattcaacgcagggatttgtttgccgaaagcaaaacagcccaatttattgccaaaattgataccgacctattcaatcagccgctgtacttgattaacttttgtgaattggatgtcgattgccaaatgacaacgattttgtgctaattgcacccgccatcggcggtgtttttcctcgttaccgtttcgaggtgatgggactcaaaatgtatgtgaagaaggtgtcattaatgacggattagcgctggacattgcgcgaaagcttgagataaagcctgcacgttatgcagtaaggaaaactatgatgaaatcgatggtcatcagtcagggtcggttcgagtttaccgccaatctgttcatggaccaaattacccgtcgcatcacaatggggcttgtttcaaatgccgactactcgggcacaatcacgcggagcccgttcaattttcaaccgtttaatgtgcgggaaattgggatcatcgccaacggccgttcctaccccgaggccccttacgatttggactacccgcatggtaaatatgtgcgcgctttcaacgatatgaatgaggcggtcgggttcgcaaactcgtcggaaagcaacggaataacctttccccaatttgggaaaacgcattgtatctacgtgttcaacatgacaagcagcggtgacgaccaagccgcgctctttgacctgataaagaatggaacaaccgcggtgagcataaaattcaatcgtgcggtaccagtggggggactgatgctggtcgtaatgggcgaatgcgactcgctggtaatgctggacaagaaccgatcgataagcaccgataccactatataaaaggcgccgatttagtgtatttctctcacatttgttacattcgctgtttgccaaaaattaaaaaatgtattttaaaagcgctactgctgatattttattctttttggttgtttttattggtattggaaaatgtgcatcggctaatgcaaacaacaaaaccaaatcccgaggggcagtaagcacccccgtcaccaccaccaccaccacaactgtcaatccacagaagattgatgtgtctcgtttggcatcatcaactcgaatggggaaaggcagcgtgactggcaaaccactaaaaattgtcaccaccaccaacaccaataccaacaggaacataaccaccgccaacaccaataccaacaggaacacaaccaccgccaaaaacaacaaaaacagcagcagcaaaatcaccacccctacaacaaaaactgcaaaattggttgtggatgagcagttgccagtcgcaacactcctcccaacattgattcaccaaatgtgcaaggatcgccccggtgaggaaaacttttatcagcaagccatctgttgggcactttttgcgctctatttaatggtgattgtcagtctggtacttcatcagctttgttctatctgttggttaaagaagaaaaaggagtatggacagcgcgcagatttcgactattttgaggcaaagtcgggaaaccgcacgagttttccggggctgtttcccaagtgaccagctcccagcgccggacacgctacggtacccagcggcgctagttgtgaacaacgacccacattacaaacaaggatcccattggtgcgcgatttatgccccttcaaagacggaggaagcggtcatatattttgatagtctcacaaaaacaattcctcctattgtaaagacatcatttatggataaatttccaaaaggttttgttacaaataagcacccgtaccagtccccgctcactaccacatgtgcaattcactgtatagtgttcatttatcatatggccttaggtcacccatttgatgcatttctgcgcatattagacgctagtgaaagccccgacatgtattctttgtgcattttgaataaaatgattaatccgtatttgtgtgtgcgtgccaattttagtctccctcggggaaagggtatagggaatgattgattaatttattataccacggcgcacatcgcgcgctgttggtgcctaccgcatatatacaatgaattgacatgggaaaggctcacttttttcgcaaaaataaattaaaatattaataaataataataatgtcgttggaagatcacaattattgcggcgagttgggccgcaacgaagaaacgcccacaaagagaagaaaaagaaatgatgatgatagggaacagaaatttcaaaaaaactgcattcgcactctgagcgccgacaaacagtacaaccaaaagttcaaagtgcagagcgtaaagtcgacttttgtcatcgaaaatttgcccgccaaccncgagtcaatgctgcgcgcattgttcgctcactgcatgtcaaccgccctggacgagtcacagc

SEQ ID NO: 10193 - DNA, 923 bp, Heterodera glycines
aatataatgccaaaattaaaaaatatttgcttaaacattacgccaatccaaatttataaagaaatttgacagatttttcggagaatcaacaaatcaggacaaaatttggtcgctacctcaaaatcaggacaaatctgacaaatcaggacattttaattttggacagatccgaaccctgcactagcgccaaaatttgtttttgcaaaaattacgtacgaggcatctaccgtatgctcaccccccccccccccgcttataccgtatccgtaaacaatcccaatttcacctttaatttattttagaaacaattttgccaaaatcggtgcaaagagtaatggaattttggatttcctaaaaatttgtgggcgccaatcggtttgtaaaatgaacaatgaacttttttaattcaattccttttttaaatgcttttttggccctcacgcctaaaatataataaaaatttggccaaaaagaaaaaaatgcctcagatttacatatccgacattttttcagtttacggacggtactcagttgtccctttaatacctgtgtaacccatttaaaaataaggcaccctattttttgggagtttggccacttcccatgaaccaatcgagctgaaattttaactgtacgtagaaattctgaaaatattaagattctgaaagtgagaaaccaaaatgatgccggaaaaaaatttttacgaatttttttccaaaattggggtgtaacattagaataaggacactttttcagaaggctgtaactttttgagttgagcattaaaaaatctgaaaaaataaatttaaacttatcttttggtattgatcaaaaaacttaattgcaccaaattgataagatcactccttcatggtgatctgaaaatcctaaaatggcttgaaatcgggaaatttcaaaaaaaa

SEQ ID NO: 10194 - DNA, 2675 bp, Heterodera glycines
  unsure (1)..(2675): unsure at all n locations
aaaaagtgtccttattctaatgttacaccccaattttggaaaaaaattcgtaaaattttttttccggcatcattttggtttctcactttcagaatcttaatattttcagaattgctacgtacagttaaaatttcagctcgattggttcatgggaagtggccaaactcccaaaaaatagggtgccttattctaatgttacacagtgtaattntattttaagattttcttatcataattagggcttcgatttatagttgctaaaaagtgccaaaataattaatttttggtttctaaaaaacccccaaaatagttgctaaaaactttcaaatcgaggggtgtaaaaagaaaaaatttattcaaaaaagtaaaaaaattaggccaaatcagtattgtggtaataatttttaaaatcacaaattcttgtctacaaaaaaataaataaattttggagattgttttttaagaaaatttttcatttcttaggggtgaatttttgaaaattttcaggccgattcttagggggtgtatttttgaaaaaaatttttaagacgatttttaggggtgtatttttcgcttttattgcatttttgttaacaaattttgggcaaaacgccaaaatagttgaaaatagttttttcaaaaattttaaagttttttagttgctaaaaataaaaaactagaaaatagttgctaaaaactcgaaaagtagcttaacaacagccgaaaaaaacatgtttttcttgcatttcaggctacggggagctcaggaaaaaaatagtgaaaaaactataaatcgaagccctaatcataactttttaactcccttaattaccccccccccgttcactaatcattaaaactgaagacaaaaaaaatttacttaaacacaattaaatgtttaagattaaaaaaaattaaagaaacaaaaaagagaattaaataaataacaaattcataataaaatggaaaaaacaaattaaaattatgataaaaagttaaaaacaataaacagggcgcaaaacttttggcaaaatttgctgttatttggaataaaaaattcagatttaaattttaaatattagaaataaacaaaactttaaaaatcgatattttcgcgtattagttaaaaaatccgagccctgcttaataataaaaaagcgatgaaaaaagacactttttccactattcaatcactctcatcatcaatatttaaattgtaatggcaattttttcgcttcctccattcttaactgatggttctccattgtcagcttttcaatgaccagtctcgcttggaatgcttgctgtaaaagggaattttctgtttttaagtgcctttgaattattttaggaacggaatttatgaaatgaatttaatttttcaaatttaaatgtgatttttgttaaatttaaacttacatgttcgccttccatcttcattaatcgctcattgagcccagcttccatcttcaccatgcgaagctcaaactcattcttctgatgttccaacgccaatttgttgtccgccttttgctctttcagtttcgctttgattgcccgctgtaaaaaggaaagaaattgtgttgctttttttagctcttttcaaatttcgaggaattcatgaacaattttctcacattttcgagttaccaaatgtgaaaatcgaaaatttgagttttcaatttttgttattaatgtgtcagggactcggaatgggtcgaaatgggtgcccgatttgtgatcagtgaccccgaaaaacccaaggttcatatttttgtcccaagtttaaatgatttattttttaggaatttttctcacattttcctgttccaattttaacagtcgcatttccatgtccatttgttgtcgctgtttcgctctgttttcgtttcactctgtaaaaaggaaattgtttcttttttagttctttgaagctgctgcttatttagtaaattgttggaattaggaaggtttaattagtaaatgagaattagataaatatttaaaataaaaaatctaattgggcctattgtaaatgagaaaaaatctaattttttcaatattaaacttgcaggaaattatctattttttggagatttttttattataaataaaatgagcgaatgcattttaaagacaaaattgaatttatacggtatgtaggagagaaaattacggtaagtgcttctttaaatatattgttaattttttaaataaaaatgaatatttacttaaattttgtctctttaaatagacaatttctgattggctccaagcaaaactgagatgacagatggacaaactcagaagagcaagcgcgaattaaatatataaatttggtaaatgaattattaattgggctaaattattttggggttcacattttgaagggattaaatattgtcggcaccctttgattgaaacaatttcagtcattttctatgtgaaaattaatccatgagttaaatggcgttgaatttgaaggtggaattttccaaaacgaaattaatccgctttaacaaaaattattattttcaatttgtttattatttaaaaagcccaataataaacgtaacaaagcaggggtatcatttgaaagcttacatgtttagaagctttaaggtattaattaggctaaattattttgaattttcccattttgtgaccgattaaat

SEQ ID NO: 10195 - DNA, 714 bp, Heterodera glycines
gtattgagatatattttattttttggacttatgtggatatatttaattttataaaatcatttattggtttcacttaaatggtagttcatattgttaaatttatttttttaattcactaaattatccgcaaatgtcggctaaccctctcatctcccccccctcccctcccttccccgctggccacttggccttcgatggttttgtgttggccgtccgatccggcaactgcacaccaacaccttcgccatttaatagtgtaaaattcactttccaccacaaacatctcagttcactgtttcccagctctttgtatttaaaaaaatatcgtggaaaatgcaattttaaatgtgcggccaaatcaataaaaattcactcaaaatgcatttttacatttacactgacaaatgtgtcattaattctaatgacgtcctttaattgttgttgaattcgagcccgaacttccagagattcttgcccaatacttagccttaaatctaactgcacaaaaaacagaatgtgcctcttcttgggtcaagactcggaaattcattttttaatattcaagaatgaaattactggcatttattgcccccgaatgtcgaaaacccattttcatggatagaaaattgtgaataaacttcttctcgggtcgagactctttcacgattcgtcaaaagacttgaacagcaccagtactcattaagtttgctggcg

SEQ ID NO: 10196 - DNA, 6121 bp, Heterodera glycines
ctgcaaattggaaactccaaaaagaaattaaaaattttaaaaattattttttaaaaaatcttaggaaattttttcatgatttctaacaaaacaaaaacatgtttttttaattttgtagagagtttttaaatgatttttcctcagtcaaattattttttctcctaattttagctgtcaaaggcaaagatcgaggagctgtacaagaaaaacaaactaaaactggaaggattcagcggggcattgccgaacagctcacttacatgtgcggcaccagttccaagcactaaagtaaatgaaagtccgcgaaaaaattctgggacacaaaaaattttccgggatccgaattagatttagcggacaaggatggtcccaggattttcggaggggtcgaaggggccccgccgatcgggggtcccatagggcagtaactttttttttcgtttcacattgttaaaaaaaagtgaatcattccatcaaatggtcgattttaattgtgaatttttaaaattacgcccccatagcaagaaatatagtaaaaaagtaatgaggccttaaaaagcgaaatttttatcagagggcccatttccagctttgttcgtttctattaattccccaacctttttatttggttgtttttgtttgttttttgcttattacacactaacggaaattaccattcttttaggctcggctgttactgtgctgtttttcatctttttgatgattgcggcatcattgtgtaccgaatgattgtgcttcgagttttttgtgatagcacatttttgcaaaaccatcatcggacattggaaatttggtcggtgccataatttgcgaaaaaaatgagaattatacaaaattttgaatatttaaatcttggaattaatggttgtcggattttctttttaattacttaattaaatacacatcaaaaaccacttacatgtatttttataattttcaaaaaaaacacaaaattttttttaataaaaaatttttttttcttattcaagacccacgccgttgccttttgtcgtattgtttctgctgcccacccgcgcaagttggttttggtcgcgtccggttgagaacagcgtgcacttctcggtaaatgagcaaataaaaacgaaaatttcattcaaaaacttgtttttgacttatcatgaaaaatgggtccaaaaaaatcaattatttaaatcttggacagaattttgagaataattaatgtcctgttttgccaagtagcgccggtgtataaaattagtttttttttttcaaaatttaattttattattttttttttgttccaatagctttgcatcggcccacccttcccgaacgtgacacttgacaaaaaacggagtatttttcggatgccaaacggatcatcgattacgtgttggtctacgaggagaaggaaatgacgaacagcaactacaacaacaacaattgcgatgacaacaaacaacgcgataattcacgttcatcccccaacgacacgcacaaaaagtgagaaataaataaaatgagaattttttcaattgtctaacttaagtttttctattaaaaatattaaatttgtttcaacactaaaaaaaatttttttccaattttttattttcaagaaatccaagaaaatttcaagggaacattgaaaattttttcagcagttgtttctctgctccgtctgagtgcccatttcttagccggtcttcatgcgttggaacggctctgacaactttccatggatgccaatgccatcggcggaggggcgaaagacaacgcaaagggcggagagacggcagacgccgaggcaaatttgttttaaaacttaaatttagttgtttattttttgtttcttcagctccctctgcgcagtgcttccctcgaaaaattggatctttcatccaatgccttgcgcagagtgccgaccaaattggtggcccattaattgcattccctcaaagttttgagtttggcggcgatttcaaccgaacggatggaaccgaaattaatggccaatttcagcgcattgaaacaggcaaaattaggtaatggacgttgaatggacaaaccaattatgtaatttggccattttcagttggacttttcccaaaatttcttccgttttttgccctttggaattttcgatggactcgacgaattgcaagctctgctcggattggcctcccttcaatgggtcaatgtcagtaaaaatgcaatgggaaaagagtaaatctaaatgaaaattcagttggaatggtgcccaattcttgccgaagctgaacagatcgaaattgaggcgaacggaaacgaaatgttctaacgagatgaattggctgctgaatgcctaggcctccgccgttggcacggacttttcgcaggaacaaatcaatgccgcaaagggcggcgtaatggacatagaaagtgccaaatatgtggtgccattggatggccaacggaaaaggattattgatacaacggtgggcggtatttgctaattatcagagggtaattaggaattgatttgctaattgtcgccattttcctttccagccctttgactttctgtgtccctattccattttctgtgccgtcggctgtcagtgctgccaaatcaaccacgcagatgaccacctcttctcaatgccaatgctcgagtttctgctatgaaaattggtatcgtgcgcaggccccaaacctaaaaaaattccggagggaagatgaagatttttttttgctcttcggtcttgaaattttttctcttatttaattttaatatgtccagctattttcttccccattctcctgattcctgaattttttgagtctttgtctatatatatttttttaaattaaatatttctaataattcaaaaattacttttaaataaaatttgcataaattgccaaattcctaaattaaaatttaaattttgttgcattttcaggagccgtacattcctttcatggagaaagcatgccgtctctgtggctcggctgtcactatgctgtttttcatctttttggtcattgctttactgttcgacatcattgtgtaccgaatgtttttgattcgagtttttatgccagcacattttcaatgcctttttcgagattgcttatccgtaagtaaaatcaattcaatttcaaatgaatttagcaattttattttatttttaaataaaaatggaattagtcacaattaaaatcaatatgaaattgaactgttattaaccagggttcttgaccgaaacccacgtttaaaaaaacctggattttttcacgacccgaaattttttttgaacgtcactatccaaaccccatcttccacaattcctgacctgaatttcaattcgggaatattttacttacatcccgataaatcaaaaattatgaattataaatttttatgtttatttaaaatttaaatttttttaattttaaagaatgctttcctattgggttcgacgatggtgctttaaaaattccagcgacaaagaaacaaaaatgcgaacggatttgcaaagaacggcgtcaaacaattaaatgtatcaacccgaacatcaaactcagattatatgtgcagctgggtgggtggtggaagagaatttttcaaattttttaataaaacttaaattatttttattttttatattaaatttgcctaaaaaaattacatgttttcatgttcctaaaattagaagccctggggggtttaatttatattccatatgactcattttaaatgttttgaggtaatacaacttggctttgtcaccttgtttgttgccgctttcccattagcacctttgtttgcgctgatcaacaacatcctgggtcttgaaaattcgaattcctatggccgtcaaaaaattttaaattttacaaaaattcttaattaaaattaattcagaaattacatggtttccttcaaatttactttttcatttactaaccctatctaatgattgcttgatttcttttgatggtttttccactaattttttcaatgtttttatttatttaaagattactcaacaccttttcaatagaaattttatttttaaataaatataaatttttatttttaattaaaaaaaaaattttttttcaagacttctttgtcatttcccgcaatacaatcggaagcccagcagatgcccaactccgtcgctgctactccttgcgcccacaacccgttcaacaacaatcacttcccacaatcagatgcagaaaagtacaacaacaaacagtgttgaagtgcttcagaaaaatgagcgatgacaaaattttgctgtggttttgatggtcgacaaaaattccgaatgcttttttattttttaatttatttatttgatcggaataaaaacaaggtattgcaggaaaaataattttttttaatttaccagctaaataaagaataataatttgggctactccaaatgcttctttatattgaaaaaaattacacaaattgattgacaaaacgtcaagtacaatgaattgcgttaataattttcaaaaaatttcgacatcacccaattgcgatggtcttttcaatatttattactacaaaatttttaaattttttcaattcctctcaacatacttaaaaatttatttgtaggagataaattatttattttaatttttatcaatgaactgtgaaagtgatagaaaccctcatggattttaggatgaccgaaaaataatttttgaccaaaacaaaaatcatttgtgctttttcatgaaacagaaagaaatgcttaatcgttatattcgaaacaaaatgaaaaagtgtaaaaaattttattcataattttgctaaaaaaactaaattcttaattcataatattatgacacggatacaacaacgaccggcggtttatgattatttgagcacagcaaaaatttgacacaaggaaattcatttttcattatttcatgatatttggagctaaataaatatatttatttttttagtgtatttatttttttcattctttacctgcaaaactttgtgagaaatcccgtacaatgaattgtatttcacgtttttagtgaacatgtgcacgtaaaagtgaaattgtacccaaaaatgaattgtaattttaaatttcatgttttctcgtgtacaaatacacgtaaaagttaaatcgttttagacccacaaaattgtaatttcacgtttttagtgtataaaaacacagaaaattacctaatcgcaacttcacgttttattgtgtaaaaaccaaaaaatgaattgtatttcacgtttttagtgaacatgtgcacgtaaaagtgaaatgtacccaaaaatgaattgtaatttgtatttcacgttttcttgtgtaaaagtgtacgtaaaagttaaatcgttttagacccacaaaattgtaatttgtaatttcacgttttcttatgtacatgtgcacgtaaaagtgaaatttatttggagagaacagaaggcacaatttgacccatatatatttttgatggaacattgacacgaattgttcacatttggaaaataaatgatagtttttggctttgctaacaaattagttaggaaccctctatggttttgattggctcactaaattgctaatatttgaaaatattatgtttgaaattccattcagcaccaatcgtcgtcgtccatcggttgcccattaatcccaccgtcgtgagatggaattttttttattgatcccccgcgcaaggtccgcttggaagcatccctcccattcccacgggggaagatggtcctccccaaattgatcacccccccctaacaaataagggcagggaagatgaactgctgctggagtttgatcagaggaataatcctagcaaactcatggatttgtgcacatttggcaaacccattttgcccattttgatcattaccaattttactggctacaaaaaaaaatttttttttgccacccaatttacataatttaaaatttttaatgaattaaattgcaaaaaataaattaattaaggggggcaaatagttgtatgtttctgtgtcagataaatagaaaaaaattcaaaatgacaacagagagaaaaaatattactgagactttttagtttattttttggaaaaccttaa

SEQ ID NO: 10197 - DNA, 5427 bp, Heterodera glycines
ccaactaattaaattttgggggtgcactgtgaaagcctctgtaaaaatttaatttacgatgaatagacaaacaattttttatggtaaattttatattttgggttttctttatttaattagaaaggcacttttagcctttagaaaaaaaaaaatcaaaatgccattttcattgcctactctcgacaaattgggtcacaaaattaaattattatttttagcgcaatttttaaaggttataaaatggacttttatatcccatatttatccattttttggcattttgtccatatttgggttccatttcttgatttcaatttttttttaatttgctcgagaaccttttttaattttaacttaattaaaaattggtaaattgggtgaacaaaacgaaaaattgaaattttcgctttttcaatggtttttaaacaaaagattaaattgtgtttttattggtcaagcgtttaaattttcccagaaaattaaaaaattttcttttttccaatgccattttaagatgaaaatagagctgagcgggaccgggactggtactgaaaaagcgtacaaatgagtaccaattcccggtttttttcccggctttcccagccaaaaagtcccggtttttctcaaaatttccggtccagctcagctctagatgaaaatgacagctgacatatataaatcaaaaataagacagtgaattgcgaagaccaaagctaaaaattttagaaataaattaagtaattaatgccaatttccatttatttgcctctcaaaaaataaaaataatttaaaatattttagaaagaaatttaaaggatggcctcgattaacaccagctcaactgatccggtaacaaaacgaaaaacattttaaatttaaaataaaagaaattattatattccaatatattaattaattccagttaaatttttattttaataactgttttcagttttatttggcctaccgtttcgccggtccatccgccgatttgattgtgccggccgttgcactcaatttggttgcgttggttggcattgtgttgaacggcacagttttggtggtcactgtcaaatccaagtaaatcattttttaattaatttaaattttaatatttaaatttattttcagttccctccgcggctccgccaattttctgatggctttgatttgtctttgtgaattggtccaccaaattgggcacactttcttcctggttgttgtcatttcgggcacaaattttgtcagtttactcactgctgacttaattatgacggtaaattttgaaagttaaaaattatttttaaatattccaatttttagccaatgctatttgcatcaaattgtggcttaatggcaatgttttgtgctgcttttgatcgcctttttgccgttgcattgccatttaagtaagggaacgaattaaaaaatattttatttaattaacatccacaaaacactaattaaacctaattaattctttctatttaaaactttaattatttaatttttagacattcctccatttttgcacattacaaattcacatatttgcttggacatctgttaatttgtgtaatttacggtgcatttacactgaattatgtgctcgcttatgcattcgaaaatgcgggaaagtatggcgcaattataattaaaaataaattaattataaaattttaaatttattcagtccaaccaccggtgttgtggccgaaactttgctgggccccgttggttataaattcttcgccggcacattcattatttcattttgtagcacttgttgttatgtgtcaatttttgtaattatccgatgcaaaaatggcggtaattttttattggcattttgccaaaattaaaaaataaaccgaaatttttttacagtaacccaacagacgaacacacgagttttacggtcattggtcatcattttgtccattaacattggcgggtatctgaccaatttggccatgtatcagttgctgtatgcatttggctcaattttggggtattttaaattaattttatttaatttaaattttccaattttcctaaggcccccaattcgtgcatggcaatttggttttatttctggcatttttttaaatgctgctgcgggatcaaatgctgtcgtcctttattttaacaggtcagtataataaataataaataactaattttaatgaattttaattaatatatctctatttcaattttaataattatttattgaataatttatcattttaaaattttaattatatattcatcatttaatatattaaagaatatttttaagctctgaatatcgccgcgtgttcaagaaagcatttcgagcgttgaagggttattttggcaacaaaaatggtatttttaattaatgtttatttttattgtcaatatctagaagtagaacgtttttagctgtccacgccattggcacaatccaagtgcgaagtgccaacccaatcaataacataaacatgcgatcaagccaacagataaatgcgcaatccatccaattgaatcgcttctcgattcgattcattttattatttgtaaaataaaataaaattcaaattgaattaaatggtaattaaattggatttcatggttattactgggggggcatttagatgaatgagactgaaatcgccggggaaaaattttgaaaatttgaatgcaatttgttaacagattttcaccaaaaactgcctaatttttgcgattttaagccatgcaacgactttttttgtttataaaaacgctttttttacggcgcgctttttaaaaaattttttgaggataggggggtccggaaaaatttgtaatttttaatgcgagttgtttacagatttttgtccaaaaatgaccaaaatttgcgatttttggctaattttttaagaaaaatagtgactagtgacttaatgccataaaatttcaaaaattctcaaaaattacatttttaaatgacataatgccataatttaatcaaaatattgttgaaaattacaaagatttctcaaatttctttgattttttttaaacttttccaaatgctcattttcaaggacgtccttgcatacaaggacattttttattttcaagaaagagggcccaatttcaaggacgtccttgccattcaaggacggatcccatccctggttttattgcatttttgttaaggaattttccaaaaaatgccgaaatagtgaaaaaatagtgacaaaacgccaaaatagtgaattttcactattttagtgacgaactcgccaaaatagtgatttctagtgacgaaaagtgacgtccaaatgaaaaaattttaacgcagaaatgcgttttttgagctcctttcttcaaaacaattgagcaaaaaaaatagttaaatcactaaaagttgcggccctactcattacctttaaagcccattctaaaacaacttatggataggttctacaccattcagaacatggatttatcaccaataattagggcccggatttttatgtttttacatattttttttgcggcttagttatggcgagagaagcccaaaaatagcattatctccgaacaatttttgatttagagcgacttataaaaacataaaaacacatattttggcgttttgtcacataaaatatgttagcacatattttggggtttggcacatattttgcacatattttggcatttttgagaaaaattgcaataaaaatacaagaaaattgaaaaatacaccccctaaaaatcgacttttttcctaattattaacataattttcaaattaaaaaattttttcttcgattgtagaaactaatgaaatctcgaattcattaattcgtcattggatttcgaagttctctgctggaactttcaatttatagaaatgatttatcaaaaaaagacaattttaccccaaacacttcgaaatgtatttgatttgcgttgtatgggctaaaaatgataaagaatgagatttttgggaatttttatgcaaaaacacacttattttttcaatttttaacacatattttagcacatattttggcatttttgggggtttttagcacatatttcagcattttttagcacatattttattacatatttcaggatttttagcacataaaaatccgggccctagtcatcagatttttttcgctcattcaaataaatgtagggtcagaaaaagtaattttcaataaaaataaaataaataaacgaatgattgacggtggcaaagcataaatttgtgggaaaacaggcataaaagttcaaaacgtaatcagaaacaaagagtgaaagtgaattgggccggaggagagagaaaaatcaaacaaagtcagacagtcaacccaatcaatcaatatctcggctttcatcatcactgttggctgttccgagccgactcccaattgttgctggtgtcaccgtttcccgtcgcgttcagatctacttcaagctgctgctggtagtggcgaactgtgcagcaaaagggaggagcgttttttggtatttaaatgggtttgtgactaaagtttgaattttcgtctttttgttcgaatttgagtttagggctctgaattaatagaaaatgggtaccgaccggtctcggactccatttttcaaaatgaatttgaattaccaaaattgggctgctgtggcgttccgccgccgtccgccaccaccgcactccgtgccgagcgttgcgacggattgcgcacaattggcgtgcccccactgctgctggtagtcagtgtgcggacagaagtgtcggtccagaagtcgtcgttgcccaaccgaagcaattgggccatggcactgacgcagcggtggcgcagcagcggcggacagtcagggcgagcggagccgaaaacgagcggaccgagcggaacggacagcgcgtcgatggtcagcagaccgaacttgaagatgttttcaataattgtcagagttgtccgaattttgggggtcggacaattttatgcaaaaactaagaaattatgccaaaaattcgatggacataaaatcttttaattaacgcatgactcggacataaaatcttttaattaacgcatgactcattgtcagtagaaagagttttgccaaatgctgaaaattcaggaaagagcaatttggaccataaaatttggcctattatcaaatgaagtggaagaaaaggtttgaaaaccccgtggaaaattgggccaacgaattttatggcataattagtacctggaccggttgaccggtcaaaaaagcccattttaccggtcgacccgatggtttgtccaaaaacgggaccgggccgcccggtaaaagctcaccgggccccatccggtctcaaattatgacttacaaggaattctgtgcaattttgaaagagtttctcaccgaattcgcgaccagacgattccaatg

SEQ ID NO: 10198 - DNA, 2815 bp, Heterodera glycines
cgggggggggaacgccgggggggggggggaaatgaagtgcacccgtttttctcaatccatttgattattcgcaattttctgttcactcttagcccctggggcgtcaatcccgttccgatcactgctgacaatgtggccgaaagggctcaacttttggctgatcagtaccgtaagaaggcccaactgtacggtcacaacacacttctggtgccactcggcgatgactttaggtggtcatttaccacaaattggcacatattccatgactttttgtcttttcagatttgacgaggacagcgaatggaccgaccaatatgccaattacaaattgctttttgagtttatgaacgccaaaaaggagtggaaaattaacgtgagaaattagagaggaggcaaagggtccacgtgtttaattttgactcttaaaaggcgcgctttggcactctcggcgattacttcgatgcgttggagcgtcgtttggtggaaaaacaggcggacgacctgcgacgtaaaggcattgttcggcacagcgttaagaaaccagaaaatcggtaaggaaaggtcgttttaaagctttaattccgggggataattttcttcgtttatttttgatgccgttttttgtcatcccatttgtgccgtcctccccccaatcgtgccatttcaattgtccatttgagtggtgccctttctgctgattcgccctcttctgccgcttcgttgtcgcttttgccgcttctgtccggcgactttttcacctacgcggaccgtgacgaccactattggagcggcttcttcacctcacggcccttctacaaacatatggaccgaacgttgcagcatttgctgcgagcggccgacattttctacacaatggcacgatgggagagcaaagggaacagtgaaaagggagaggaggacggaggtatgagaagggggggggcagattggcactttgtgaggagggcacttgaccaacaattcggtcatggatctattatcctgcaattagttaactgtaagattcgaagaacttttttgaaaccaatgaaatttttcgaaattttgaaggataatagagaacaattagagctatcaaatggtatcaaatttgttagatttgtacaactatcacagaaattataccccagcaactttcccaacaggcgacttcgacttgcttttcgacccattggttcgggctcggagggcactgagtttgtttcagcaccacgacggagtcaccggcacgggtacgacccgacaaattgtcgttcaattaaccagggatttactcattcctcccccaattcagcgcgaaccaatgtgatgacggactacggggaaaagttggaaattctcccaaaaaaccgtcccaaaccctcaaatttaaaaggatggcccaagcgttggaggactcaaagcgcattttggccaaaagtgtgcagcgattgttggccattcccaaattgcacctgcgggtggacgaggcgcattttgtcgaccgattgccccaaaaagttgtgcttggggcgaacacggcattggcaattgccaacccaatgggacatggacgccgagaagtgatttgtgtgcatgtggacagcgtggagagacgcattgaaagccatggagaaggaggaggaagtcagacggacacagtgtcacagcaaattggtagggaagaaaacccccgaaacccgcaattcctaaatcctgggatatcccccacaaatcctaatcatgggatatctcaaataaacctaactcttgggatgtcccccacaaacaggccccgtccttttcgtcgacctccgcggccatctcgcccattttcacgacaaattcgagctgtgctttgtcgctgaactgcccccgttcgccatggctcacttccgtctggtcgagtcgtcgtctcaactcggcgacggggcgcagaaagtgaccatccgacagtcaaagaattcggcattcgaatcacggtgagaatttatcaaaaatatttgttagacattatccaattttaaatgccgccatcgattttagtgttttcgattcggagccgatcaaatcggacgagcaaagtgttgcactgcgcaattcccatttggccgcctccttcaacgcttcttccggccttcttagggtaggcaatcacttctcaatgaactcgaaatgtgtttctttttggcattttcctcctatataaccatcgaccattgtttgtcctcctcatttttcagtcaatacgtcaagaggaaaatgccgaaattggagtggaggtttcatttgtgcactatggagcacggacccacgacccaaaccgtggtaatgttttgcaaatccaacaaattatttcatactttgtaatagccggatgtacatgctaatttggtgtctcttttctattgtataaattaagccccaaaagatctgtccggagacagtcgttccggtgcctatctttttctgcctgatggtccggctaagcctttgtcggcggatggcaacagttttctggtcgtttctggccccgttcgacaatatgttcatgtaaaaggtcagagagggtaataaaggggatcatttggaaattcaatcggttgcattctctcaaaatgcccaggacccgtcgaagttggcattcgtcaccaaattgcgctggacgtcgatgcgcggcatttggccattctaaacaatgtcaatttggctaccgagtcggccgctgaccggggagacagggcacagcacggcgcaaacatcgaattggccatgcgtctgcgagtgccgttcatgcgtcaggacaattttttca

SEQ ID NO: 10199 - DNA, 2687 bp, Heterodera glycines
  unsure (1)..(2687): unsure at all n locations
ttgtacactttcggcattcggtctctgctgaattctgaaacccatgcgccgtttttcatgcccaaattttccgcatttaaagggcgtggaggacaatttgttgacggagagtcgcttccatcttctgctcgagcacttcgaccgcttctcctcccctcctccgtcttcttccgccgaggggacaatcgcttttcattcattggccgcccaccattcgtcacttcgtctccattatccgcccatttcactcgccggacaaatggacgacgccaaaggtggacaagtggcacttcaaacagagacaatttgacaaaattcagagtttaaagcccgtcgtccatttgggtccgtccttcgccattccttcccctgcaactttcacccggtgactctgcgaacgcttagccatccgacggtctactcgcccaattcctcctccacgcggccccgggacgaagcggcgctaattttgcaccgattcggcatcgaatgtcgcctgggcacgtcgttgggggagagcagttgcccggcaggaatggcaacggcagaagtgacaattaaatattcaaaatgttgaaatatatcggggacagatatcttttattatatttatgccacccacctccgaattgttgtgtccccgtgtttaaggctttcagccatttcaaattaccgttttaggagagaggaatttattataaggaaaagcattgacaaataattataagttaaaaaccggaaataagtttgggtaacaacaacctcagagcattttgggtgggtcagtgcaattggttatttgggaaaggattgccaaaggcaaggaacggcacagactgacccaccgcagacatctcgcagtcctcgagggggaaattgagtggacttatatactggcacaatggggatggatttggatagcatgaggggtaatgacggtaaaacacaaagggaataagagagattgatggcatttgcaacagaggtgaatggatggcacggtaaatgagagggaaggattggcttgggattggatgaacagacggacaagtttatgacgggattgggtcggggaaatagggcaatttacattatgcacaaaatattaaattttgaatgctgcggatacagcataaattttgtcaaaaatagatttatattgctgataaattagagtgctagtgcgtttcttaaaactgccttccctaagcctcatttcaaaaaactttgaaaatttttgaaaagtaaaatatttttaaaaattaagcgaatatattcaaaatttagagaacattaaatatataagaaattttattaaatttttcaatgaaattttctgaggttttccaaaaatataaccatttagggctaacaatactgtatggctaaattgcattttaattttcttcaatttagttttctaaaaattttaagaattctcgaaatttaaattatttttcattttaattttaaattgagggatggcagttttaagaaacgtgccagcatgacaagtgagtacaaaccaggggtgctatgtcattatttaaaaaccatcattatgtgcgttatttaaaaacccatcaaaataaagatttttgcttatagctttgctctaaaaaggccaaatttttaatacttgctatcattcgataggtctaagtgttctttatgaatctgtaaaatttctaaaaattttattaagtttaaaaaaagttacggccaaaaatgttcgaaaatcaaggttttttgagttcctcgagctatagcttttttgaaacttaacgaaattttttgaaattctgcagactgatagagaacacttagggttatcaaatgatatcaagaattaaaaatttggttgctttggagcaaagaaaaaaaacgagaaattttggacattttgagaccaaattttggaaaaagaaaattggtccggcggttagaaaattttgggccaaatttattaagaaaataggataaactttaaaaaattacccattttcgtttaaaaaatttaattttttttttcagggggttggagcagcaattacccccccctcncccctggttatgggcctggtactgaaaccaggttctcttatcaattgctccccgcctcttccgatttgtcaaaattttaaagttcttagtacactccacctattattccctttcaaagacaaaaggattttcaaagttatgcttttgaacaaaagtgcattatggacagtatggataggcaaaaaagctggggaaatttcaaatataaaaagaaaattatttaaaaattgttaaataacaatggaaaattgcaaaagaataaggacaagtgggtaccctctgctgataatatggccaaatgagcatttattaatgtgaatttggagtgtactttttgctgccaacccaaagaaaaattgacggaacatttgggctgatgaggcgaggggatgagggcgaatcgtcgtgtgaatcgatgggcaacaaaatcgggtgacgggggggggggggaagaatggaagaatgaatgagtggtggtggtgttgagggatggggcgatgtattgatggaaagaatgaacaaatgggggagggacccacaaaacggggtcaaatacagctgaggaagtgttgggggcacagaaaaggcattggacagacaaatgccaggaaaacaagcaaaca

SEQ ID NO: 10200 - DNA, 3722 bp, Heterodera glycines
atccctaataatacattcccagcagcaggagcatttcagcactatccgccgcaatggtgggacagtttttataataaataatttttagggttccaaagagatctctcgagcagttcgctaactgtttgtcccttattcctctccacactctctcgccttctcttttctctctatttaatacgttccagcacgttaatgggattttaccagggatattgatcgtttcgtaaaataagtcaaaaattttattgaaaaaataattgatcaaccacttttaattttgtaaatatttcgaaaattttaacatttaattatttgaattttactacacttaaaaataataaaatttgattttttcattgctttttaaaaccaagattaattcacatacaaaatctattaacaaattgcactcaaattttctaaatcttactaggcaccgcctcccccctccactaaaaattttggaaaaataatgcggcaaaatttgaaaatttgttagcatatcatataacataattttaaggaagttttggagaactttcaaaaaaataaaaaaattataaattttatgaactataattttaaaaatgtaaaataaattgattccgaataattctttttgattgcgtaaattttgagaatgaatcaaaaaattttcaaatttttcagtaaaaaaaaattggtgttttgcgtttcgtattttattttaaaattcgttttttcgtatttcgcacttttttcgatttgcaataacgcttgattgtatcgattaatataactgtttagtttagaaatattaatattgcataaaaatttgtcaggttcggaaattatgctatgacaccgcccattggtgcttggcctttacagggcgccccggtgtttagaataccccaaacatttccaccaagagcacttggaactaatcagcaattctcgcaaccgtatgacaatatttgtttaattggtattgttttaatttctcactggttttagaacaaatcaagcaatggcaaattacccttttatgctttcggcatctgttcctcttcctcaaacgcagactttccctctgccaaatgctttgccatttgccatgaattctaatggcggttctttaacatatccaacccaaatgaattacgcgcaaatgcctgcgcctgcacagaacactcattctgaacaagttccaaagaagaaaaaaaatacttcaaaaaagcaaacgaagtagtaagaaaaaggcttgagtcatgatgagttagtttcgatcttttgacaaatgctatgagaaggaaacgaattttagggcaaaagccgagaatgttttaggccgctttagcactgtttcaatgagccgagcttatagttcaatccactcaaatttattataagcccaaaaaatgcgtttccttaatgatttatcattcatttgtgtaattttttcattcttttttagatcattttcttaacgtatgtaaatttttctctttgtctacagatgaaacttcggcttcgaaaagttcggtcttcggcttagggtaaactaggcgaaattaggttatatgacaattttggtccggtcaattgttgcctgttggaagccagacattgcggccgcggtcggccattgcattgatttcatgagagccactttcggacatttgcgctcgatttcataagggctactgatgtgactgagtcctagaccttttggctaaatggtatatgactcagtcacaacaaaaaggaactttgtttttgtctctgaactgagcacgtagccacaaacgaattcacaaaatatgccccaccctaatgatggggatcttgactcgatttttcggtgtcgaaatccgattacgcacctacttcctcccctttacacaccctactctgtgcttatcggcaccacaatgctgccatggcggccttgtagacattgctgacctatttcgcgatttttcttacataaaaaagaatgccctaattatgatatatttatatatattatgcaatatacatagaaatacatgtacaaaagataaactaatttatatttttttatttcgcgggatttctttgacgcggcgggatttcgatgcagcgggattttgacagcgcgacagactcaacattttcaaatgctttggcattttttcttggaatatgcttaaatgataatttatcattaataaatttatgcgtttttgatttatttgcatgctcaaaaaatgtgaaaattgcaaacctccttttgcctataaagcaggggtgtgatcaaaaaattttccaaataagaacatcaaggccaaaaaataagattttagggtcaaaaataagaacattttgcaaaattgcgtaaaactgcttgtgtaacaatttaatcaattaaaatagtataaaatttcgtatttttcgcctcccataatcatttaacaattttggggaggagattagcaaatcgtacatttaaatgcaaactgctcaaaaaaatcagatttttaagaatttttttttgcggcgcattttttcaaagactttttgggacaagcggggcggaaggtcggcggtgccgataggcgccgccgggaaaaattttgaaaatttgagtatgttttgttacagattttgtcaaaaaattgtacacattttggggtccggtggtgccgataggcaccgccgtggaaaattttgaaaatctaagtgacattacgctataaaattacaaattttctgaagaatttttaaaaataagaacaattgcccgaaatcagaacaagcgcttaggcggtgccatttgttagtattagtgcaggtgctaaattaaaaacaaaagagaaaaacaataaatgcaaaaataattagacaaaattaacagcaaaaaagaaattatattgcaaaattgaaaaatatttttcttaaatagtacgccaatcagaaatttttaaagaaatttgacagatttttctgagagcgacaaataagaacaaagtaagaacaatagcctgaaatcagaacatttcttacaaataagaacatttttattttgtaagatttgaaccctccaaatcagaacatttcttataaataagaacagatcacacccctgctataaaggcaaaagcgatttttatgaaatgaaattttaaattttgagaatttttcgactaaacaagaaaaaattcgaaaatttgaacattcaatttttgtttgagttctgatccgggatcagaattgcacgaaataagggtcaaattcgcgattaacgaccccgaaaacccatagaatcatgttttttatgagtttttttatattaaaaattaaaaaaaaaagttgataccaggggcaatattacccatgcgaaagttccacccgaaagaaagatttctggaaatttaaattttaaaacgaatgcttcaatgctgtaaaatggcagtagggggtcagttccgggacccacgcgtttcggcactggcttttcggcaaaaatttcgacttttcgaaattttcatgtataacttttttggtaattgtctaatcgcgaagcaatcgcttagaaaaagcttctaaacatgttaagctttcgaatgatatcaacaatgttggatttggattagatagaaaaaagttatagccaaaaacatgctggcgccgaaacgccagcgccgaaacgcagtggaccctcagttccgtcttgggccagttccgtcttattacta

SEQ ID NO: 10201 - DNA, 1553 bp, Heterodera glycines
acagatcacaacaaaatttaggtaatttgttatttttcatttgggactcggcaactgaaaaaaaaatcaaaggcggcgcgcctttttagtgtcgacggattttaaagccttcaatgattgtcattggaagactaatcaaagtggtaaggaagcaaaaaatagctacgaaaatctcaaatccttcaagcggggttgtgtgatggccttcggtagaaaagggaggcggaggcgccgaattgccaaatgaaacgacccgcacttagtgctgggcgagacgaacgaccatgtcagtgccaaggccggcggacatgcaagtcaacagcaagtacagaaaacacttttccaagctaaactctcggcgaaaaatcccatgaaaagcccttttccttcgtcgtgatgtgttgttgcctttccgttggtcatgatcagactgatcagccagagccagtgaactaattctcgcatcttcaattaaatgtttaattaccccatttggaataaaattctttgtttagaataacttaattggttacctttaagaatttcagttactttctttagtaaatcaatgcctaatttcgcaaaatttccaaattcttctttgtttttgctgttgaaaatttccattttcgccaatgttcgaagactttctccgtatatttgctgattcagtttcaaattgttcactgatgttactattgaaatccctgcctctttccatcctttccaaatgcttttgccatttttccaattttgacaaaaattgagtcgcttttcttctaattctttaaaagctaacaaattgtcatctttctttgttttgtcatttcctttctcatcattttttgctttcatttcgattccacacaaaaactcaaaggctttttgctgaaaattgtcacttttcgcctccaatgcctttccattcgctttttgtggtttaagtccatcatcagatttattctccgcctgtttgtttcctgggagttcgtcgagaagcattttcccggtctcaagaaattcgttggccgccataaaaggacctaaaaacaaaacaaaataatatttaaaattctattgaaaatattgttcaaaccttttttgctttcatcgtttgtgcccaattgaccactcgataagtttattgccgcaaacagcgacagaaaaaggccaaaccaaagcattggtgcggaaagcagtttcttactgatggaaaaaataaaaaatgccatgcccataaatgaaatacgcgcaaataggggatgaaggcattaacaaagaaaaaatgtggcatcatattgaatgccaatgactgacgtaagcaaagctagcgccgaaacaaaaaattgtttttattacaattactaatttaatcatagttttaaccttggccgattcaactaacgaacagggaggcaaatttaaataatgcccgaaggggtcactgtaataaggatttgcaaacagggaatttttccctaatttaaaaagctcctcgtgaaaaaattggaaattccttaaaagtctctttttaacattcattatttaaaaaa

SEQ ID NO: 10202 - DNA, 4069 bp, Heterodera glycines
ccaagtctaaggtgaatttttccacataattatccacaatttttacacaagacctattcaaagaatcgaaaggaaataattggtgatcggaagacgaagcgaacaaatggatggtgtttaagcgttgtaaaatataaaattttcaaaaatttaaaacccaaatgttggccattctttgtgaaaatcagtttcaggttggccaagtcaacgccaaacccaacaacatcatcggcaccataaatatattcggcgtttcttattttcaatgagccactaagccaaaaagtgccatcgctttcgtatgcataagtgccggtccgattgcaaattcgttctcccaattcgctcgactgtttggggcaaattccgatggtagcccagctgaaaattgtgaaaaattgaaattaaaataaaaaggaaatgcacgcaatcggattttgaattcaaaaaatctgagattttgaaaatcaaaatttttaattatcaaaattcaaaagaaatattttggggcgatgaaacgcgacaattcaacgttaggcattttaattaagaaaaaatggggtttaaaaatttggtcattttttgataatagattgtccaaaaattagcaaatttagagaatttttaaaaaatattgaaatttaaacactgcggtgccaataagcaaaaatagagaaaattcaatgaatttaaagtgatccagatttatatggacaaaaaaatccaacatatggattatataatatggatgaaaaatagcaaaatatagacgaaacatggacaaaaacgttgaaagaaaaaaacatgaaaatatggacaaaaaattttctgaaaattagtaaaaaaaagcaaaaattagtaattttttttgtaaaaaatattttttaaagcaaaagttgcatgaaatttttttgcacattttttgttatttttccgaaatttttcgattttaggggcatattttccaaaaatttctatctttagggggtgtatttttggaatttttagtgaaaataccaaaatatggggatttacgtggtttttaggccgaaataaatgtgcaaaaaaaaatatggaaatccatacaaatccgggccctagttatatgacactcactgtttcttttttatgatggaaatttcgaaataaaaaatgccggaagagtcactgcccagcaacactggctgttttgcgaacaccgaacgccaaccttttgacaaaaatgtgatttgtttaaaaacaaatgaattacagtaatcctaccgtgtaaattttgtcccgtatattcggcagtcaaatgaccgcaatcagagatttcgatgtcactgtgacacgcggtggcatcccaacaatttggggacggatctgctttaatttcagcaatgtcctccgtcgttgtttgtacagcctttggtattatttttaattatttattatttcaattccctcatttttggaacctcaaaaaatttttcgatgtttttgaaattttagagctattagaaaagaaggattttatcaaattaatgtacaaaatacgaaaaacacatttttagccggaatttattttaagtccattaattgtcattatatattatagttttgtatttatcgacctttttaaagtcaattctgaatttttacacaagtactggcttttttgagggttaaaagccatttttgacagtttttaatgcatattttatgggcatatttggcattttttaatgcacacccggcatttagtgtttgcttcgtttacctgctgctgttgttcattctccccatggaaacacttgacgaaaaggacaatggactcattctgaatgccgtaatggtccaaggtgtaagtgtcctcgagctgagctcctatgtaaatgagtttttttttaaattatatgtttcttttctcgccaaaaccaagggaccgaggggaacaaatttcattggcattttccatatttttttgaaattttccattggggttgcctcacactaggttgattggccttcccatgaaattcgcctacagcgccgtgataccaaagtgccttcatagagatgcttcagattcaaaattcgggaatcggataatctgatgcgccaccattggcataccacgaaagatgagccgttgtcggtccgttggaatgccattcctctcccgcactttggatttgacctgctccacagtctcgctggcctcaacgtcgagagtgaatgtgttgttgtcgatggatttcacgatgatttgcattctcccaccgatattctgaccaaaacaaacaaaaaatgaagtcaaacacatagacagacagagacaacttgtctaatttttaatttttttggcaattcgccgccctttcagtccaataccgtacaccagaaaaacggacacttgttgtactttttgcagtttacggtacgatatgaaaaaattctttgcgctgttttcacctttaaagtgtccaaatcgaatttgaattccggcccaaagttggcctcaattttggcgccaaatttagacaatgtgacaaatggaaacagcggattatcatcgtaatcatcatcattatcagaagggggaatgaaaaagtcgggagtttctgtaaaaaacaataattaacggaaaataaatgatatggaaaattaaaaaaaggcctaaaacatccaaaaagcacattaaaatggattcattattttccccccacggaaaatcttttaaaaaacaaagaaattttctggcaaattttagcgtttccattttaatttcgcactttacgcacccaaaagttgtccattttttgtgaaaaaaatctgccgtttctctgaatagatgccacatccgaccacgtctccattcccgaaaaattcatatggattttgccgttttcgcgaaatccaaaaagtgcctccgctttcgtatgcgtaagtgtcgatgcgactgtaaattcgttcgtccaatttggcatttcgtttgggggcgaatccaatggttgcccaacttaaatttaaaaaaaaacaaaaatatgcaaaaaatatatatatatttggattaattggcaaaaaagttctcactctttcatatcgatgattgaaatttcaaaataaaaagtgccgctgggattgttgctcaacaaaattgggtcttttccgaaaacggagcgccaacctttaaaagaaaaagaagtaatattgataaattaaaacaattttcacaaaaaataaatagcctaaaaataggtgcctaaatactagatatgacaaaaaaaaattaatacaaaaaaattgaaaaaatttgattgatattgtcaggttatttctcaaaaaatttcctatttatttcactaaatttttgacattagaaattactcatttttcggaagacattaattactcaaaaactcaattgtttaattgactaaaacaatgcttttctgaaaaaacaaagtttgaatttaaaatatttgaacaatgagaagtaatttaattaaaaaaaaataattatttttattggacaattttttatgacccctgaaagattttcaaaaaatggggaatttttcggaatatccaatgcatatcggaatgtattcaatttttctcaattaacagagataaagaaatagttctccaaaatgagaggtgattagtatttttctctgctccccctctctctctctctcaattcgttgatctctccttttttgactcgatgtgattaattcagtccaaattttgaattgttttttttaattcattttaagaattgataattttggtaattgtctgataaaattaccatttccaaattccttgaaaatgaccgccaaacactttgggccagtgattgtgaggtcgtcgtggcacgcatttgcatcccaacaattttgtgctgatttgaaaacatgaaattttaaattcatttttgtttaactaaataattataataattttaaaaaaagtttctcacctcaactctgttcagacgaaagtcggaagagcatccttctgaaaaatggaggggatgagaatttaacccaatgattgaaattaaaagcatactcag

SEQ ID NO: 10203 - DNA, 5885 bp, Heterodera glycines
  unsure (1)..(5885): unsure at all n locations
agaggaacttagggctatcgaacaacactaagaatgcttgatttgatggataacgagcaaaattatggtccgaaaaatcttccggtgacatttcgactcgaccccccgagatttttgggcggaccggtaaattggacaccaaatttctcacttaaaaaatttgtttacagaaaaaatccataaattagggctaggcctagcgcttaggcttgcttggtttaggctttatttagtataaattttatatccaacagtgtcaatttatcgggaaccgttttggggtgcacccgtcccccacctcattgaggtgccccgctgataggagggcagcgtcaaattgtcatcaaattgttcgggaatggtactgtagaaaaaaaaaagaaatttgggattttccgggattttttaaatttttgttcgacttcatttcgaccgactcgccgcccccaagcaaatcgtccggccgacaaattcgcaaatttttttgccaatcgctgctgctgctgcctccgtgcgccgaaccggtggaatccatgcggcgcaactgaaaatttccaaaattttagcttaaatatactcaaaaatggcaaataaattattaagaaatttaaaaaatattaaatttattaaaaattcgtaaaaataattgtttattttataaatcatataattaaatatttattttatttttgttttttgctggatttaagcgcagcggaaaatttttcaatattttaaataaaaatataccaaaaattgaaaatagaaaataaattaaaaagaatttaaaaatatattaatttattaaaattccctaaaaagaaattaaaaaattatttattttttatataattaataattcaatattttaatatttttcttaatttaaattgattattttattaattcttaaataaaattattttttctgactaaaaataaaataaatttttaaataataattacagtagacaaacacagtacagtatgcttttcaaaatgattacagtgaaattcctccggaatgttcttcgggcaaagttgccgacagctcctcctccccctccgccaccatatgatggcttatgatgactttcactctcatcatcctcctcatggtccgaagcggcttcctgtggagaaaaattgaaaaatattaaatttttttattttggaaaaggcactaattaattaattaaatttttaatgacaattttcagtaaaatgatttttgaaatttaaagtggaattaattagaatttattgaaaaaggcgcccatttttgttttgttttttttattttaaatatttaaattcccaaactttggaataaatttcatcaatatcttatttgaaacattgaatggtataaaaatttatttaaaattatttaaattattaattttttaactgtgccgaccttctccaaaatgccgaccatggcaagttcgacaattgagaagaaaatgtaagtgacacagcccatcatgaaccaatccacgcctttgatgtaactgacctaaaaatgggaaaaacaaatttaaaataatatttaacagtggaaaatgcaaaaaataatttttatatttttttttataaatattttaagcaattttaataaaaataattgcaaaaaatattttattaattttacagtattaaaagtaattttaaataattttaataaactcaaattaaaaaaattttgcttgaaaataattaataaatttaattatattaattattttttaaacaattttaaatttattataaaataaatgagtgaacaaattgtgtttgttccacctttggcaagctccttgccacattggcatattgcattgttaatgccaaaattgaagaaacgcccaaagttaccctggcaaaatttgaaaaaaataataaaatttttcaattttactttttttacctggccggcaatgacttccggtccagccaaaatgagatccatgaaattagcacctaattaaatgggggaatatttattatagtctaattaaaaattcaccatgcaataagtgggcatataaatttggagaatgtaaaagccgtaggcacgtcggaaataaattttaatgttcagctaaaattatataagaattttaaatcttattaaaatttttattttaattaatttatttttaatttattaaatattataattatttaaaaggttaatattaatatttttggattaataacttttttgacaacaattctgttgtaaattatttaatatttaagttaaaaagtttatgcttgtttaacaatttaattgctgtgcaaggtataggcctaattatcctactaattactcgattaattaatgatcaatatttataaaattattaatttgcctgatcccaaacaccagctgggtaatggaatgtggccttttcaaacagaaaatgggacagataaaaatcgggcaaactgaccttgaaaagggggaaataaaattaaaaattaaataaaataaaataattttaattaatttaatttaattaatttaatttaattacgttggcgatcagttccaccggaatgccttgccgtttccaatgcagccgaactttgcccacattgaatgaataactctcgaaaactgttgtgcactcaacacggtccatctcaacaaaataatacaattaacggttaattagcgataaaatgtaattaaaagtttaaataatatttaacaaaaaaaattgaaaaaattcttcatcagctaaatgaataaaatttgcgtcttttaagtgcttaagagtttcgtaataaataatttttctttaaacataagaaaatttctaaaaaaatgacaaataattctaaaaaaaattttaaatttttattaaaaatttttataaaatgaaaatttttaaaaaagaaaagttttcaaaattcaattttttactggaaatgttgtgaattcaaaatcacacggcgattcgacggcaatgctaaaagcattaaaattggataacaaattaacttttggacgattaccgataattgagccaaacagtaccattgggaaaaatggcttaaaaattaattaataattaatttataaaataatttttttataccgagaaaaatgttaggggtgggcgaagaatggatgaatgaggatttggagttgaccagacaaacatttgggatccaaatgttatccaccttaaaaatttatctgtttaatgttgtctaatatttgcaatttataaaaaaataaattttattatttttttgattcttatctcatttttaaattattgaattaaaatttaattgccgtcttattttttgatttatttattttcacttttttaaattagataatccaaaatttgaatgttgtcttaaattttgaatttatttataaaatcaattttttttttattttcatttatttatttctaaattttaatttttaatttgtttattaattttttagttagaaaatgtttttcaaattattgaacatttgtttaaaattgcaacaaattgtttatattatttaaaaatcatttaaatatatcttttttttaacatattttaatttattattttactttaatttaccattcgatatgacaatgataaattggtcaagcattgagcaccttcttcttgctaaaacattttaaaattagcaattaaattttaaaaaattacctcaaaattgaggcccgggtcgtgccaaatttggctgagcataatgtccattttggaggaggacaaaatttcattcatttcgctgacctaagaacatttaaaaatgaaataaataacaaaaatattaaataatatttatcaaataaatcaaatatttttaaattcaaaaattttaaagaatatttattgaataaatcatttatttaaaaaaaaatttatttataataaaactaaataatcggtaaaaatggaattcattcaattcgaggttcggaaatcggattttagtcacaatttttttgaaataaaataatattaatattttagggtctttcaaaaaagtaatggtccttaatgaagtaattaatgaattaactaattaattaatgagggaacaactaataaataacccactttttgaatgagcagttcaatttcgacgtccacgccctttatgctgggcaccaaattgcggtcgtacctcttcagaatgtcggagagtatccttaaattttggaacaattaataaatgaaaataaaattagtttgtaaaaattgaaaataaaagaaatgacaaaaaaaaattaatttgaaagaattgaaaatttgtttttttattaagcaaagaaaagattttctaatgttaaatgataaaaaaaatgaaataaataaaaaataaaactcttctatattttatgatgaaaaaataaattgaaaaatatttaaaaacgtgtaaatttgttaattaattgctaattaatgcaattaattcattgattgcttttcccacctcgtcgcgtgcttttccgcctgtcccagcacacattgctgatcactttcgttctcctcgtacatcatttcgctgatcatcatcggcggtccgccgtcaacgccggacattggcgaggggccaatttttgtggcaaaatcgccgtaactaaaatttttanatttttttaaattaacaaaatgccaaccggtttgacggtaattcggccggcgaaggagtcctcaccatcacacaactgccgctgacttttgagcgatggaaaccctttgaaaaatgcaggggaaatttggggtaaagtgatcgaacagagatcatcatcatccaatcaataactgatcaagcccataaaatctattgggattaatcgaaaagctatcgagacaggaatttgtaaaattttgaatcatgatcacgattaggggactggactcggaccggatttcaaggatttaaaacgctgtaatgcttattaatttgagtacagcatcaaacacggattacacctcccctacttttttactgtatttataaattttaaattttggagaattttctgaaatttggcccttcacctaaaaatattactgtaatacaagccttccaaaattcacactttccgcgccattctctctcacctgtcggcattcgcagctcactttggcaccaccgtcggctgtcggccgccgtttacagtacgaagaacgcaaatcacacttttggcattctgtactgctgccggtgtccgatgccaacattggcggggcgtacaacggcgccgttgaggaactggcgacaaattcgtccaggtcggcagctggaaatttagaaaaaacatgacataattaagtataattaatctccaatgctgctgaccaaaaagaaaagtgattgatttttcatgtaaaacataaaagggagcaccgccccggcgggacggactcgaacccacggcccttttaaacttggttaaaatcccatggaattctctgccattaaaattgggacaagccactgattactgaacaatcaatcagtgattttgcctatcaatcaataatcaatcagtgattttatctatgaaaaagcgcttaaaattttaaacaaaatcattggtgattttgttgcctcggtcatcatcaccttcaccggagccgattggcattgcgattgaattcgcggcacaaaaattgatatagaattgagtgctgattgttagcaaaagtacagcgccaatgggaaacggtaacaaatttgaaattggcgttcttttggcaacaattattttggcgttgctgtttttgttgcgtgagttggcgttctgtttatattgctgcttacactgggtccgtacttttgggcataaaaatgctaaattttatacgacctgcagnngcatgca

SEQ ID NO: 10204 - DNA, 6021 bp, Heterodera glycines
ccgccctttgacttttcggtgtcgctcagtgacgacgatggcccatcagttgcagaacggcgaacatatcgctgacgaatgcagcaccaccacgcgcagcaaacaatgccaattgcgatgaccatgctgaaaatggggaacaaattgaagacggacagacggaggaaaatggcacggcaaaaaagcagcagacaaactcacccaattaaaacggcgatgacaatggtggcccaaattgggagtttgtcgagaatacttcctttttttggagctggaggagacttcgtcgtagtcgttggaactgtgctggacttagaatgaactctgctgaaaaatgggaaaataattgaccgagaaataagcaaaaaagtgaggccaaatgcttccgattccgaaagcttacccatggcaacagtcgaagcagttcaaaatgaggacagcaaagagcaacagacggagcacaatttgtggaacagtggaagtcatcgtggcaattgtaaggcaaatgaattggaaatgaggcggtaaagccacttttatagtgacgctgatggaaaatgtcacttaaaaacgaagtatttaaaaaatttgttgggaaatttaaaaaataaataaaatcaatcaaaatttaattcaacggaatggattatttgtattcaacgttcccgaaaaatcttataggattcatctatcgggttaagattaaaaaaattggattttcgtgggtcagcgaaaaaaggggccgcttaaaaaaggcgtcaaaaatttatgcgcaaaattctctccccttataagggggtttctgtgttcactttcgtcatttttgtttttgtttcaacttcaactacaacaacaaatgatgccgtcacgttcatttttcatcaaattcaaatgggaatttgcctttgtcgcgtttctgctgctgctcagtgaatgcttttgctcggttggcgcacaaccaaccggcggccgaaagtaaaaatgccattttttttttttgcaaaattttccattttcacctcccctttttatttcagtgtaacaagtccaagtacgacgggatcaacaggttcaactatgacgacgacaacaacgacgaccactaccaccaccagcagcacgccaacgacgccaaaggggacgacgacggaaaattggagcgaatcattagcggctgctgttggcggaaagaccacacttgtgctgatcatcgttgggtgcgtttgtcatcattcattggggaccgaccaaccatgacgaagtcgtgtttttttgaatgtcgacaatggcacgaaattccggcatttttggatcgttgggggaccgatcctgacaaatgagtgtttggagtgccggcaatgggacgaaattccggcattttgggttgttgggggaccgaccctgacgaatgagtgtttttgggatgtcggcaatggcacgaaattctggcatttttgggccctgggatttcatcatcatcacagcagataaaaagcagtagtaatttcacatttttccccatttgttttttcagcgcactgattgcaatcattgtcctgctcgtggttgttgtgtgctgctgctgctgcaaaaaacgcaaacgccgccgccgccacacttctgccgacgacgacaacgacaaggaggacaacaaaaagcgcaaacgtcgccaccacacttctgctgacgacaagaaggaggaggaccaccaccacattgaccagcacaataaggaggaggagcagcacggaaaggaggacaacaaatcgccgatacaaagcgaactgaaagtgtcgacgatttccgccgtgccaagcgactacaacacgaacaaacggctgggcgcaacagatttggacgtggaagcggaagaggtgccgaagacgaagccggttcccaaaaagccgaagtcagaaggaggcacaaagcgcaaactgtccaatttcttttggtccaccggcaccacggagaagcgaccgagcgcggcggaacatggcgtggaagtgccggaaacgattcgtgatgatgaagattgaagatgcttgaatgatggtgttgtattctgtatatacctatattatatattgtatccagtattctgtgtttagccatgcatatgtttatgtattgtatgtgcgtattattgtattatatttacggtattcaaagcgatgtatcatttaacacattcattgttggtatataaattttatttgtgttgttttgtatgtatggtctgaaatttcggaaaattcgcatagttctcaatgattttgtttttccgatcgactccctcagcttgtttaattttgttggcccacatttttttgacaatttcagctccgccgatttttcagagaaattgcacgaattacaatgactgtatttctaataaaatccctgggggtactattattcaacttggggcttttatggataggggtggggtaatactagagatcgggccggtcggtttttgaccgaaaaaaaccgaccgagaaatttgagtttttcggtttttttagttttaatggaggggggggggggagggctataaaagagattcaaacaaaaaagaaaaataccgacgaaattgtactgttttcaaaatggaaaaattgtctaatttcaaaaatcgaggcacaaaaaatacaacgttaagcggcgctttacttcccttatacaagacaaatacaatatgtacatacagaatatacacagtgaaatcagtgacaaaatcagtcatttgatcggataaatacaatttatgaaacgataatgatcagattatataattccatccgattgtccattgtgattagggctcatctgctgctgctgttgatccgcagtttgaaaatcctcagttcagccaggcaacggtctgaaaacgaaggaaaagcgtaagaaaaagccgaacataaaatttgtcgattctcgactcgtccctcatacccaatttcgtcatccgagaagccaatggtcacccaattcgggggacgttcgctgttcacgcgcgacacgcgcaaccaggacaccacgtcagcatcacttaactccaccggacagcgcagaatcttcaccaaggacacaacgccacccacagctggatttgcttgcacattgctcatcagcgtcagcctttcctccgtccgaatgttgaccatttgttcactcctggtgtagttgaattcgaacgaagtgagcaccatgtagttgaccgggacggacgctgcagtgaatgactgtgttaaaaagaatgggaaatgcgatcagatcagttgcagattaatgatcaaaaaagggactctgttgcagttcatacggtcataaaaacatttgacagttttaatacagcataactttttctagaagcattcaaattcaacattcttggcatcatttgatagtccaaagagtcctctattagtcctaagttgattttaaaaaattcattcaaaattgaaaaattttcagaaaatctattttttgaagttttctggttacaacttttttgaaatataataaaattctttgaaattatgcaggccaataaaggacattttgggctatcgaatgatacaaagaatgttcaatttggatgcttctagaaaaagttatagtgcattaaatttcaaattattttatcgtcgtgtgaactgcaatagagccaaaaaagagtaatgaaaaactgaaaaatccatctccatcgatcaaaatcatcccacgatacccaccgagagcaattggttgacgaattggtcccatccattgttacatttggtcaatttgaacaccttcggacgaccgtcagggcgcggcatgtgcagccacatgtacaggtcacgggccgatgtatcagcagcataattggtgttgtcaacggtcggacgttcgggcaaaatcggggtgaggatttcgacaaggttcggacagtcgaagaggacggttggcgacacgtgtttgcgcatcagtgccagttgtttgcgcttcaggctgaccagcgtgcggagtccgttcctcaacaggggccaaatgtgccgtgccatcgcttgccaagcgcgaaattccgtaatcagatggttgaactgcagcgagatgttggtgctgaacaggcggcgatttcggcgcaggaacttgatcacttggacgtccaaatacctgcagaaaaaatgtgggggtgaacaaaaatgccattaaattcaaaattgagaaaatgggcggcgactaccaaatgttgaatgtgccgttgaagccgacgacactgtccggcatcggtgtggttgccaatggcaatgagaagaaggcgccttcgctgttcaagaccatcacttctgcgccgctccctctcgacctgcgcttattgatgtgcaactccgtcaagtaccatcgcctctgctgcaactgcgtgtccaccagggcggcgaagcgggcattgaccagcgcaaagtaccagccgatttcttcacgtccaagccatgccaatgtgtccagccaaatttggtcggtgaaagtgccgcttaaaaaacaaaattttcaaaaacattttcctttctctcacatttgttccatgcgttgccgtggtgatgcctcaactgcttcgccttgttgctggagttgctccgctcgctttgcttctgtttgttgctgctgtttgtcagttgtcggctcttccttctgagtcacttttgcttctccttcttccgatgatgcttttgattgtgcagtgcccagttttgttgtttgttgtgtcgtcaatttgtgcacacttctgcctgtgctcagctgccgttgatttgatttgatggcacggacggaggagaacagcagcggcaataaaatagaggaaaaattaatattatttggaatgaatggccggaaatgctaacatcactcccttttatactgctcattcattcgaaatttgaaatcctttttttaccgaatcagagccccgagcccctataataagggtcgctgatcacgaatctgacatcactttcgactaccggattaagatttaaaaaattggatatttcgtggctcagcgaaaaaaggggccgcttaaaaaaggcgtcaaaattttatgcgcaaaattctctccccttataagggggtttctgtgttcactttcgtcatttttgtttttgtttcaacttcaactacaacaacaaatgatgccgtcgcgttcatttttcatcaaattcaaatgggaatttgcctttgtcgcgtttctgctgctgctcagtgaatgcttttgctcggttggcgcacaaccaaccggcggccgaaagtaaaaatgccatttttttttgcaaaattttccattttcacctcccctttttatttcagtgtaacaagtccaagtacgacgggatcaacaggttcaactatgacgacaacaacaacgacgaccactaccaccaccagcagcacgccaacgacgccaaaggggacgacgacggaaaattggagcgaatcattagcggctgctgttggcggaaagaccacacttgtgctgatcatcgttgggtgcgtttgtcatcattcattggggaccaaccgaccatgacgaagtcgtgtttttttgaatgtcgacaatggcacgaaattccggcatttttggatcgttgggggaccgatcctgacaaatgagtgtttggagtgccggaaatgggacgaaattccggcattttgggttgttgggggaccgatcctgacgaatgagtgtttttgggatgtcggcaatggcacgaaattctgcatttttgggccctgggatttcatcatcgtcccagcacatataagcagtcgtaatgggtcccacccttgcgtattcgcaacagcaatgtgaaaatgcgctctttcaccgcgtcgattcggctcaacaaacgctttttctccgctgccaaacggctgaaaaaacgattcaattaaatttttacattttctatatcccaccaatcctcacccgtctttgtccgtgtactgcttgacagcgtcgcaatacccttccattgc

SEQ ID NO: 10205 - DNA, 1325 bp, Heterodera glycines
  unsure (1)..(1325): unsure at all n locations
ttttcagtaccctcaaaatgcaaatggccatgatgctcggacggcaacaaattttcctcgagctgccggatggtgaagacggactgctgggggagctgaacgcgaactcgcacctgcacaaacacttcctggcgttggcccgcgagttggacataatgacgcccaaatcgccggacgatgtgtacaaaatgcacttggagcaggcgcgtccgttcacgcaccaggtgggcaccacagcacgggtaaatactcatccatttttaacacatttttggaaaatttttcgcgattatcgggttcaaacatagattttttcaattttagatggcctaaacaactttaaataagtgatcgaaagtgattgtgtccaatagtttaatcgtcagcgaatttgaaaaaataatcatttatccagccaacagaaagttatacagaatgagtcaaaaaaccaaatttaaatccgattttggacatgcgcttaaagatctcaatgcgaatgcaactgaaaaattgctgtttcatatgtcaataatgcttttcccttcgcttccaggccgtcaagacgactacgacgacaccatttgcgcagtttgtcgaagtgtgcgcatatgcgggcaccggaaatgtgctgaaggtgcagaaaatgttgcacatttgcacggaacacaccgacaaaaaggaggtgagccgaccaacaacaataaaaatggaggattttaatgcaaaataaatcccaaaagtggaacgggaacactagcgaaagaccatcagctgatttgtttttgcctcataacgtttgttttttttttgtcaaaaaagtttttaaaaaatcggtaaattcaaatagctctctcattttagtaccgaaaaaaactagctgaatgaataacttgcaaaaaagtgccgtcgggaagacatttatgcttatgcctaaaattttgtttgttttcattccccgaaaaatgccaaaccccccaaaatacttattttatcggtatttttgtaataaaatcatccatttaaaacaatttttgcttattatttgtttgactgttgtgaaattcagtgccgtgccggaccactcgttgaagcagtccatcgccaccatggggaatcgcactgattgcaatgggcgaggacattggctgtcagatgagcctgcgcatcttttctcaattggtcagtcagcaaacggttttttgcataagcaaaatgcattcatatacaaaaaaaaaggggaaagttttctacgcgattttctgggaaatttatttaaaaataatacattttgaaaatanaaaattgaatgggatggaaaactgagt

SEQ ID NO: 10206 - DNA, 3765 bp, Heterodera glycines
  unsure (1)..(3765): unsure at all n locations
ttttcctacaaatcgttgggaaaatctggcttattgttagaaaatttttttaattctttggggaacgaaaacgatctgggggaaatgaaatgcactccaaaattcattggcataaatatatgctttgttgcgcttatttgaccatattttcactttcgacagacgcgttacggtgacgcggccattcgtcgcgcggtgccgttggccctggcgctgctgaacacgtccaacccgcagttgacaatcatcgagacgctcagcaagtacagccacgacgcggacacggagacggcacggaatgcaatctttgcgctcggattggtcggcgccggcacaaacaatgcccggattttggcaattctgcgccagcttccactccaatgaccaggtaattattgaaaatgcagtaataaatgctaagtttagtgcagtaattagtaacaaggaggattttgtttctttgccactttttataaacgggtacttgggccctgacaaattccaccaaaagatatttcaatgatgatgatttttcatgtagagcatggttgatttactattgccaatttcggcttttttggctccgttgccgaaagtgatcagaaaaaatcgatcaaatgaaaattcaaccaaaaatgccttaaaatttagtgccattttttcttcttacgttcaaatgaccatttttcatgggtttgggggtccgttcggcagacgatgaattattttgatttttcttctaagtattattccacctagcatcttttgatttagtattttatttaatttttgatcctattataatagaaaaatttacgctgaacgtttttacaaaagatttacgaatcaagcataaggttggatttttaagaatttttaaaaaattaaccattttccaaaactttggtcgattttttctgatcacttttggcaccagagccaaaaaagccgaaaattggcaatagtaaatcgacactactctacatcataaaagtgtcagaaattaatttttccatgaatttctcttattttttaaaaacattattttgcataattgcacatccaaacacagaacacgatgatgctgctgcggatcacccatggactgatgcatttgggcaagggcactcaaacgttgaacccattccactccgatcgtcagttgatgtgccccgcaattgtgccatttggattggtgaacgaatgggaccaatgaaaagctgacattgaacatgatttggtttaccgatcgccctgttggggagacggcggcggttcgcagaccggtccatttaattttgctaatagttcagatgatacgacttctttttgaaaattttaaaagttaaaaatctgttcctatgggttttaacggaattcgcatgcagccaaaaattagaaaacacatttttgcgatcgccgaaaagatggcgccaaaataaattatataccgtatatttcagtttttttgccaaactactgttaaaaattaaagcgaacgtacaataagacgcattattgatttttttggcaaaatgaatttttgacttttgttcgacattcaaaaaaagagtcataccatctgaactattaatccatcttttattaatgttatgacataaattgcatatgaataatatataaacatttgctttgtttaattcattcaaattgccatgaacttttagccctttgtctccgcccggggcccggtcaaatcagctaaaataaactttttggaaagcaaaaatacacacaaaaaaataattcgatttttacaacattttattgaaacaaaatatttacatacacagaaattacatatacatacaattgatacagtttacatacaatggtgaattacataaaatggttacataggtggacaatttagttacataacataaacaaaatatttacatacaaaataattaggaggaggaggagggagggggagagatgggggcgggcgcacggtcttgagcacactgctgatggaagctgacgaagttgatgaacggtgttatgttcttcgcctccgacgatgccgccaccaggcactcatagtactcatcgcgtgtctcctcgggcaggatgatcggttggaagccgcggcgcatcagaacgaagttcatcagcagccgagcagtcctcccgttgccgttgaagaacggatggatgtacaccttagtttttaacaaatcttattttttagcaaagcttttttgggaaggattagcacattaacagtttatggaatttaatttagaaaattgtacaaaatatgaaaatttgttgtttttggggaaaaaaaacccgaaacttttgatttttaggatatattttggccttttttttgggttttaacacaaatttttgtgtttttttttcacatatataccgtatttcctaagatagagttcatgggtctttgtttttaatttgttgattttggcaaaaaacggaatttgctttttttttcgtcattagcacattttttgatgttttttttttatcatatgtgtaccgtatttttcagcccgtcaaaaaatgggggggggggtgtacttaaggaaatacggtatgctttgtttcagaatttaaactcaaaattcagattgccttgtaggagtgatctgattgatcacattggtgcaattggcttttttggtcacaaacagttataatagcgtgactttctgatgatttcgcaaaatttggggccattttttaaaataaacattaatgccgatagtatcgattctcaattttttaaaataatttattggttacaaattgattagcgatgaatttttgagcaaataaatcagctcaaaacacagtaaaaaatcaaattcgatactgtcggttcccttttatttatttatttttcaatttttctcacgagagtgtggtgcgcccgcgccgcaaattccccggcggtcatcgacttggcctcaagatgttgattgaaccatctgatgaagtcctgcattgctgccggcacttcttcaggtggcatcgggctcgaagtctccgaccgtcatgttgaatgtgcgcaagcagcccgcccgggagtcgcgtcggcccatgacttccaagtggagttcaaagaaggtctgcaaaaagtgttgtatttccaacggaagggcatgtgtaggcagcttttcaccttgagcgtgaactgctcgacctggaaggcgggcttcagcagggctggcagcagcttggcatcatcggcgaacttcgaataatgaatgtcgtcgtcgtcgtcctcctcctcctccgcttcagcttccacaacggctgcttcagcttcttctacattagaacggtgaaggtgccgctctcgggcttgcttcgttcctccttccttttcggcatttttactgcttgaattggtcatttttgtgctgtaggcaaaaaaaaagcgttagcgacaggcaattgagataataattattgtgtgctaatgctccgattccatttttaagcgattactgtagttttgtgccttttttagattttcctatcgtaattaaattgttaatttattttcatttcattttctgatcagatgttgaacaccggcatttaggagagtggtgtggtgaagacgattggatgagtgagagtgacgaaatgccccgcgatatgcctttttcaaataattattttcagttgccaagggaaattacacagtaactttcttgtactgtaataaggtgggcagttcaaagtgataaaatttccanaatagcttaa

SEQ ID NO: 10207 - DNA, 555 bp, Heterodera glycines
aataaaattaaaaattcaaggaaaaaatcttaataatttacatttaaaatatcagtttttgagtttaattgaatgtaaaatgcaaaaaattaagaattaaaaatgataaaaaatagtataaattaacatttaatatttgtcactttgtctataaattaaaaaattaattgcattttttggaattggtaacaagcacaataacaaagatattgtcttcgttaacagaatttttgattgattaaagaaaaattaataattatttatcatctgattgtcggtgatctttaaaaatttgtaaatacataaatagtttggtatttccttatattataatttctaatatattgtgtgaagaaaatatttatcatcggacatttaatgatgaaaacaataatgatgcacacagcaatcaattacaaattttggagttgaccatataaatcacacacttaaacaaaacaaaataaaataaaataaagggtcacaaaaactaaaacgaaacgcaaaaataattcaaaatcaacaatgatatgacattccaaatattgttataac

SEQ ID NO: 10208 - DNA, 5026 bp, Heterodera glycines
acatttattttttatttaaagtatatattaaatatacgaagcaatcaattcacgtattgtattaaaaaaacgtaaacgacacaagagataaaaaagagccaaaacctaaaaccgaaaaaaattgtttaaaacataaatgaaaaaaaaattaccaatttttaaacatatcaaaatatatattatcaggagttttatcataaaaatttaagatttaaacgctgatatgtattaaaataaaaagtgaaatttatttttagagtattttattcgaattcaagaggaattattgatatttatgcaataaaacttcgaatttttagcaaaattatttttcatttaaatcagaacttttttgaaaaaatcaaaatatttttattttgttaaatttgaccctccaataatggagttactatatacattgaaaggtggcggtggatcaaggttttctcgaatggttccgggtgtcgtgtgataacgagagcgcattttgaggcatatgcctttcttctgtgtgcaatagttccgatatattaagcataaaaaacgctgtttccgcttggtctgaagcttatacttcgacttttattttgcctttttttgcctttttggcattttaccgttttggtgtctttttggagttttttccgaaaaattccattaaacttcaataaaatcgggaaaaattcggtggtttgtaaataaaagtattttataaaaaatcaatataataaaatcatttattttttatttatttttatttttatgagagttgttgatcggtctatgtcagttcgtcccccacggttcggccccagcatgtttttccactatagctttctataacttttttctttgtaatccaaatccaacattgttggtatcattcgaaagcttaatctgtttataagctttttctaagctattgctttgcgatacaattgcgaaaaaagttatacattaaaattgcgaaaaagtcaaaattttcaatttttttcttaataaaattttttccaggcttgaactattcgcttttggtaggctaatagagcatgttaagagctttcgaatgataccaagattgatggatttggataacaaataaaaaagctatcgtggaaaaacatgctggggccgaaccgtgggggccgaatcgtgagggccgaactgacgggttccgttgttgatacctttttatacacttcgccaaaatactatttaatttgtaacaaatttaaaaatataaaacaaagaaaaaagcatccaagagatgaagttcattaaatacggcgttacctttaccataagctgcagcatcttttaatacgcgattaggttaattaaaagctaaaatataatattagcaacacaaaataaataagttaaacaatgtattttctatctattcgcaaaatatcttgaattttttcaatacagaaaaaacttttcaaattacatttgaaatatgatataaaaacatataattaaatttagaaatatttaaaaaagaaattgtttgatattaacactatgagacaacaacaatatttaagtttgaattgagttcatgaaaacagacggcaatcttcaattttatcatatttacactaagcattataaaattacccaatccaatgcgtgcgcagaagggccaatattcaagagaaataattaaaaatcaaagaaacttccaaaataattattaatattaaaatatatgataatgtaaaattaaaatgttttttttcccaaaattctttaaacagtaaaaaagcacaaattaatcaacaattagaaacaaaagaaacaaatcattattagatttttgaaattcaagaatatacttttaaaattgaaataaaattggaaattttttaaaataaatcaaatattaatgaataaaattgaatttttatttaaaaattcaaatacaaataacaaaaaagtgaataaaagaataatttgtgtcatcgcttcgcagagcgatgacgaagcacggaaaaagaaagaaagaaatgactaatcataaagcgaggacggaggccaaattgactgttatttaaccgccaccattttgccttttctgtcagttgaagcataaagagcaaatttgttgggcttttcaatcaataggcaaataatttaatattgttcatttaagcttgtaaaatttcgggttcctctggcggctataccagagaaggttcacttaatttattataacagtaaataagacgtaacaaagtggtgcaacggccgaatcctaaggcaaacagtttgtgtaaaataaaaagagtgcagtgggtgaaccattataaatgtcggaaccaatcagaatggctttagggataatggtcgagaatttaatcggtagactgaatgaacttctaccaattgtcagagcacagcagaggaacgaagagggattaaataaattgagagaagatagaatatttttaacagatttattagaaagaattgagcaaaaaaaccgtgaatgggatacatatataagagaaatatgagaagctcagaatgaggaaaatgaaagataccgcttatttacccacgatgggcgacatttttatgaatgggcagaaaggggaagagaaatggtcagcagaattaatattattctagctaatgaagatggagaaagtttagcagagagtgtgaaatcaataagaattgggcaaagagaaaaaattgaaacagaaggaaatggcgacaatgaaaatttacttaatgcaaatactaatttttttagaataaataatcagggccaaagaaatgggaatggtagtgataatgtgaactaccctaaggcaccatggccacattttgaaggggatccattaatgtggccggcattttggcaacaatttagtgctaatgctggagacaaaaatattccggatgttcagaaatgctcttatttacttatgagcctaagagggagagcagaaagagcagtaaagggttatttagctacgggagaaaattatccgttaattgtaagtactttgaaaagacaatttggggatttaaaggtaattagggaatcgcttcaaaatgagttgttgaatctaccgaccgcaaatgaatcagttatgtcactgaggccatgttttgaagaattagaaagaatttgtcggcaattgcataattctggattaaatgaaggagaagatagtgagtttatgttaatgacattaaagaataaattcccaagagcaattgtgttggaaattttgaaaaaggagaaagattctgggaaaaaatggaaattaggagagtggcgaagaaatttgaacgatgcgatatctttaagagaagaagctgcccgatgtactcggagcttaaatttaaatccaagcgaattcagaagagtttttagtatacaaacaagtggtcggaggcctggacaaaattctgaaaacccaagaacgggaacaatcccaaattgttttttatgtggtaagacgcattgggcagcaaattgcaaacaagttattggaagagaagcaaggcttagaattataactgagcaagggagatgtcataaatgtttaagaaaaggccacagtaaaaaccaatgtactggaaaaaattgtattatttgcaaccataaccatcacaaagtcatttgccctaagggtcaaaataaccatcgaactggagccaatgcaattgaattaggaaaccaaaataatttcagacaatcatctcgcatgagtactgaaatgaggaacgggaacataattgcattcaccaacgtaaagaatggcaaagaaattctattaatgacaaggagggtaaaaatatttgcaggaatgagttcagaaaggtatataacagtactattatttttcgatggcggcagccaagtttcgtttattacggatgaattaataaggaaactgagacctccgcgtattggtgaaggatattttggatttatttgcctataggcagcaaacaccgacaagaattattcacctaaatattatgtaaaggttgagttagaaaacggcgaaaaagaaggtataatagtgagcaggattgataacataacatgcaaattaaaaaggcttaatttaaagtcaggagagattgaattaattgatgaaaaaccagatattttgataggaatggcagaattttggaaattctttaagagtgtttctccgataacagataaattgtttcgggttaatacgacagtgggtcctatagtttgcggtcaattggactataattctgaaaccccacaatttgggggagttgttgcgactgaaaaatgtgaagaagaacctaaccagttttggaacttagagacaataggtgtctgggataacccggaggagaaagatgatgaaattgcattgaaaatgtttaatgaaacggttgagaggaaaaataacagatatgttgtcagttggccatggaaacggccaaaaggagaacttccaaccaatttttcggttgcgtatcgccgtttaataaatttgctaaataaattaaaacttacaccaaacgagttgaaagcactaaatgatgcgtttcaagaaaatttaaaggaagaaattgtagaggaatcaaagattttgggatttaatgagcattttcttccacatcattgcgtttttgcgtcaggaaaaaaccgaggattgtgtatgacgcatccgccaaaatcagaggaggtaagagtttgaatgagatgcttttcagaggtcctattgagatgccacaattgcctggacttttaatgcggtcacgtataccaaaaattgcattatgggcagatgggcattttggacattggaattaaaagaagaagaaagagattatgtaaaatttttatgggttagagaagtgaataaacccataacagaaaaaaatcttttggtactacgttttaaacgagttccattcggcgttatttcttccccgtttttattgggggccacaattcgttatcatttaaacaatatgaatctgaactggcgagagaaattgaaagaaactt

SEQ ID NO: 10209 - DNA, 1055 bp, Heterodera glycines
  unsure (1)..(1055): unsure at all n locations
tgatgaatgtgagttttacaaaaaatggcttgaaatcccccccccgcagaagcggcggaagaagcgggggaaagagagacccccgcggcgggggacaaaaaatggcatttattttgtcaataataaacaacaaaaaataaaagccgggggcggggacggcgcggcgggggcacaaaatgccaaagtcaacgcatggaaaaagtgtgaaaaagcagcagcgaggggagaagaagcatttgggaaagccagtccccccaaaaatggaaacacataaaaagccgagggtggcacttttattagtaagaaaatgggggagggggcggaagcgggcaaaatgccaaaaaaaacgggggcgccggaagccaaatatgccacatatttaattgaatgcttttcctgttaattttgataagtgtcgagtggtgccaatgtggataatgccatggagatgaatgaatgaagaagccattctgagaggaagtgccacaaacatgattcttccatccggagaggggaaatggcataaagatgaaggcaccccgaggggaaataatggcacgaggaggagaagccacacaacattagcaggcttttcctattaaattttaaatggatggaaccatcaaaatggaaaggatttctgatggataatggatttgaaatttgtgaggatatttttttatccggaaacaatactcaaaataatataaaagtccaaaaactgagtcttcaaaggccagaataattttgtacgatatgaattccggtcaaatacagtacccttagaccattggccgccaattgaccggcggaaatccttgccgatgcaaaataaattttttgggaagtttccaatttttgatacttcaatttttcgtaagttttgccgttttttaaatttttgacggtagtgttgaaaaatgtttatcgttccctttcctactgtatttttgtangaagacttcatgaatgatagggatactgtttgaggaatgatgaacaccnggcattggttttgttcattttatatactgtctctttccggaggggggggg

SEQ ID NO: 10210 - DNA, 4097 bp, Heterodera glycines
ccggcgccatatttttttgtttgcctaaatttggcattctgttagattaattgggcctcattgtcagctttgattggatggtagtcaggctagctaatcgttcaagatgcttgaaaagagcaatttttaattttgaaggctgtggtgatttttgaggtcagggcttaggaaatttcgaaattttttgggcaaggcgtaacaaactttctaatttttaatgggggtgggggtgagtaagaatttttgtgagtgcgcagagggctggctaaccaagtgtcaccaatttttacaactttgcaaaaaatgctttttggcatcatgcgttttgtgatccgatccgtcccacgcttttgcaccaacgcatcccattcattccatcatttattctccgactgttcaaattggggccaatttttgcgccggtgggtgcgtcccatgcggcggcgccgccgccgccgcactttcgtcgcccgatggcacataaaactttccaatcgccgcaaaaagctgtggcccaacacacacaaacgaacaaaaaaaagagagtgatcaaccgaggggagaaatcccacaattttctcccccaatccccctatttatacgcaaaatgaaacaggttttagggcaccatcggcggggtgatcacctcccccgccccgggggaagaaccgataatgtcgggggcggaacggcgcttcatctcccgacaacacataaagccgagcggattaggctttgctttgctttgcttcttcgtccctttccccccgcccccgcgggagatcaattaacaacaaaggcaacagccagcaggcagcgattaattaggctaatggaagtataatgattaaaacaaacattttgttgccccgccggcgggggaaaggaacaattagtaaaatgcgcaaacattaattaattaatgagagcaacaacaacaccaacaaaacaacaggttttcgtggaagaaaatgaaactttatttggcttaattagttgccaaaaatcacagctcagggattggtcagtcaattgctctaagtcaaaaaatattttttaagttaactaattagccagaatgatttcttagggcgggtaattagtagagtccggcgggatcgggactcccgcgggattttacgggagtcccgctcccgactcccgcttttttcagtgaacgggatttttaacgggcgtgggatttttacgggattcccgttcgggactcccgtcccggaaaattttgaactcccgatccgctcccgctcccggaaatttttacccaaaaacgggagtaaaaatgcactggtaagaattgagttttttggtaaaaataatgatttttcattgaaaatccgttaaatatatagacaaatttcaaaaaaaaattttcccggcggaaccttaaaatccttaattttcttaaaaaaatgcctcaaattttcaaaaattggctatttttggacataatctgacaatgtattgtattgaaatattcaattttttccctgcggcgcctatcggcaccgccggcctccctcttccaccctggtcaccaccaaaaagtttttcaaaaaataagccgcaaaaaattgttaaaattaataaagggagtcaacaaataaattatttaaaaattttatttgaagcaatttgaaaaaatactgattttcgacccataaatgtgattttttaatttcaaattctgcttactaaatttttctatctattttttctttaataaaaggattttccttcaaatttgtgcattaaaaatatttttgttagtttttaattaaattttcgaattactcccgctcccgcccgggactcccgtaaaatttctgcgggattttaacgggagcgggattttcacgggattcccgatcccgctcccgctcccggaaaattttgaactcccgatcccgctcccgctcccggaaatttttttttaccggactctattcaacaccattcgtgccgggccggctttttcgccgaatctgctgaaaaaaattgctcagaagcgctgaagcatgccgtcggcgtcagcaatcgaccaactgacaatgaaaagcaatcggaaattggccttggcggtgacggcattacttactctggggctgctggtgattgtccccttgtcgatgctgtcatggtttgtttttctgctgcctcactattttaatcaacttcttgcaaagaatttcatgttccatagtttgtaatagacagtgttttcgaattttcttcccctttcgtgaaaaagtggaacttggataattctgctttctctcctcaaaatttttatacaacaatatgaaatgcttctctgctcttaagccaaaggattaaatcaattccgctaaaattttttcgtttcctagtctttgaagcgttgcccggtgctcaactgtggtctcggctcaaatctgacccacgtcattgtgacctcaacgaggctccagcatgactggagcctccaggattggctccgccggaaaagggaagagatggcggaacgcttccatgccccacagccgccaccgcccggcttgccggaggaggcggtaatttttattattaatgaaaggatttatttttatttttttaggtgtgggtcccgccgcagggcgctgatggtggcggcggcgaggacggtgctggcggcggggacggcggcggcggcggcgccaatttgtttggcggcgaggtttttagtttatactttataaataacatgatattttttgacactgttgtgtgtgtattcctttctttttaggacttgctgctgcttgacgttgcccctctctccctgggcattgagacggccggcggtgtgatgacttcactcatcaagcgcaacacgaccattccgacaaagacttcgcagacattcaccacctgttcggacaatcagcctggtgtgctgattcaggtaaagcaacggcatttccccttttgattgtttctgtgtgaaaactgttcaatttgaggtctacgaaggcgagcgcgcgatgaccaaggacaacaacctgctgggcaagttcaagatcagcggcattccgctggcgccacgtggtgtgcctcaaatcgaagtcactttcgacatcgacgccaacggcattctgaacgtgtcggcgcaggacaagtctaccgggaagcagaacaagatcaccatcaccaacgacagaggccgcctgtccaaggaggagattgagcgcatggtacaggaggcggagaagttttccaagaggacgaggtgcaacgtaaccgtgtggcgccgccgggaaagattttggaaatttcattctgatttgttcatttaaatattgatttttttttgttttgaaaaaattggctggccagcaaagaaagttttgaaggcaataccatgtagcatgacgatgaaaaatactgccgatggtccaccccgctttggaaaaaagttttttctgttctaaaaagtcgtgaaaacacgttttatggggtttttagggtcgctgatcaagaatctgacattcattttgaccaatttccaatcccggaccccaattccagcgaaaattcccgattctcctgaatacactttgatgttctgggctaaacattgtgaacttgcttagttggtcaaagccttactgactaaatgggcataatcgcttagacattccaagcaaatgttttcgttgcgatgaaacaatcgaaggcttttgcctgaggcaatgaaaagggaaaagcaattagtggcaaagggactttctctgaccaatggactggtggacatcagcttaaggaacgaaagagaaagggaattttgagggtcgttcgttggcacttactcactaccggattccaattgttgttgccgatgatcccttcaaaacacaattagacaccaattaattttaattccttcccccggttacccaaacagtactcgcgtgttttcgtacgatccgctaacgccgtcgtctatgaacaacctgtcaattttgatcaaagatgccgcttgcagtccttcaacccactcgttgctacttggcactccattagcccctgctcaccatcaccctccacacctccattttttg

SEQ ID NO: 10211 - DNA, 5151 bp, Heterodera glycines
  unsure (1)..(5151): unsure at all n locations
ccgtgaatttgcgcacaacaatcggaagccgccggacttcccggacacagcgggtcacgctcgagcagtgccaacccgcctcggtcggcaccattcgcagtgggaagagtgccgttgagcgaggggaacaacgcgtggagcccagtggacaagaattgatgagtgagctgaaaagacaaattgaattttttattgtataattttattttcccattttttttaaatttggcattccgtcaaactatagtagaagatacaaatttttgaagaatttaaaataaggagaagaaaatttagaaaaaaaagtgagtgaaaaagagaacaaattggtcattttttgcaggaaaaaataggagaaaataaagatttaaaacagcgcttttggaacgaaacgccacataaataaaatgaaaaaagaaaatgaatgaatgacagtggaattgagcacacaaataatggaagagaaaagaaaatcaattggaaaagagaaagaacataaaagtccgcgttttccctatacacaacacacaacgaatgtgcatgattttggaaaattcaaaaatgaggacaaatcacaaatatgttaaaacattggacatccaaaattgaaaaaaaacacaattttctgagtaaatgattgaaaataattgctaaaaaatgaaaaaaaaattatggaagaaattgtaaaaaactccgttcgacaccatttagtagggacatacaaaccgtacataaaattcatgtctaaaatttgtgcaccatttatggtgttgtttttttctcacctgaatttgtgtcgtcgtttttcgaccattttggaaatttgtcgctgctcgtcgttgttggtgttgcatttgtggaccaccttttcgcttgtcaattgtttttgatcgctgcttcattcgctcacttttgtctgctaaagcaacgaacgcattaatcgctgatcagagacaaatattgtttgtacaaaaactaataaatgtaagcaaaatttttttttcaaaaaaaaatctaaattaaaaaattcattaaaaacttactatgtgaagaccatggacgtggtgaagcagcacttttaccaacattcatttcactgttggtgaacaaaaacactgacaaaaataagacgaagcaaaagtattgaaattttataataaaatttaatctgtcaaaaaagaaaattgttatgtattaatacatggttgaaggtcttacctaatatttcaggatatttttgtaagacaattgtcaaacaaataaacaaaattggaattccttaattgtgttttctgtttaaatttaaatggctttttttggaatttcaaagcttgcgtaatttaacatgcaaaagtcaaaactacgaaatgcataaacatttgttcttcttaagctacatatattgccctcaaaaaacacttttcttttattttttaaatgaataaacatttttattttttcgcttttttatgtatgtacaatttagcgtttacattgcaaatgcccggttaaatgagtacacctaattaggtaaaaatgaaaagaaaatcatattatgtatgtataaaagtataatttttaattctatatacatgaatgaaatgaaattctggaggaatacttaactttttttttttaattttgatattattttacgctatttattgttttaaattctatataaaataaatttgcgattattagtcaatcgcatgcgacaaaaagttgtcgcaaaagccaactcagaaaaaaggttttagacgaatcaaatacatttaagatttaaacctatgaattcagtaaataaaattggtctgaacttcaaaaaaaaaaaaactggtttttggtttctaatttttgatggcattgaaaattgcattgaattcgttagatttacacgaaaacttaatccaaaagtattgataaaaaaggactatcatttgaatagtttactaatgcgtatgattggctcttattccgttcagatcccacatttttttacatttttttcattttcaaataaaaaacactaaattaagagattttcggggtagctgatcacgaaacctacaacccatttctatccccggaccaggactcgaacaaaaaatcgattttggataaatgtgaattttggtgaaaatgaatgttggctttttgttagcattgggtccgggttagaaattgttcaaaatggatgtcggattcataatcaactactccgaaaaccaagtaattaaggtttttatttgcaaagtgaaaaaaaacactaaaaaaatttggggcctaaacggaatacatatgtaagagtccgtgtgatttgactttttaatttgtttgataatttggaaggaataaaaaatgttgggaaaagcacccaattttgtttacagattccgagacccaaactgtttatgacaatgtacatacatataagcgacgcctaaaaattcgaaaattagaataatttcctgacttcagaaatttctggaatttggaatttaagcatgccgagtcccaaaaaaactgtgaattttttaaacaaatcaattttgttcgataaggctatgtatgcacagatacgcaaaattttagtctcaaaatctgtacgtatggtgccaaattatgtcatgaggattcaatcaagaatggaactcttgaattgaatgctttcatttggcacccgcccttactctgcacgaaacatccaattgactttttgtatcgaaagttgacaaaatatggaaaagcttgaaaagtcgaatctgttataagatgtgctaaattagaatatgaaatggaaaaggtctcgttatttttacttcaagaattatgcaaaaaaatttatttaatattttcataaaaattttttgaattttcaaaggcacccattcgaatgtactaatttggtatgtttattagacttggtggggtaaagtcaaattagtatttaaaacacatacttgatgctaatgagtttctttttatttgtgccgaaaaaaatgcaattaattttttttttgcccttaaaatgtgccaattcagtatcattcattatttgctaggctaaatttattccgacttacataaaataaattgccgggtttaattaaacataaaatttctcgaattataaaatggcttaattccttcataaataaaaccgcaaaaagtgctgtgcaaaatctaatcaattataatggtttgtttggtgctggaaattttcgtagaaaaatgtttggcatttttccttagttgccaagacgtcgcggtttccaatcagtacatgtgccggagaaaactcgaactcatctgttgttttccgctgcttcagacccatcacggccgaggcgtaaaaagcgtccacaaagtgaagcaaaacaaaacaaaaacaaaaaatgccgaatttttcaatccaaaaattgtgccgccattttgtgcccaaaattgccgccgttttcagacaaatttcaccaaatcccgcaacataaacgggacgaaattgtgctgcaacagggcggtgttgcgggcattgaacagttggaccccacccaatggacgggcaatcaacgaattgtccattttggtccaatggcacagcgcgacccgttcttctatttctatccgaaaggctgggatttgctttatcccgctcagttcggcttcttcccttatcggactaagtttgtgccgaccgaccaaataaaacgaatatttcgtcaagaaaaaatatcgaaaaatgtaaattttttgcaccccaaacattttttcagcaaatntcttggcagttctgcggtcgtttgtgtgtgggctttcggcatttttttgttcctcggcggcattctgatgatttatttgggctattttattgaatacaaaaaacncgttttggcgttggactgttgaagagcggcaaaacactgtattttcatggatttattttttacaattaaatttaatgatataaaatttaaaattaaatgtgccaaatataaattgtagatggttccgcccgttcaaattgctggcccattgttggccggcaccggccattttgctgctggtggttggcatggtttgctcagtcagcaattctcaggntgtgtatgtgtgtggtgttgtgccgcggcaatttggaaaagcccggtggactttaaaattgccgatggccgattactagagccttaaatttgaaaaaaaaacggggtcgggataatcccgagtttgtcgggatcccgatcccttccgggctctatcgattaccacaaaaaaaacgtttttatccaaaaaattttgaacaacaaatccttgataaaattggtggactttaacagttcaagaaatgatgatttgaattggtaaaaagcgctgggctttcatttttaaaaatgatcggccctcaaatagccgacttttttaagtgcccaaatgtttgcctatgccattggtattaaaatgactaatgttttacaaaatcagtctaaatgttaaagattttgcatatcttggccatttaaaatgggaaattttttttttaaattacaaaaaattataaaaatgccattgtccattgaatttctttcaaattttgcagtttctcagtgataaactgcgccatcaccaccaccgtgatcagccagcctcggtcactgtgtacacaacccattacaaagtcaaaaaaaaactatgaaatttccaccaaaaaaaattccggttttagcagccccgtgccacctacgaagtcagtccttatcagccgttgccaccgccggccaacccagtctatgtgaatccaaatgcacgaactcatctgttagacccgaacaaggagctcaaactgttcccaccggtgtatgagaatttttgggattttttttttatataaagggctcaaatggactaattgaggtggttggaccccatttcggcattggacacttgggtatcaaacaaaaaatacactgtttggggtttaaagagtcactgatcagtgatcaagagggataggtatgtctgatagagagagagagagagaatggagagagagagtcatgggggagagagagagaatgagagaggatatggcagagagagagagagagagaggcccttaaagggaaggagagagagagagagagagagaaagagtct

SEQ ID NO: 10212 - DNA, 1367 bp, Heterodera glycines
  unsure (1)..(1367): unsure at all n locations
gcattattatacanttttgtccaccaaaatttttttttcttttgttgcagcaaaactgtagtcaaatcgaccaccacaacaatccgtcgccagagcagtgccggcgacagcagcggcggtgccgacgcggcgccgccgccgaggggcggcgccggcactcgcggcagccggcgcgagggcggcggcatggtggtgatggcctatcgctgactcaattgtttccccatcatggcacaatttttcaatttttttttcggcatttcaaattaggcaattccttctacaaaattttcatgttccatgcccagaacggagagagaatgcaatgccatttttgctcaataatatataatgttaattgcagtggtggttccggaggtccaaaagggtttccagattatggaattcggatttgctgaggcatgtaaaacatttttgaaacccgaattttttttttttaaatagccgtgcaataaaccttttaatattatttttctacaaatcacaaaatatttcagccatttaaaaaccaatttttaattaaataaaagaaattcggaattttcatcaaataatctgatcctccaaattccggccctgaaaaggtccgaaacatggcaccaccattgatttgttgttaatgctttagtgtgtgccataatctctttttgcctagtgccacattgtgttcttcgtttgccttttctttgctcaattattttagttttcttccaaatctagtcattttagtgtttattttattgctttttatttgtttgtggtcataagagcccgaatttatgtgaataatccaacagattaagccgttttttttgggggggggggctaataaataaaaaatgtctcatttgaaatgaatcctaattttgtaaattatttgtgaaaattgattttctttcacaaattggcctttaaattgttattcctttccattccatgaacaaaattgtatgcatttttaagcatttgaaattttattccatcaatatttttgcatttttgactataaaacaagcgcaaaagcgagcgccgttcgtcatacaataataataaataataattaatattaaatttttttacaaaatttgtcattttaggcacaaatctgggctctatgatcatttgcaatattttgtttatcaattttcattttaaaatattattcattatcattttcctttaataatagtacatcctttgttgggatttagtctttccttctcaaaactagaggttgattagaagaatatattcgtcgcgattattttaattttgttgtgcctttaaaaaatcaaattgatgcaaattatcaaaattaatttattcgtttttattttcgacctgca

SEQ ID NO: 10213 - DNA, 2097 bp, Heterodera glycines
tattctattctttgttctgatcagtagtgatcacccacaatagtcgcatttgtgcaagaaaaaaacacaaagcaaacggacactttcactactcattttatttacagcaaatgggtaattaaacagttaatatatacaaaaattagaaaaatgaattgccaattatatggatggagtggtaatctcaaattgatatgcaatttcaaaagtgatttaacttttggctgatgtgcatgatgaatcccgaaaaaatgttcgatttaactgaactccgtgtgaatcgaactttaaaatatttttgttggtccggactgtgaaccgtgcgtagcccgggactcatcagggcccattgtcagtcttgaggccattctcggccttaagcctcagaaagttctcaatctcgagaagtcaatgcttcgaaatgatcgctcatttctgaacagctaattagacaaaattagaaagcaatgatatgacaaaaagcgattaaaagtagtgattcagaatttatgaaacaacaaaaaaaggatggaatgggaaacgaatgaatgaatgtctgatcagtgatcacattgtacaagaaaaagcaaataaaattctcataaaatcataggtcaccgtcaccaaaacaaaaggtcctctcttttggtcgttatttttgtggcttttcgtcagctaattgcgcagtttccgttgttccgagtgccattgttggaggagggagggaaagtgccaccgccgtcacgggaagagctgtccaagggaaaagtcacattttggcagcataacgaaatcctagagatttctaatataatcaaatgacaaaaaattatttaatgggcaactgggaaagaaattgcactcaaaaatttgttcagggtgagatgggagccgacgccccccccccaaaagaaattcggcaattggaatccgaggtccgagccaaacggaacttggcattccgacccatccctggtccgttccgttccgtggccaagttgctttgccaaatcacttttatttatttgtcgcttaaattgcttttgctctgtcccttttcacctttcgtattcttcgcgttgcaattgcgcagcaaaaagggcgtccatttgttcagcggcactttttgaggagacattttttggctgaaaaataaacaaattaaaaaatcaaataaaatttacaaatttccatttattttttaattttatttttacctttgtcgtccgatgggaaaccattggcctaaaatatgaaaatggtccgttattgattttaaacaaaaagtgccaacattttggggcattggtggtcagattggtgccgatggctgaggcagaaatggacggcacattctttgcaaaccatcggcacgagctgcgaaagttggcaaatggggaaagcatttatttttttatttttgcggcatttttcaaattgccgaaattcacctctctccggaagcagttcttcacgccgcatttaggtgcccaacgtcccttttttgccaactcagaacgacagtcgcgttcgatgtgctcattgactcgcaggtcgggcttttcgccacgtttaattggcaccgtttgttggcacaacggacaaatcggaaattggacattctgaaattggtaaaatatgaaacgtaaaatggtttttgcaaacattgcctttttgtatgactctgtgcagccgtgggagtcgtacgttctgtgctgtttgcttaaacaactcttatttgttaattaaatcaaaattcattatgggttcggttggcatcttcctttaagccaaaaattcaatttttttaatacgattggcccaaaatgaatctctcctccgtaataccatgccctatgaatttaccataaaatgcgcgaacaagcatcgcaagtgatgggcaaatagtctaaaaatggtgggcgtaaatccatgccgtactcccccgtcccctccgtttttctcaccgagttgtcgacagtccggcacggagcaatgctttcccgaatcggggaagtcggccatttctgaaaattaaaaatgatgaaaacgaggggaggaaacagcagcattctaataaacaaaaaatgatgacta

SEQ ID NO: 10214 - DNA, 1988 bp, Heterodera glycines
  unsure (1)..(1988): unsure at all n locations
ttaaattatttattttaatttaatttaattttaattttaatagtaaataaacataaaaatttgcctttctctgtcaaaatgatacaatggaataactaatcaaattgaatttcttcattaattccaaatttaaaatgatcattttcacgacattaattaacataaaatatttattcatttaattcagagtaaaaatttttgctaattatttattttcatttggcataaatcagttgatcgaacagtaattttaattaataaattgccacttccaattaccattatcaattaattaagtaaactaattaataatcaaaaactcctccagggtcattcagtcctttgccgggggcggcggtgaatggtcgccaaaacgcataaaaataacatttccctcccccgccacggcaaacagacactttttacgttgtaaatttacactcgcaatacaaaaaccatcgcccctgggctcatcctgccacaacaacaacaacaacaacaaattggaagaggaattgaaggccgttgggttggggagaagagaaattatccaaggcgacggcggggggggggggggcaaaagtgaattttggtggagttttgcgtaaaatcatttgtatatttgccgtgttttttattttaaattgtattatttttaatttattttgtctacgcaaagagcggcgaacgaaacggtcagtcattagtcgctaattgactcattaacaattaattaccccttttaataattgtctttcctcaaatttacaattagtccacagcacagtcacttttcagcttccgttctgctgatgtttcaccacactttttgcacccttttaatcctcacactttttgcccttttcattggcaaatgtttgcccactgttcaaccaaaacaacaacaaaaccaacaccattctcgagaacagacaaagcgtaagtcgaagaaagtgccgaccaatgattctcattctttttgatcactgatttgtgggtcgcgtccgtggtattcttgttgtcttattgttaggcttggttctgctctatccccccccccccttcagcttatcttctcgtttccgttttccttctccattaatccctgtatttttttggatcccatcattcaacactactcattaattaattaaatttaattaattattaaccttacttttaataaaatataatttatttcgaatttcccctttcccaaaggctttccttcgtcccccgtcggccccgcccgttccgtcattcgtcgcgcaccgttcatacgcccgcagaacgaacaaatgcacacaaaaagtgcgccggtcgccgccgcttttgccgtccatccgccggcgattcgaccgccgaagggaatggcaacgaaactgaaccaagccaaactgaaggacttcttcagtcagatcagaatgaagttgcaaaaagcatgacgaagcagcagcaaaatggacaaatttgatcagagggggcgaagagaaaagaaaagaaaatgatcagaaaagtcacttttgcaaaagttcgattgcacaaaacataaataaatctttcacaaattaaaataaaatacagcataaatatattttattaaattaaaatgatttaaaaagggttgttgtctctttgttctaaacctggtgaattcaattgttaattttattaataattagggttgtaaattatatggattaacatattttttctgcgcatatgctatgaagaaaggggcttaaaaatagcatttctgcgttaaaattttttgatttggtgaaggtttttagtccatataaatccatattnttggggggttttcgggaataaatccatatttcgnccatttttggngtttttagtccatattttggccattttttgggaaattttcacaagaaaaatgaaaaaaaaacgaaaaatacacccctanagatcaaacttttttggaaatttttaaaaattacaccccacaaacacgaaaa

SEQ ID NO: 10215 - DNA, 2637 bp, Heterodera glycines
atataataataagcatttaatatcgtaaactctttagaatgcaatttagccagaagtaatttatgtttcgatagccctaagaattctctattgatatttaaaattttagaaaatttcattgagtttcaaaacagttctgaacaaaaaatgctgacttaagattttttgcaattttgtgaccataacttcttttatacttaagttaaaaatataagaaaattatattctgaaagagaacaattaaagctattgaatgataccacgaaatattaatttggttgaatttgagccaggctattaatttaattattttacccattttttgttttcaaacccattgtcagttttaacaaacgcgcatgggtggcagtttttaacaaacgcgctagcaccccagggatatgacttcagaaattttttaagccgtttgaattccgatttaatgccgaaatttgagatgtcggaattccgcttttcgaaatgagggcgtcggcaaacatcctgatttgtatgccttgtggctttgcggtgctccgtactcacctgtacggcggtgggggcgctttagcgccgctggtgcccaggcggaaggcggcgctgaagccgccgtcgtcggcatcgcactccgttggacgcatgccggctgtcagcaacacgcgttccgggtcgccgcgcgtgatcagcggggcagcggctgcggtactgttgccaccggtgccgttggccgcggcacggctggcgcccgctgctgccagctgctggtggcgccggaacgacgccggcgagtcgcgacgcgcgcgcacaactctgtgccgataagtataatttatttttttttaataaatttgagttttccagagttggaaacaacaagttcctgtatcgaaaattcggtcctggtcaaagatagagtctgatcccatcagaggcatttcatagactgaaactattcggcactttatttcgagactctcgatccaggtcgctctatatgttgatggatcattgaacttgaagatattagacacagatcactttcaaagttatgatcggcacttcattctgagactctcgactcagatcactttatatgttgattggaacattcaacttcgagattgctgacccgggaccagagactcgggtcactttcaaggctcggatcgacaattcatttcgtgactctcgattctgatcagcagaaaggagactctgatcactcacgcacgcactttttgcatgtgatcagacaagcagccaccatgcacaacagcagcaacccgcacatgcaactgagcacgatgaaggcggtgtagtaggagctggacacaaccccctgttgggaaaatggaaatctctaaatttccaaaaatccaaaatcaccgcatgatttggctccaatacgccgccttctccgtccgcacaatacgcattctctttgatgccccatggacagtttttgcagtcggacacctgctgccgagaatggaaggaataatgaatgacaattaaatgatgcaattaggcttaagccccaacccttcggcgagtagagaaaagtcggggaatcgaggatgaaattcaccgacaaaatttgtcgtggatttctggtggaaacttgcaaaaaagtcttcgaaactcattcacagcaaaaaaataaaataaaataattttttatttgtttttaaataatttttatttatttttaattgctatttggctatgatcatttgtcagaaagagtgatcaaattgtactgtatataaaaaaagcaagtcaaaaatgattgaattttagttcctaattcggaaattaaatttttggaattttagcttttttctatgatatttttaaatcaaatttgtaattaatttctttaattggtctcgaaataacaaaatcatgtctcaatttctgaagggatcagcagctttaattttttttaataaaaggaaaaaaaagtaaaaaaaattttattattttttaaaatttttattatttttatcccacctgttgctgttgcccaatgcctccgccgccaccgccatttatccatcggcacaatgagaagaagccggtacgacgactttggcaaattgccgtggacggattggctgctgagctgttgcatgccaagtcacagccggggcccaaaagtggtccacgacaagtgacggagaatgccaatgacagtctttttggggaaattaatggttggtacaaaaagtgccacggaatgagtaagaaaaagagaaaaatgccaatgaataatggaacttggtaaggggtggccggggaggatgtgtaaaacgtcaatgactgcctttttggataaattccgtggcacaaaaaatgccaggaaggggtgggggagcggaaaggtaattgccaaaaaaatagtgccaaatattttgtcggaatgtgccataaatagggtaaaatgccgccataaaactttgcgttgtcgagacttatttttctcgagacttttaggctatgtagtgtgccaaaatcgaaggcagggcacatatttttgaaaaactatcccaaaacgcactgtgtgccgacgagtcggccttggagctgtacatggtgcatctgctgttgttgcagctgcccattaccaccaccgccggc

SEQ ID NO: 10216 - DNA, 1583 bp, Heterodera glycines
agagatagccatttttctggaatatctattaaatataaaaattatttgaaaaataaaatggccatggcgcaccgcacttcgtttcatgttcgagagcgtttgttgcatagaaaatttctcaaaaaaagagatagccatttttctggaatatctattaaatataaaaattatttgaaaaataaaatggccatggcgcaccgcacttcgtttcatgttcgagagcgtttgttgcatagaaaatttctcaaaaaaagagatagccatttttctggaatatctattaaatataaaaattatttgaaaaataaaatggccatggcgcaccgcacttcgtttcatgttcgagagcgtttgttgcatagaaaatttctcaaaaaaagagatagccatttttctggaatatctattaaatataaaaattatttgaaaaataaaatggccatggcgcaccgcacttcgtttcatgttcgagagcgtttgttgcatagaaaatttctcaaaaaaagagatagccatttttctggaatatctattaaatataaaaattatttgaaaaataaaatggccatggcgcaccgcacttcgtttcatgttcgagagcgtttgttgcatagaaaatttctcaaaaaaagagatagccatttttctggaatatctattaaatataaaaattatttgaaaaataaaatggccatggcgcaccgcacttcgtttcatgttcgagagcgtttgttgcatagaaaatttctcaaaaaaagagatagccatttttctggaatatctattaaatataaaaattatttgaaaaataaaatggccatggcgcaccgcacttcgtttcatgttcgagagcgtttgttgcatagaaaatttctcaaaaaaagagatagccatttttctggaatatctattaaatataaaaattatttgcaacataaaatggccatggcgcaccgcacttagtttcatgttcgagagcgtttgacgcatagaacatttctcaaaaaacacgataaccatttttctgaatctctattaacggtaacgtttcttcgtacgctagtatcaccagtggcggcagcccggctggcacccagcggaatgtggcacggcaccgccgctgctggtcagcagaggttggataaaagtgtccacaacagtgacagtgttcgtctcgtacagcgagccgtccatgttgatttgtgggcccaaattatgcacaacgacggcgatggcactctgtgcgtggggtttttttggtggttcgagtccgttgtgcaacatgaatatttttatttatttttgtccaaaaaattaaaaaatgacgatttttaaaaattatttttggaggtttttaccaaccaaactggacaatcttgtaatcattcgaaagcccttgattaggagaagccttttctaagcaaatgctaaacgatttgatgaattcgaaaaaagatatgaacgtttgaaaatttgtttttcttataactcatgaaataatgtataagccgaaaaatggctgtattactgaatgcgttatatttttctctatcggtatgcaaccatttgaagccagatttaac

SEQ ID NO: 10217 - DNA, 1486 bp, Heterodera glycines
cgacccagtcccccctggtctataggagccgctggtaaaaaatttgtaatttttaatgagatttgttaatagcctttttgtccaaattgatcaaattataataattttgaatttttttcgagtgcttatttttaaggacattttgaattaaagaatttttttcaagtgatagggcccaaatttcaagacgttcttgcctcaaggacgaatcccatccctactttaaacagatcaaaaattaatttaaaaaattaatgcacgacaaatgtgcgattttggtctttttccatctatttcatcatcaaatgttatcccaatggaaacttccgcactcccggatatggacgaactgcttgataggcttgagaacgaaccccttcaacttgtagtagaattgccagctcaatctgtggccatcaaaaacgagttttctcctaacagtaacagcaattcggatcaacaaaactcaataatagaacaagaacaacaacaacgagaaaagcaagttggggtgacaacatgcgacaataacgaagagtctgacagaaacctccaaaacatcgtaccaaaaagggaggagaagggtgcatgccttgaagcacatggtcaaattgtgccagagcaagacaaggaaactccaattcaattccaatgtctaagacttgttcatgacggacaaagcgaaaatcgaatacatacggcagaagtaaatattgtaaacaaagcgtaacggtcaattcaaaattttaggaatgcatattagcttttaaagatggatatgaaacaaacaaaaaaaatgacgaggatatttttgaccaaattgatcagatggcagcgcaaataaacgcggaagaattggaccaagaaattgaagagacacgtgacgaagaaattgtgaaaaaatctgatcttggtaagccattgaagctgcaataacacacttataagaagaatcttcagaaagtagttattatcatgatacttttcctatgaaaagtcaatgtcttgaaaaatttgtggaggaaatggtcgattcagttctacaaagggtaattaattcaattttcattttggtattaaatcaaaggaacaaataatttaggtgctggaagaagcgatcgatgtaaatgaaaagaatgggcaaaacccaacagaaataaaagaagaaatggaacaatgtgatggagaaacggacagaggccaaaggaaagccgacgaagcgcaagaggcaagggaaacggaagccgaaaaaggtgccaattttgaatgacacaaatttctgccaaaaaacttattttaatgctctttcagtgtctgatgtctcccccagtcggcccctctctcctcctttgccttcctcctccgcctgcccctcttcttcccattctcaaccatttacttctcaaacaacaagccaccgaaataattgcttggccattgtccacgacctttccattgctttggacgagttcaaactgaccgaaag

SEQ ID NO: 10218 - DNA, 3500 bp, Heterodera glycines
gacctttccattgctttggacgagttcaaactgacggaaaggaattgcagctcggcaagaaaaagccctatggtcaaattctttgccttttctattgacatacgtttccttccgtttttaggattcctgacgaggaatgcttggattgcatgctctgcgcaacgcgcttttccattgtcaatcggcgtcaccactgtcgcgcatgcggaagagtgagtcatttgcattttgtaactgattttattttaacaacatcagaaattattatttagctaataattaatatagcaatcgtttcttttctcctaatttggggttttcaggttctctgtcgtatttgctgttctaagcgtcgacttctcgcctatatggacgaaaaggaagggaaacaacgcgtgagataaagcaaatcaattaatttaaatcatttaaacaataaggtttgtattccatgcaatcggacattggaccgaattgtggaatatgaacaccgaatgaattctttggaccaaaaggacaacgctaacggcgagggaatgggtgaagaaacggagcaaagcaaaaataacacggtatccgaagcgacacgacaacaagcggagcagaaaaggttgtacttgtgatttgtttttgttttacctttccccaaagtgatgccgttgcccattctcttcgccaatccgctgattttgccccgacaaattgtgcaccgccgcgtccaaaaaagaagtctctcctgaagcagtccgctgttgctcctcccaccatcgtcactgcccatcggacggaagtcgctgctgcaaacggaccggacaatggacaaactttggagcaaacgcggccgatagtgggccattgacaagcgataacgaattgataatttatcttacaattagtcagtttcgatgaccaactccaaacggagtgtgacgtttcgggacggcgttaacccaggccatgatggaaccacgcccaattcacagctgtccggacaaaacagtaccaatgcggagtgcgtaattttattaaaatgcaactaattgccctactttgtcattttccgcaggtctgaccgattggttgcaggtccatctctgtaccaatggttggtcagtgggagcgaccgaccgaactcgacagatggccattctcttgttaaaaacccattcattccaatggcggccaatggcacaaatatttcgccaaacgacaacaaaaaagtccgtcatattagtaaaacggagcaatccaatttccatcgaacagttgccacggaaaatgtccagacggtcgagggaaaagcgcatggaagaggaagcacagagtttactaattttaaaagccgatacaaatcaaacgcaaaatgaatgccgaatttggtcggttgaattacgcagtgatgggttcgaggagttggtgaggcgagaattggccgaagttgcaagagaattgtgcgacacggagaaagagagaagggaatggacaattgcattgcgacggaatttccatttacgcattgaacgcgggagaagtgagtccatttccattttaatgtttcttttttcacggtccatttttcaattcacagtttgtgccgaggaccaattcccaactttggccgtttccactcgtggcttggcttcactcggcgtcgatgaactgtttcttgcgtttcactttgacccctcaatttttgcaccaaatgaggtgagtttttacggaggtaataaaatgcatttcaaaaaaaagttggacccaaaatcggacctattggtactgctgcaacagtacgaactgatcttccagcagtggtttggtggacccgcaggaagtccatcagatcgaccataaaatgggaatcagaaagtagacattgggcttttgattttcaattttattcattttacttcctcaatgtcagatgcgtttctcggatgactcggctttatccatcgttcacaaaggatcagtcaatatttggccataaagcagcggcacttctgttccatcgtccacacttcaaacaggtgggcagggacagttgaggtgttgggataagaagtactaatttatcttatggtgattccaattagctccacagttatttaaaaatgttatagattttgaacagacagtatgtttagttaaataaaatgttgttattagaaaaccacagttccaatttttgcctgtttagaattttgccaatttccgtccgccctcccacccttttcttattggtgtctttgtccagaaggatgaacttcctttggccaaatgtgtgccgtgtcgcctgcttcttcgccttggaatgctttatggcggtaagtttcttcttttaattcaacaaaattctttttgaagggttttttcaaggaaaaatctgacttaactttttttttaaaaaagaatttcaaaaaatattggagggtcgagggagatttttataaaatttttccattggaattttcttattaaaattttttcaaatttcttgaaaaatttctgtttgaagaattaaaaatatatgcctacttctagaatatcccttccccgtggtaaatgtccgccgagagcgtcccgttttcactgccaattctatccaatccagcgtattaaaggtatatttcacaaatgggttttttagtaatttgttcctcctcttatctcttacctaaaggtgctcaatgattttcgtttttggtcctaccgaatggcgcgtctttccggttgcattgttgcaattcgtgaaacaaccaccgtcatcattctgtcttcttgggctttggatgacattcgtcaaatagtggcgggcaatcgcaatatggtcggatgggcattggaccaattgagtgctgcagccgacgcggacgaggaggacggagttacggaagtgagtggagggatggatggtgggcttgtgcaatgaacaaccgaacatgttgggtccttgtcagatcgattcccatttggtctgtgtccaagaagaaaccgacgacggagtgacgccctctttcagcactcgcgtcttctccagtagcgaaagcaactcacaatcgacgccaattacgacaaaaaagggtgaaagaattgtctaaatacagttgcattagcgatataaacaattgggtttcttcagtcattggtgtttcatttctgatttttgacggtgcccttcgcggcagtgaacagctttcggtcagtttggttgaggatggactcgtcgttcgactaaatgccgatctgatggaggtactctctttttttcttccaattccaaattttatttacatgttagtttaggcactctgatgctttttctatcaaattgggagatgaataaaatttttaaaaatttttaattcctttttaaacaggccaaaaagtttaggcttaactttttagtgaaaattcaatcactcatttttcgagtagtgatcagaagcgcaccagatttgagagggcctaaaaaggtcaaggaaaggcgtctctgcgttgat

SEQ ID NO: 10219 - DNA, 2278 bp, Heterodera glycines
  unsure (1)..(2278): unsure at all n locations
ttgctttgcgagtccatatcgacggcgaagtgattcctcacaaactgagaaatgggtggnattgccggaacaacaccttgggtggacggtgacacttgatgaacaagtaacactgatgacaaatcacccttttatacacatatattcatttttagcttatcccttttctatatgggctatgttcctggttaccaagcgtttttttcgttgaattgcacacatttattgtgtccactcggccgcttccggctcttactgttcctgacagtcccggcgattcataacataaaaatcacaattctgtctgatttaaagtgaccgaaaatagagcccggaaattttaagtttgtggatcagctgcagtaggaactcaaaattatttcgagggaaaaggatccgaggattaatagatacaaaaatgacatagttttaaaataaaaaagtaataataaatatcgtgtactttatttcaacaataattgaggtcaatcaaaaacaatcagttctcccgtttcccttcattttcttttgaccgactgctagctgaaaatgagcaagattaaaattttagtttcgcaaaaattcagcgaaatctgtaaggcaccggtaaaatgcaagatcggcaaattaaaaacaagcaattcagaagagtcactttgacccgccccctccctccttcatcttatttacctccacttccaccactgcgtacggacggtcgactccgtttagcgggggttgtcgagggcggtgaagtggcatcgtcggcagttcttcgcggtgaatgtgtcgttgacgagggtcgttcagaacctaaaaaagcatagttaggagaagaaggaattggcccatcctcccataattgcgcaactcactcggtgctgtcaccgcttttcttgtcgttccgccaccaccaccgctggcggtcccattcgcttttactagagattgggttttctgtatgtagttaaagcatcataattggggcaattaatgaatgtttcaccgtcattttggtgtctgcgaattcgtttagttcccataatttcacattccgcttcgccagttgtaccaaatagctggacgccaacaaattcaaatcgtttcgtttacccttaaatttttgaatgaggagaatgtaaatgtcgctgattaggcgtaccttttcgttgtctctaactgctgtcacatgcttctcaattgaagttagattagaccgtaatattggaaaattggtgagaatctgtgcaagcaaaaatgaagttgaagataagttttaaatcattactgtaccttcgtcataaatgtcaaagcatttcgtattaaaacataattattttgttggagcatgaagccaagggaccgatttagtcgcaattgccatttgtaacagatggaacgaaaatagtcgtaagtgaactaaaaaaagtggaggtgatgtcaacaggacgagggcgttcacctcgtccgcagtcgctgtctcatcccggtcttttttccgaatttttgtgacacagcccgggtaaccttcgcattccttaaggcacaattaaattaaaatgtgtcgttctttgtttgtttgaaaaacgcaacacacttcattgaaaattgttttgctcgaatgccatcgcaaagtcatttccaacaacatagaacagtaacggccaaagcaatgcgcttcacgctcagaaaaccccgccaaaatggaggtgatgtcgttgaatagcttaatttggtaaaaatatataacatcgttccattttctgtcgcactttgtccatgaaaacaatcgtttgaaaatagcccgttttgattgtgtgtaatgtctcgaccaatttggcgcaataaaccgcctcaacttctgaacaaatcacccggggcaacacacaactttgcagaaagcgcagcatttgactcgtccgatcttttggtttccgaataaaataaatccctttcccattccctcccaatttacttggtgccgaagcaaaaaatgtgtccttttcggagaccaaaatttctttaattcgtttcacatgttctgtttgtctgaatgggtgataatagtttaaattttcggcattataatatttttcacaaatatgccaaccgtcgcatttcctcgctcagtttctgctccaaccctttcagtctctcctcatctttcactgtgcgtcgcgttgccccgccacgcgtggaagaaaccttttgaataaatggcatcgaataaatgcgattttccctttatattgtcagcccacttcgttgttcgtctgca

SEQ ID NO: 10220 - DNA, 5691 bp, Heterodera glycines
tttagctgcaaggcttagctcacttcgttcgctttttaggagtccgttgcgaatgttcgacgtccccggcattgacgcgccggtgatgtcattggtgtacaaagagcgatttccaaaggccaagcagcaattggagagtcgaatcctccaattcctgcagcagaatgcacccctaagcggcttcagctctcagctgcttcagccgaccatcgcttcttcaacgccgttggtgggtcctttttgagggtatatctcttcaatttcttccgattcagcgtgccacttctccccagcccggtcagccccccggtgccatctctgaccattcgtccgtctgtcggcctcagtcgccgctgcccgtgcgccctctgtcgccactcgtcaccgaatcggccactgcaattggcgacgcggtcattcgttcatcggctcatttctcctcccagggattgctctcaccgcaacagcaacgaccttttgtggaagaagcagaaagaattgaaggtttgccttgtcatcattcaatctatgcaacacaattcggaacaggaggagaacgggacggtcgtcaatcgtcgctcgccaaacattcgtcgcctgtttgttctccgtcctccaccacggttctgaccaccaccgaccagaacattcttcggctcatttccgacggggccactcgctttttgcaccaccaattgtgcgaaattgcatccgactgtctgcagaagagcaaagacggaatgctcagctgtgcctacttttgcaatatgtccgtcagattggacgaaacgttggcggaggtcagttgaaaacagtcaaatttaggacaaacatctgaaattatagaattaagcaactcaaataatgtgttttgttcaggctgaagtgaaaatcggacccgattcttacagctatttgactcggttggtcaagcaacttttgatgatcgtctcaaggtctggagatctttaaatactttaaatcctttaaatttgctttttagggccgcccgtttgttggaatgtttggtaagaaattagttacgcaactaaataattttgaaaggaaaaagaggagagaagggaaaagcggccgattgtgtagctcattggttaaaacaccattttggttgagttcaatgcccccatccgatgttttgttaaagtgccactcaaatgagacaatgattaaattaattggtcaagtaaatttatgatctctgtgattttgtcactttatgagtctcacaaaaaaaatcaaaactcagcggggatagtctttttattgtgttctttccactttcaggagtttgaccccgacgagttttatcagctgttggaggaggcggagggcgccgtgcgagttcagctcggcgccggctcggcccgagtgccggacttaccgcaatacatcgtttccaaattgggcctgaacaaaaacatccacctgctgatggaggacgaccaaacggcgatggatttgggagaagaggcagaagaaacaagcgacaaaaggatgacagaaataatggggacgaatgaactgatgaaaaagagggcggctgaagtgttggcacagggagtgccaaaagaggaggattttgagacagtgcgggtgagtgaagaggcaaaacgaattcactcttttttccatggcacattcaatctattcgtttgggtcaatttatggatttgacgatttggtatacaatcaaacaatgctttcagttgattagcaatggtgcatacggcgccgtttatttggtcaaacatcggcggagtcggctgagatacgcactgaagaaaatgaaaaagcaaacactgctgatgcgcaaccaaattgagcaagtttatgcggagagggacatcctcactttcacggacaatgtgagttgacaaagccatgggacggaaaaatgttactgtttcagcctttcgtggtgtgtttttacggttccttcgagaccaagcagcacctttgcatgctcatggaatacgttgagggcggtgactgcgcttcattgttaaaagtccctaaaatttgttttcaattgtaccaattcatttcagtccgccggaactttgcccatcgaattggcccgcctttatgtggcggaaacggtgttggccatcgaatatttgcactcgtgtggcattgtgcacagggatttaaagccggacaatttgctaatcacttccatgggacacataaaactgacggatttcggcctctccaaaattgggcttatgaatcggactactttggtgtcggaaggttatctgctacaggacgacacgcagcagttcaaggacaaccaactttgcggaacgcccgaatacatcgcaccggaagtgattttacgacagggatacggtaatgaatgtgaataaattatggccctaaaaaatattggtagaccagcaaattcactatttttgcttatttaaggaaaaccggtggattggtgggcacttggcgtcattctctacgagtttttggttggaattgtgccttttatgggagatacgccggaggcgttatttgccaacataattaatgaagacgtggaatacccggagggggacgaggtgctttactacaagctgaaatgttaattagccttttatttctttctttaggcattggattcggatgctgagtcgttgattcatcttttgctggagaaaaatccgctggaccgactcggaaccgtcggcggtgctccccaagtgtccgcgcatccgttctttacaccactcgactttgacacaatcttgcggcagaaggccgagtttgtaccccaactcgagaatgacgaagacacttcctacttcgactcgcgctccgaccgttacaaccacgacgccaatgagtcagcggaggacgacgacgcggcggcggtgccaatgttttggtgcgtctgtcgttccttccagtgattcatctcttgcctttctttctgtgaaggtccttctcgacggcatcgcctcggcatagcattgtcgggttggaattgcccgccgggggaatggcaatgcttcaggccgcccatgcagcagcaattgaacggagtgggcagccgctgcagcaacaagaccgaattgtggacgatgaccgggtcgagagccgcagacgactcctttcctcggcaaccaccgcttcttccggcattggcagcgggccaaactcggcattcggtccattgtcctctacacttttaacgcgtaagatagcatagaatttctcatttccctagtcttatgctacttaggtggtggcaattgctccgactcccaagattcttcccacgaaagtgccgttggcagacgagcaaccgctgctgcttctgaattcgcttgcgatgtgatgccatcggcagtcattctgcgacggcgtttctccaaccagcggcaccatacaaatgtttcgtcaaccagcagttcggctggtacaacaattggtacaacagcgggcggtggggtcggttcatcaacagacgactcgtcgtccttggacatagcgacgacgatgcatttagaacagccgagacggtcccagggacagttgccgaggtgcatatttttgcatatttacaacctaattgaacatgcttagacttgcaatatcaccatgcggtaccactttcaactcttcaactgggggtgccattgtgacacaccaacgggaaagtgcgtgtggcaccggcggggaattcttgtcgccggtcaatgaacggcatatcactgccggaggcggaagcggtggaatgaagcggatggagaagcgtccttccgccgttgtacacgaattggtaagtggtgaagaaggagcagttcgtccacccgctcttccattcgttaaccatttagataaccgatgtcgtccgtgtgtcctcctcctatgggcagtctttggcccgtcagtctcgctcctcttcatgtcgcgtcagtaacatgtctcccggggccgccccgtctctcaaattacaaattcccgctgttgggcttcacaatcagcagaattcgtcggccaattcgccacaacaaccgtcctctgctgctgcatccgcttcggtcagctcttcttcccaagcaacaacatattaccactcgtacacgggaaataatgccaaaactatggcgggaacacttacaacggacagaatttgtacgttttaattttcgtcttctgtgattcataagttcggatgctcaaaaggtgtgccaaattgtccatctggccaaatttcgccttcctgtaattcggtgtccagcacttcgtcttttgacagtcaaaatgcgcaaaaacatttgtccactgaaacggcgatgagaaagcaacaggagacaaattatacaggttaggaggggtgcactttacccccccccctcccaaaattctttcttaaaacaatcaatttttcttgaaatatctattgaaatttctatattgggaaatttctctgaatttgttgcgtcccctcaggtgctccttccgctcatccgtcttccccttgctcttcctctttgcttcccccgcccgtctcgtctctctccgtcccattgcatcaccgatccagcatttctggcggcgggtcccgcccaattgttattcggaaagggccccaaggcttcggattttccatacgatccgtccgcgtttatttgagcgaagtttgtgtcgtgtcccatttctttgatttgttttatcaattttctttgcagatgtccgagtattactccattgaacatattgtggccgctgtgcgcgagggttcgcccgcttgggaagccggtctccggacaaacgatttaatcacgcgcgtgcacacccaatcggtcagcagtattcacaatttccatgaccgtgtctcgcccaggtccacaacatgactcaccccgaaatgatgcgccgtctcctctcctgcggcaatgaactcactgtccatgtcgttccattgtccagcacctccataaaagagggcgaaccgcgtcgaaacattggcaaacccttgcgcaagaagccgcgacggccgccaaccgcacaacagaaaaacaaacaacagagtcgcaaaggttctgcacttctgcgacgactcagcggcaaacggacagtcggagacatcgttccaggtgggttaactttggtctatttttaattgcattgtgtaaaaaatcatctttaaacaggcacttcgtctcagaagcaaatgttcattccccgttccgtgtcctcccaagaagggagggctcaacttttcaacagttcgacttcgaaattggagtaaatttgtatattgctagacgtttattcttgtacttcgggtaatttttggattttctatttgaataaatttgaatgtactggtctatattctgtgttgtttggttttatggagccatgtctccttttctcttacataaactgctgtcccataaattcaattactttttgaactgggagcccaaaattaactcgggttaaacaggaaactgcggtttgacgttgactttctgacaaattagttatgacaactcatgcatcagccacaggaaaaaatgttgtttagaaaatctcaatttattttctgtcacatagtgcacaatatcaagagaaagttggagtgtactccggaaacattaataaaaaggaaaaataaattccgtgtacaataagctccgaagaggaggg

SEQ ID NO: 10221 - DNA, 5869 bp, Heterodera glycines
  unsure (1)..(5869): unsure at all n locations
gggctgttcattgggcattttgtaagtgtttggacctaaaaaattccatgcccggcatttcgaaagcggcagagggacatctgcgatntttcggaaggggtggcataggcgggagtccaaatttccttgccctatcccttttgcacatattggggtgttcggaaagttctttcatagcggacaaaaatttatttgaaaattcataacatattaaccaataaaccaattttaatcaaaatacgcaccattattctcgaccatcttctcccatttgtgagattttaaaaatgatctatcgattaaattcaagatagttagactcaaataaactgatgggtctacttaaaaaagtggacaaattcaaccactgatttcttggccaagaaaaggctaaaggtacaaaacaaattatggttttgtagagcaaagttgggactatctgacaagctgaaaaagagccaccaagaccgacgggttatttttttaaattgtcctgtctgaaaatgggtgctcaaaagtgccaagattcagcatccactttgtacaacattgttctgaaaagacataataaaatgaaattgatgttttcattggcaaaccaaacccggagaatgcgaatatcgcctcagatttagtcagttgctgttctatgaccctgtactgcttcaacttcttgtcaacgacatggagcagtacaatgccagagaaaattcagagatcaaatctgaggccagatttggattctccggacttgatttggccaaactgcttttaataaatttccaactgatcaaagcaaagttttgacccgtacaataaaagtgatcggatttgggattttgggtgctccattgggataattttaaaaaatcaatttacaaagaaaggaaaatgaaatggctcgtaacatatgcagcaaaatctgctccttgccatagaacagaaagaatttggccaaaggttgcggttgggtgctaaaaaattctaatttacataaaacgaccgctatgaaagaactttccgaacacccccaatatanttatttttatgataattgagtggcattatttaaataagattttttcttgctttatatgcaattttatttttatttttttttgtttaatccttcattaaaatattagataattatttaaaaatgttatttttttattcgaagagattaatttttataaattgcttgcgatgagcaaaaaactgggtcgaatagaggcgttaaaacgaaagtttttcgaacaaaaaatgtgtttttgtgcatttctcgtcgagttcaagccgcataaaaaatatgtagaaacttaaaaattcgcgccctatttatcaggtttttttgttgtttccgtctactctccaatgtaaatattaaaaatgcaaggtggaacgattttttaacaaaaaaaacatttcactttgttatttttttgtttctaggggttttcggggtcgttgggcatgaatattacattttatattaaccaacattaaaccacgaacccaattccaataaaatattataaatttctgtacagaactgttgaaaaaatgtcaaattcatgatcaggttgaccccggacctctatactcataaagaatccggagaaatagtgttttcgaaagaaaaccatcgtgccgctaaaatcaaaaaaatgccctaaatcgaatgtttaacaaatttcttaccgattaccaattaattttgcctttcacacgtccgctcaacccctccccctcgctcctctccctcctccttcccccgcccccccccctttattttgcactctgtccttttgaaagtttgactcgtttctgtggtcagtaaaataagcagatttcacagaacaattctcattaagcaactttctttcatacattaagcaatgggcttttctcctagaaaacaatatttcttcgactgatttatttttaaaataaagtggcaatatttaggtaagctctgcccaatctttgggcattagaatgccatcctaccaatacggtaaattcatgtgaaaaagacccttttcgttccgttgatgcacatactccttgaataaaaaaaatgacgcaggcacataaagcatatgcatgcatagattaaaaaatacgaatgattaataaagttcttatcgattgcaaattgctttcccacgtccgttcaatccccccgcccctccccactttatttttcactctgccctttttcaatttttgaccctttcattggggtcagtcattcattctctgtgccatttgttatttctctctatttattcattattttgcaattgcctgttccttctaatttcttttgcaattttctaataggagcaaacatattttaaaatacaattaattttgaaatgtcttccgtgtcaactcgttttaaaaatttattattgactgggtccgttgctgatttggtgtttgtatttgacgagggtggcgaaaccaaggcatacacttcagatagaattctcgaagcataacatttttacctttaagcatgttcgagcccacaggcaaattttgtggggtatttctggtgagttcgatcgtcttatttccgaagatgagaacaaaggtcgtgccaaaaatgtgaatttataaagacgaatagctttttagacaaacctccaacaaaacccgtggcaatcaaaaacattaaatttgacgtgttcaatgccattcttttctatttgtactgtggcgatatggcagaagtgaaaggcgaaattttgttcgaagttttcatagccggtcatcaaatgccttttttattttgttattttttttgtttagctgaccaatacttcatgagcgaacttgtcgccgaatgtctgcaatttgacttctccgaaattcccaacatttttgctgtgttttccgaatgtctcaagctgaaaggacctaatgtgcgttgctatatataagcaaatatttataaaactcattttacattaagaaaggattaactgtatttgacttaactcgctaattaggggaaaggagcgtttcggcgccagcccaaatttttgtgctataattttttttagtttcaacgaaatcaaaccttctaaacatgctatgagttcgaatgatgccaaaagattgttgattcattgaaattaaaaataataatagcccaaaaacttgggatggcctcgaaacgacccagccaataattgtttttatttagttcgaacattttgcgcagaactgtctccgttttatcgatgccaatgccaaatcactccttttttccgacgaatttctgcacattgatcaaaaaatgttgtgcaaaattttggagcgtgatggacttacaatttgcgacgaatttgacgtttggaaggcggtaatcatatgacaattgaaactaattgcatatttattttattgttaggcaattcgttgggcgcaaaatcagtgccaagaaaaagaggatgaacaaaatgcttcggcattggatctccgcagaatgatgggagacgcactttacaaaatccgttttccaattatcgcagaaagggacttttcggactatatttgtaacaaattattaattagatttcgtttttttttgtgacatgagtccaaaaaatgacgagggcaaatgacttaataattatttgttagataatttttgtagttcccactggcgtgttggacgctgacgacgcgttgagcgtgttcgtttcgtattcgaattcgggccatacaaatgcaaaattctcaattcatccgagagttatgcaaaacactggcggttcaagaggccggctcacgttggacatcgaaaattttgaagattttttgatggaagatgaaggaaaacgagaaagtgtggtcaaagtcatcagaggacttccttggcagtttactgtaactgcaaaaggttttccggaggtcgtcgtcaaatacttggacatttcgattcagtgcaatgcacaaaacggtgatttttgcgttttgggattaattcaaaatttttgaggggaattaggtaccaccgtatagagcccccaacgaaatttattaagtaaaataatcaaaaatttattttgctatgaagataaacaaaaggtcgccgccaaagcgggccatgacaaaatggcatcgcaaaaaaattgctaaaataaggaaaaaaattatcaattacatacacatattttacgaaattttttaaaataagtttgcgattattatttttttgttaaaatgactatctgaacgacattttgtctcgatgaacttttggagtgcacgtgccgaatgcacaaaattgttaataaatttttcaaaaatatttgcattcattaacatttctaagaatcgacctggtcatgcccatgttccgtgactgtccgtttggtctcgcaagtggttgagaaggattacacgcgcaaattctttcacatttttcatgccggatcaaatctttttcacattgacgatttcgtcacgtccaaagtaattattatagtataaccgcaagggcgtgggtgtacaaaacattccctaaaaatttttcatttttttttgaatttttttgaaattttctaagtttgaaaatttttaaaaagttttcgagggtgagatatggagcgagcccttacccccgagctacagccttttttgctcatcggcctcttactctttcactgtgatttttgtaaaatacgattttaatccattgtttgtagtttatgggaaatcctaaacttttggtgcttttaattttttttttctaaatttttcattggtaaaaaaattacgaattcttgtcaaaaaaagaagtgactatttgggtccggtcccagccatgttactcgtaaataaacaaaattaaacaggatgtcaaagacggcacggatttcaatgcgaatgacaccgttacccttgcaattgatctgattgcggaatgattccgatgggacatcagcaaaaataatgggtcaaaaaagaatggaatgtgacaatggatttatttatgtcttgattcggttcaaatataattttgttttgtttttatattttattcgttaaacgcaaattaaaggacatatgcaaagaaatttttaattttttttcgaaaattgaccttttaactgcaaaatgcatttttggaattgatgtaaatttaccgaaaaatattgaataaattattttttttcgaaaattgaccttttaactgcaaaatgtatttttggaattgatgtaaatttaccgaaaaatattgaattaattatttgcttttggaaaatttaaaatatttttattagaaaaattaatgaagcattgagcttgaaaacgcctagaatatgacattgcttaatcgatgattttttgtgctgaaaatgagcacaagtagcgccgattttgttataaaaacaatttcgaggattatagtcaattttgaaccctacgaaaagtcgatgagtaatttttcccttttattccatttttcaaaaagaaataatacttttttaaaaaccaaaattcgatttttaattattattttttgtttgtacttctaaatagttttacttttatcaaaaaacaaagatcaaatcgcattaatttaccgtatccttcaccatttcttttatgtaatatttcttattttttaccttttaataatttttttgaattttcttgtttttttcttcttctttttatttgatattttattccattttaaatgtatttataattcataataaacaaaattttaaataagataatgactaattggttgatctaccgtatcctctctctttcctttatttccctaattggttaccccaccatttgcgtccctagacatttgcgtcacatttcttaaggg

SEQ ID NO: 10222 - DNA, 4110 bp, Heterodera glycines
ctgactttcatgaaaaggaggaattatatgaaataatataatgagtgatgactgacctccttgaaattgttgatcctgtttttaatttgtgatgtgaaataaataatgcaactcaatcgcttcggcttctcgtcttttctcggagtgtgcaaccatttgaacaatgcttggcgagcacaataagctgcatttggcccatcatcatcaccaagcacgtccgggaacagatcaactgattggattgagttcaactgattgagatcggtgagaattgttggcgaagtgaggaaaagcaatttgctgagatgatcactattaggaaaggcgaagtggcgaatgtttgtcgcaaaaatgggccaaatttcacgaacaaaaacactccaaatcggagtgacattggcattttgtgaggaataaattttcaaacttaattcggtgcctttttcatcgaaaatttgatgattgaaacggagaaattcgacgactttttggtcaatgcacctgtcaaaggaatgctttttatcagttaatatcaatgctgcaagatcgaaatttggcatttttatttattaatagcaacataaatatgtcatgatttaacacggcgagtcaattttgggctccaagtacacttaagttggttttttcgtcttagtggtctgtgagttagtcaccaaatgtgggtctcaggttcaagtcctctttgtgtttgtgtataaatttcatttttttaaagcaaatatataaaaaaataataaaaacagaacgccaaaagaacaaatacaaacaataaaaggtaaacattttattttacccttgattttatgaatttttttagcttataactttttcaataatataccaaataaaaccattttatgctcattttgaagggaaaattctgaagaatatttcttaaatagtcaaaagtttaaaaaaattgtttattggcaaaaaaatgaaccatgtgttatcttatatgttagagacatggaaatagtgcgtcaaaatgagagaaaaagaaaaaactttgcccagtcgtaaaaatttttccaaagttgcgattttcttgaaattttgcctaggctagtttttcggccctctctatcgaattctcttttgttttttgaaagtttcttttctaactcgagatcgactcttccatttttacaagggaaaatccccaataaattttaagttttgcaaagttttggcgttctgattactaaataaataataaacttatttgtacttggagcccaaaattgactcgccgtgttaaatattaatatttaaaacaatttaaagtaatatgatagtacagaattttagcactctctcatttttgcgttttccctctccacaataattttagcgccaaaatagtttttacatttacttaaattttaaaattaatattgatattaaaaaaatatcaacgtcaatattgatgttttaaaaaacatatttttaaaagaaaaaaattttaatttgccattctttaaatgggagaaattggggtaatattgttttgttcctcccctttttcgaaaaaaaaatttcaaaaatttctttcctgggcttttcgagctcgctgatcacgaatccggcatacatttcggccaattccgaaacccggacccgaattctaacaaaaagtcggaattccaaattttcgaatttcgcaattcgtgatcaacaaccttgaaaagcccaggaaacttgtttttatgacatcaaaatttttgaaaaaattttttcgaaaaagggggggggggaacaaaacacagtattaccgaaattggtcaataaaattttgaacttactcaatttcaagaagttcaaagcggattttattgtgcagcggacgctgcggaattggaaattgcacaaatttggtaaagatgccaagcttctctatttttgttgttgtccccatattgtgaatcgcgattggtctccaaattttcaattcgtttttgccattgaaatgcgtgtccactaaaacatcgaaacgtggcgaaatcagtgccaattttagaccaagttgagcatggtcgaaaaaggggaaaatgtccatcaaaacatcgctgcaaatccaactgaaattgtgaaaaaaataaccttggaaataaaaaattttgcaattaacatataaaaaaggcacaaaatggttttactaattgatttattttcataatcacaccaaaaatgtgataacttaaaaaggaaatgatgaaaaatttgtaatctaatagatagatcccggacatttaggcacaaaatttttaaaatttacatgcaaaaaggtaaaaaaaaaataaaattaaaattccgataaaaaactgagcatttttattatttagtgacagatttttaccaatgccgtcgccttccaaaagatgttttcacaaatgaacacaacggttgctgctgctgctgattttctctaatggcagaagaaatgacggcggtggataattcttgttccatttaaaattaattaattttcgcctgcaaatatttaagaaaaatttttaattttaaagggctttttaaatgaaattaggtaagcacaaattttgaatagaacagagacaaaagtgtcatataattagcgcagcagaagcagcggcggtagcagttctactacaccgcggcggcgcttttcggttacaaaacttctgcatttgcgcccagaatttttaatcggcatagtacgcgccatattgactatggcaggagcaggagtaaaacttattaaaaaattaaattaataaattaatttttctgattaaataaggtttttatttattattttttaaatgaaaaaatgttttgatcgtgcgtatttagttaatcttgcgaactttttttgtcgtagtacatgttctgtgttttggttccttgtagatgtggaggaggaaacaaatatttaagtttccattgtgagttttattttttttattgggcatttaataactttaaattaaggttatgtggattcaccttatgatgtgaattggctgttgagggttgggcgacagctgttaagatattggcagggtttttctgaacaggaaaatttgttttgattttttgtatttaaatttaattttttgtttatttcttttgtccattatactgctatcttttcaataatatttataagtgatttggtatttttgaatctgtgctatggatattgcaatttttatttgatcgattctaacgtattgacgtaattgcatttaaaattatttttagttggtaaattaagtatatttgcgacattatggagcacagaccgcatgctgatgaacagaaacgtcagcgagcacgggatagtactattcaacgtttgagatggtttggagagcaattaaataattctttttttattcgttatgtttctatttttaagccgtcttcagcgtgaacaggttcacgcacgacgtgtggcaggggcttggacagcagcttgtaattatgatggtcatggtactaatcaaggagatgtgaactttgaatgtgcgcgcaatcgtcctagaggacgttcatgggggagttggcagctagaaatgggaacatttgcaacttttgttccgcccgagaattacgcttttccaccgccgatggttaatggatgccagcgggcaggggccgcaatggttcgttcccagagaacgtcggcgccgaaaagtacggctttgaagcgtagtaaaactatgtaaataaattgatattaactttattggtcatccattgtttgattgacacaccctaattttaagagttccaaaatgttgcccaaacacgttattttggaatgtctgtgtctgctaccaaattggagggaagcagaaatgagtgtcgacgcgttgtgccaagtgcgcaacgttcaggggcggggcctggcaatgcaaacaagttcgtgcaaccaattgcttttgtttgtaaagtataaataaaaaattaaaagcatataagctgattttttctgcatttatttgtgtctcttaggcgtcataaacgttatgtgagagcgcagatgcgtttggcacgcttataaggtgttgagccgtttgctaaggattgtgccggttttct

SEQ ID NO: 10223 - DNA, 2574 bp, Heterodera glycines
  unsure (1)..(2574): unsure at all n locations
gatagaagggtttaaataaatttntgtaaaatcagacccggaaaaattaattgaaaattttaattttattaaaactaaaatgactcaaatgcgcttgggtaataaataaattaataattattatttgcatttattaaatgcgcgtaattatgtcgggataaattgtattaatttaatgtgtcaattgagtccaaatccagtcgcgcgttcagcctaaaggtgcgtcaaactaaggaaacggatttggactgacaaagtgttaattgataagcgtacaagtggcaaagcacgtgctactaaattactgacaaatagcaaagtatttgtccgataggtaaatggcaaaatgggaaatggtgaaacaaaagtgccgatgttggtagcacataaaaacaaaatcggatggggcgcaattagtttttttaccaaattaagcggatggggcgcaccttcactgtccaaatgtccactgtccaaatgacttcactttccaaatgtccactgtccaaatgacttcactttccaaatgtccactgtccaaatgacttcactttccaaatgtccactgtccaaatgacttcactgtccaaatgtccactgtccagatagatgtccattgtccaaaaaaaaaagaaaccaaaaagggcattcgatacaaaaacgaaatacgaaagaaaaagaaaaatttgaaaaccgaaaactaaacaaaaaaaactttcgtggacgaaaatgaaacacgaaaacgaaattaacatgggccgaaaatgaaggccaaaacgaaaacgaaatgaaagggtccgagtctaggaaccacaaacattgttgacaagcataccatctccacactaccgtaaaatacatatataaataaatactgtataattgattaattatttggccttttgatctcgtcatcccaacttatttcatattttcttaaagattctctcgaaattacacaaaagacgctgtttttcaaataaaataaataacaataatttttcgatttcggtacaacaaaatgaattgacaatttttggcagttttttcggtgactttttcaccaaaaaaaataataaattcttctttaatatgagcattttctgattttttggttaaaattataggcatttttatccaaaaaagttttttttatttgtttttaattttgttaaatataggtttaccttttttctctttatttcatttcgttcttttcaatttacaatttattttaatttctttttttttacttataattttcgtatagtacaaaattatttttatgattaaataaatttattccattctgtttgtttggttgatgatttggctttcataaatgggatagcgatggcttttcacatttactgataatccgatagaaccatttaaaatggaattcgaatgaatcataatgggaatggagagaacaaattgggacagaattcgctcattattaaaattgacgatcaactacaattttaatcatttagcttcaattttgaaaattaaaataatctttccctaaattttgccaggaattgccctgaacatggcacggtgcccgttcctgtacatcatcctcatccctcttctcctgctggtgctcatcaatttccctccaattttggcatggatattgaagcgagacgatgtcctcttagcttattctccaaatgaacttaccacagatgaaacgaaaattattggtgaaaagcaattgtgcccagccagagaatggtctttggaaaaaacttttgggcttcccattgaaccgaattctgaatttggcaaaatgttgcctggtctttctacagaattcaaccatgcacttcccggcattggaaaatctcttgaatacatattatgtacctttgacaagatgcactgtcgtcaggtgaagctagcgagtttcttagaaactgccaccaataaataggatacgatttttagacaaaagcctatttttttttcttaagctccccgcggcctgaaacgcacgaaaaatatctttttttgggctgttgttaagctacttttcaagttattagtgccgattttctaggcttttatttttagagcctaaatgcctaaaaaaattttgaaaaaacctatttttgctacctatttgtggggttttttagagcctaaagcctacccattttgacagtttttagagcctaaaaatcgtatccctacccataaaataccaaccatacacgtttattgcctggcgcttctctccccttcagtttaaaaaattcttgaaaattggaaataatttaaagaaattttgagaatttaaaaaagcttgaaaacgtttaaattaagagagaaaaatttaaaaattaatatttttggaatttcaaaatctaacatttttaaaaatttatttttcttcaagtttttgcttgcagcataacttgggcttcgttttttaagcaaatgcctaaaattccgtgcacttaatacgcacagtaagcatgaaaaacgcgttttccgcttggttggggtttctacgatgaatttgtaacgcctatttttacatatttctgggtttttgtgcctaat

SEQ ID NO: 10224 - DNA, 2097 bp, Heterodera glycines
  unsure (1)..(2097): unsure at all n locations
agatgcatgccatgctgcatggatcattttcagtacacatgtgtcaacgattggaaggaggtcatttttaattgcaaatttcacactttaaaaaaaatcatttgtcattttttgattatttaacaattttttttgtctatttattattttattttgtgcggcacgcgcacggtttttttaaaacgatccccccccccccccccccccctcctacaaaaaattaagaaaaatttcttatggtttgaaaaatatttaaagaaattccgataactaagtttaattttttcaagtttatgaaaaactttttcgaaaaaaattttaaatgagtatttagaattttttaaagaaaaaatttttttaataaaattcaacaatttaacatttctttgtttgatttctatgaaattttatttttcatttaataatttattaatttaaattttcggatccgctgcgcaattgaaactcaaaatttttgctaggccgaatatgattaacccacaaatccgcatttaaactacggaatcccgcgcagggattacgggattttgaaatattgaataaattttacattcttattcagcttagaataatcctttgttttttataaatttcccatcaaaaggttgaggcaatgtttccgaccacaaccacaactacgaccacaacaactacaacgctggccccagttcatccgaccgctgtttgtgaacataagcaatttaaaggggtgttagtgcgcttataaattccgccaatcgtcggaaaatcaaaaataattcacaactttacttgagaaagatcacaccaacaaaaagagtcacaatacaaatatggtaatacaatttaggtgatgccattttgggccgagtctgttgacggaggagtagtgacaaaaattgaggtaattcatcatacccactcaaacggtgctaggtcgtttcctaaaaaccgccacattgggcgtttcctaaaaaccgccttctataagaatattatttttcaaaattttttaatatagcataaaaaagttatggttattaaattccacaaaatcttaagtcggaattttttttcaataacttttttaaaactcaatgaaattttttgaaattttaaaggtaaatagattaaataaagtacttgaaattctaaaaagaaaatttaatttaattgcttttgaaagaagttataaagtattgaacaggatatgctttttacgatggtcatgcgaacatttaaaaatttttaagtcaattaaaaaatacaattaagtcaaaatgaatttatatattcgattgtcctaagaattctctatttatggttaaaatttcaaaaaatttcattgagttttttaaaagttctcgacaaaaaattccgacttaagattttgtgcaatttaataaccataacttttttacaattttttaaaaaaaatttaaaattaatattcttgtagagaacaccttgtgctatcgaatgataccaagaattattaattaggttgaacttaggccaagttatgaatttatatgtcttacatttttggttttactaccacttggcggtttttaggaaacgacccagcacgatttaaaacgaccgacaaagctaatggaattgaattcattgcttaagatcacaaaaccaggaatgactaaaaagtcaaaaatgaattgatattccaataagtaaaaaaattctggaaaatcacaatcgaagtaaattaaaaaagaatatttaaaaaactatcagtcgttctctaagtttattcgagatctcctccagaaatattaaatgttaatggcggacaattaaaaatggaacaattcgcaatttggcactgcccccaacaattggtcggtcacttttcattgtgtcggccatttgttgtggcaacattctgctgtcgatctttggccatgttcagcaaatggccaaccaccaattggccaaccgccggggataacagacttttggccaccggcacttcgtcgtccggggagcgcgggagggggcgggcggtttgcagctgggcccaccgctgaagccgcagncggtaggaagtgtattcgaccttttttgaagggggggggg

SEQ ID NO: 10225 - DNA, 2325 bp, Heterodera glycines
attttgcgatgcgtcactatgccggcacaggtgggcaagtaccaaatttggcagtaatcttaaggggggggggggcttatttttcgggattaaaatagggttttattagcttaaaaatgcgcatatattgtaaatcccttaattctaaaatggttaattgcgtttattttctttataaagaaaagggcgcgtattgttggattttcgtaattttttttttgcgcacttttttcgcctacaaaaaattaattatttttgttcatattaaatttctttttaaaataaattaaaaaatgtatggattagtgttgaattcgttttaaatttttcaagaaaatctgtttgaaattgtaaattaattgatttaatacgatcgaaaataaatatttctttttaataaaagaattgttacgataattattggaaattattcaagtaaataataattatatgttgtgtttaagtccgttacaatgtgtccaactggctggaaaagaacaaagacccattgaatgacacattggtattttaaattgaatgaaataaattttaaaaaaagacttttagtaattaaaattgaataaaaattctatttttattttgcttaggtgtccaatatgaaaaatgccaaaaacaacttactgattgtggaactgtggcaaaactatcaaacgcaagaagaagcggcagtggccgccaagtcgggcggtggcggcaaaaagaagggcaaatccggctcattcatgacgggtaaattacaaaaaaaaaaaaataaataaggtggactacaggccgaccaacctaatacagtatcccaaaaagggaaaactgttacaaattatactgtgaatcacacatcaatccctactaaatacagtatccttaaaacaaaaaattcatttataaacatatccttgataaaaagccaaaataatttaagctatttcaaaattattgatttttcccagtgagattttttaataatttttttttataaatttatttttatcatttaatttatattacaatatacaccccatatccacagtatccatgctttaccgtgagtcgttgaacaagttgatgagtatgttgcacaagacgcacccacacttcatccgatgcattattccgaatgagaaaaaacaagcaggcaaatgggaaattacaaaatataatatttattatttaaattgtaattacactatgatattaaatttttgaaaaacttaggtagtttatttattactcatcagtgttaatatcaatgagcaatttaaaattgaaatatataaaaaaactaaataataaattaatggcataatcagattaataattaattaatttaaaataattaatcaaattcaattttttgtttaggaatgattgatgccgcactcgtgctcaatcagctgacttgtaacggagtgttggaaggcattcgaatttgtcgaaaagggtttcccaaccgaacacttcacaacgactttaaagtgcgttacggcattttggctgctgaagaagcgcgatcaagcacagacccaaaggtggggagataaagtattataaataatttttgatattttcaatatttaaaataaaattaaaaattacaaattgtgatgactgatttgaattatataaattttgtttaggtcgcaagcggaaacattctcaacaagttggttgacaacaaagagcttgaagtggaaatgttcagagttgggcacacaaaggcatgccaaacaatttattaatttggtttttttactctaaattatttggaatactcgaaattcacgaattaaaacgaatttcagggtttttgggggggggcatcccggtcaaggcgtcaattttctcggtttttagttccgagacttgaaaattttgttaccctcataagcagccttataaaatactgtattccctaaaatagagcccccgggggctttaattttcaacgcccctcaaaaggagggctttatttcaggagggattctaagttaggggggggggagggactgaattttaggaaagacggtatatttctttttcttttttaactttttcccgaaaaaaacattttgaaattttttaaatatttctgaattattttgggtgttcttcaaagccggcgttttggcccacattgaggagctgcgggacaagaaaatgaacgagctgatcaccggcttacaatgcgcaattcgtgggtatttgaccaaaagggatgcggcgcgcagaaagcgccaatggaattcgtatgacatcattcaacgcaatgtgaaatcatggtgagcgcggtcggttcgctgatcatga

SEQ ID NO: 10226 - DNA, 2544 bp, Heterodera glycines
  unsure (1)..(2544): unsure at all n locations
tacatatgatatgatttcagtatatgatgccgacatatgataccaaatattggggaaaatatatgctcattaatgatatttaggacgtttaaatgcaaaaaagttaacaaaaaaaataataaaatgaagaactttaatttttacttccgtaaaaattttttactttaaaatattttttaggtaaagaaattaagggcaaataagagtcatatcgcagatatgatctgaattgaaataggcccctggaatgaagtatcgagtctctagggcaagtcttgagtgttataccaagcctgtgggaagtatcgagttcgtggcccagtctcgatattgtattgagtgatcgcgggaagccaagtgcctcgggggaaactttgaaaattacaccaagtctcgttggcagtctcgtgccttggggccatttctccagtatcgtattagtgattgtaggaagtatcgagtcttgggtgctaatcttgaatcctcattcctactcaaggtctatttaaaaaaaagaaaagttacatctaaaaaattgtttaaaaaacaaaagaaaatacaggtgtgtgcttcgtacatggcaatggtatttgttgtatgggaaggtgaagccgttgtgcaagggcgataaacatgaggaggagctggagaaaatggccagcgaattaaaggtgccatttcaatttttttcgattaactactaaataattgttggaatattttcttgtaattttatatttgcaataaaaaaaattgtaaaattcgaaattttaatgctttttgaaaaattttttaagaggaattttgggtacatataaaattggcccagtaaatggcacgaaatattttaataccataatgtgtccaagaaattttgacatttcgttaccgtgaattattttcgattttccgtanattgtttgccaaattatgtgtttaaaatttaaaaatatatatataaacatattttaaacattaaaaataattatttcccaatgttttaaggtcatgaaagagacattagccaagcaggaacagacacggaaagctgtcgaagcggagcatgccaaggtggcggaagagcgcaaaaagttgcaagaggacttggaacggacgcggaagggcggaagcgcaatcgaatcggaagtgatggtgagtcatcggtgttttaaaaaggcggaaaatagggaaaattaattatttcaaaaaatggcagagaattggtaaaattaattaattatttaattttacgctacgcgaatgtaagaatggaaaatacaaagaatttagaaatatggaatttccttaaatttcttaaaatattttgttgtagcaaaaaaatttttgattggtctacgaaatttcaataattttttacatattttgagaagtattaatataattttaattcaatattcataggtaattagaggcaaactttacattgacaggcaataaaattgaaacggtttattttataagtagaccaaatttaaattatttatttaattgctaattgttttttaagtcaatttgaattaaattagttttataaaaaatgtttcaaattcatttaaatgatttacaataaaataaatatattcaaaaattttgcccaataaaacatttagaatttaaacacggcaaaagtgcaattggagcgccaattggaggatgccaaagatcggctggaggaacagcgccaacgcgcggaagagacacaacgcaatttgaagagggcagaaaaagaaaaagacagtcttaacgaacagattgggtcactagagcataacttgaagaggtagagaaagagacagaaacgccaaaaattaggctcacaatcattaaaaaatattaattttacttattaattaaaaaataaatttaaaatcccgccaaagaatgagcgaaattcgggttcatacacaaaatggttttatgtttcgaattctgcgcattggacagattttttttcaatttttattaaaatttctgaaattttaaatttaagtttatattttcattaaaaacaatcgcattataaggagctcaatttttaaaatatattttttaatatttttaaaaaacaatttaaaaagaactttttcttttatgtcgttgaaaaatattttatcggcatttttagcatattaaaatatctcgaagttctcattaaaaattacagggcttaggttctgtgacactgattcaaaaaaaaaactaaatattattttgatgaaattattttttaattttaatttaatttattttttaattttaaattaatttatttttttagagttgaggaagacaaaaagaaaatggacgaccgcatcaaagaaaatcatgaggcaattgcgcagcaggacgaggccattgccgcggcaaataaggagcgcagaagggcggaggaggaaaaccgacggatgggcgaggaattacaggcaaattaatgaattaattaatttaaattaaattaataattattagggctgtgaattttatgtaaataaacatttttagtctggattctccatgctcgaa

SEQ ID NO: 10227 - DNA, 1122 bp, Heterodera glycines
  unsure (1)..(1122): unsure at all n locations
ctcgcgcaaaatcaaaaattggaacgttcaattgaagaaattgaggacacattggaccgtgaacgtcgtcaacnggttggacatggagaagaacaaaaagaaattggaatcggaagtgcatctcgttgagggtaattaattaattaatgagtgtctcattaacatggacaattagagctgattaatgcacaacacttttaaaaaaattttgtggtttttatgtagtaaaatttagtttgtttatattattttattttttacattttccaattttttcaactggatcttttatgaaaaataattttaaacattttatctgcaaaattgaatttttttttttaaagttcttaaattatttagtatcaaaattttaattattactgaattttgatatgggtcaagaatttataaatggacattttagcaacgaaaaaaaaaatatttgtcgaccagtaggaaaattttcaaaaaacatattaattctatggcaaacaaatataactctttgtagagctttctaattttcaatgtccttgaaaaatgcttcgactcaaatttattttgtcaacatttaattttatattttcaatctaaaataatttatatttctgcagaacatattgctgaaatgcaaaagcaaaaaggggacacggaaatgcgacagcaacgcgttgagggcgaaatcatggatttgaatggcaaattggaggaacagaacggcattgtgggcaaactgcaacggcacctgaaggatcgccagactcgtctcgtggaattggaggaagagttggagcaggagaggaacaggcaagtgccaactgtgaattatttgtttttgttggcattttttgattaaatttaatttgaattatcttaattgttccctaaattttgattattaaatttttaaataacagaattattgtatatgaatattgagtattggaatttcgtgatcattaggcatttcatttcttgccaattcaaaattaattaaattttttaattgtcaactaataataaaaattaaatggtaaaaaatgggcaaaataagtgccaacatttgtctcaatttttcagcaggaccaagagtgacaagaacagagggaacacgcaaactca

SEQ ID NO: 10228 - DNA, 1037 bp, Heterodera glycines
  unsure (1)..(1037): unsure at all n locations
ctttagtcatgtatcgcctcaatnntcaattccttttggcataaattacacagattttgtctaaagaattaccaaattttagagatttttggctaattttttaagaaaaaataggtttttggggggccggcggtgccgaaaggccgcctggcgaattttgaaatttaagctcgatttctaacagatgtttacaaaaaaaaataaaatttttacgataaatttttgtttttttaatatattaaattatcatgatttactcaagcaaaattggaactcagatttgtaacatattttcttgaggcacatttttccaaaaaaaaaaacttggtgaatgtgcgagcgtagaggtccggcggtgccgataggcgccgccgggaaaattttttgaaaactgatggatctgttaatagattttgtccaaaaaatgataggtttttgcaatttttagagaatttttttaataagatttacgaatttttgggccctgcgatgccgataggcagcgccaggcgaattttaaaattaaaaaaataaataaaaaagaaaccgtcaacctgaatcgaactcacgacagaaagtaatgtcaaggttgattcactaaccactacaccacactacacatcgatgaccaataataaaattaactttaattcataaaaaatttgtcaaaatggttaaaaaaatcaaaattgtataaattttttgccttttatccatgaatatgtcattcttaggggtgtattttcacccccgcgcccccgcgggggtgaaggtcgcgggggcgggggtcagagtcgcgggggcggggacgggggtgaggccaaaaaacctgtcccgcccccggcgggggcgggggtgacgggggcggggtccgaaccctaatctattttttctttggtactgaagtgtccataaaaaaattaaaatgcccaattttcttaaaatccctctacaggaattagattattttcaattttttttttgtatactcgtgggtttcctataaagaaaatatgattcctcatagtttttttttt

SEQ ID NO: 10229 - DNA, 1908 bp, Heterodera glycines
aaagtcaattgttgcaatgttttcgggattttcctatagaatgaagaataaaactgacaacttattaactgaaaattataggtgaatcacaagaaaattcaacattcgggcttaaaatccggagaaaagtcaattggtgcaatgttttcgggatttacctatagaattgaagaataaaactgacaacttattaactgaaaattataggtgaatcacaagaaaattcaacattcgggcttaaaatccggagaaaagtcaattggtgcaatgttttcgggatttacctatagaattgaagaataaaactgacaacttattaactgaaaattataggtgaatcacaagaaaattcaacattcgggcttaaaatccggagaaaagtcaattggtgcaatgttttcgggatttacctatagaattaaagaataaaactgacaacttattaactgaaaattataggtgaatcacaagaaaattcaacattcgggcttaaaatccggagaaaagtcaattggtgcaatgttttcgggatttacctatagaattgaagaataaaactgacaacttattaactgaaaattataggggaatcacaagaaaattcaacattcgggcttaaaatccggagaaaagtcaattggtgcaatgttttcgggatttacctatagaattgaagaataaaactgacaacttattaactgaaaattataggtgaatcacaagaaaattcaacattcgggcttaaaatccggagaaaagtcaattggtgcaatgttttcgggatttacctatagaattgaagaataaaactgacaacttattaactgaaaattataggtgaatcacaagaaaattcaacattcgggcttaaaatccggagaaaagtcaattggtgcaatgttttcgggatttacctatagaattgaagaataaaactgacaacttattaactgaaaattataggtgaatcacaagaaaattcaacattcgggcttaaaatccggagaaaagtcaattggtgcaatgttttcgggatttacctatagaattgaagaataaaactgacaacttattaactgaaaattataggtgaatcacaagaaaattcaacattcgggcttaaaatccggagaaaagtcaattggtgcaatgttttcgggatttacctatagaactatagcaaaactagcgggtgcgtgaaccgtcggctatttagctgggaaaaagcgcttcgcgctttgggagcttcgctacctagataagctatgggttgtgaaaagatttggaatttttaaaaaattatcagcgatttttaggccgcttcgcggcctcagacgggcgcttcgcacccgttttttaaattcggtgatttttaggctgcttcgcggcctcagacgggcgcttcgcgcccgtttctaatttttgttgtgcttttcggccgcttcgcggccgttttttaaattgtgttgagtcggacgggcgcttcgcgcccgttattaaattttgatggactcagacgggattagaagaggtagaactgtgattagaagaggtacaaacaatgatagaagaggtacaaacaatgattagaagaggtacaaacaatgattagaagaggtacaatggtgattagaagaggtacaaaagtgattagaagaggtacaacagagattagaagaggtacaaacaatgatagaagaggtacaaacaatgattagaagaggtaaaaacaatgattagaagaggtaaaaacaatgattagaagaggtaaaaacaatgattagaagaggtacaatggtgattagaagaggtacaatggtgattagaagaggtacaaaagtgattagaagaggtacaaaagtgatagaaaaggtgtaacagtgattagaagaggtacaacagagatta

SEQ ID NO: 10230 - DNA, 1869 bp, Heterodera glycines
acaaaaaatggcaaaatttaaaataaaaaattcgttaattttgaatttactccattttcatcgtttaaaatccatactgatcatataacaatatattcaaattagcctgctacccgaacccccggggaagaaattctcggggagcggagagtgccggggaaggcagatcgaggtcagcgctggacgtaactgattttcaattacggagatccgtaattaccgcgttttctcaattaaggaaatccgtaaaccgtcttacgggaatccaaacacgccgtaatttacgtaatacgtaatctgtaattttgaaattttcatttcttaaaaaacaaaaaaaaatccaaaagaaaaactggcaaaaagctaatatgatcagaataaaggccttgcaaaattttttgaggcgtaaaagtcccatgtggtcacttaagatcagctttttacttatttttaagaagggtttctcccctaatccgggggcagaaattttcgatggcgcataaaattatttatggccgaacagacctgaatcttttctccattccatttttaaaccatcaacacgttttcacattccctttttagatttaacactaaatataaaatgggcaataaattcattccatttgctgggagggcaacaaaattatggaataaactggagaaagaacgaattaaataaattaattaaatcgtttaaaataaaatcatttattaggataataaaacctgaaaacctagaaaatttcataggttatttggtattttttatgctgtagatctcagttggactttgactaatttaaattcattttgcccttatggatgacttgttttttaaatttttggaataaacgataaaaggtttcttgaatttcaaagtttaatattaaatttgttaaacaggagggaaatgatgtgaaaggggtggggttgtgaaattttgttttcgtttcaccattcattgtttgaaattagactttttatgccgtttgaatgatttttaatttttttttacctgggctataattgtcaaatttttttgaattcgggcgccctgctgtttttgaggtatgatttaatattgctatttaattttatttagtttttcgtctataaaattttctacgaaaatcaatgccacatgaatagacaagaaaatcattaaaagctaatattatttcctttcactctccgctcttcatttattcaagacaacattttatttattcaaataaagatgatttgcggatttccgccttttttagcaattttttttggttggcagttttagaaagaagccaaatgaatgctttatgaaataatataaattagcaattaaaatgcaaaattatcgtcattaattgtattttagttaatttattctttttgtaaaaattttttttaaatgccgagaaaattcaattcgctttcagttttattaataatgaaactgatttggctaacctttttaccttatttttgttttgcggctgttgaggtgcaatacaagtgcgaactttttggtgatgatacggcattgccaaaatcagaggtattttcagaaattcatacggtcccaaatttgacaaaaagtaattaaacatttttaatgatgcatttggtttttctacgccaaaattccctgtcttccattgaaatccatgctaaattaaagaaaacagtgaagaggaatttaattttactggttccagaatataaaaaaatagatagcgaaaacaaaccggaccagtatacgggtttttacagacccgtaacccatattttttcggtcgatacgcgtttttaaggacaatgggttttaagaattttttcgcccgtaagtcccgtgtccagcacccttaccaa

SEQ ID NO: 10231 - DNA, 2575 bp, Heterodera glycines
  unsure (1)..(2575): unsure at all n locations
ttttntgagctaatantttgattctaaaatttaataatatggaagttgttttacttttgacattattgaatccaaatttgttaatggattttaaattaataaaccaagggtttcgatgttctggtttatggaaatagaccctattataattattgatagaacttactgatttatatttaaatgcccaaatttttgtggccggccggacattcattctcttaaattttagtgtaaaactaattttgataaatgataaaataactaaacaaattttatcaaaattctaaaaaaaaattcctggctgtgtaggtgaattagttaagaaattatcgccaagcttggcaatgttagcaaatttcaaaaaatttcaacagatgtacaatgcgattgcaaatgatttgtatgagcgcatggccaatgatccgttgagtgcctccgtttcgcttttgtacaccttttgtccggacaaaaacaagcgcggcacagcgctggacattcttggcaaatatgtgcagaatatcattgaccatccgaccgagcaaaaatttttgaaaattcgacatgggaaccgaaccttttcagtaaggagttgaaaaccttcaaaagcaaggcaaaaaaaattttgtcatgagtttattcttaggagccataagaaatttggagactattgtcaagaaattgtatttgatttttggtccattaaaacccaatacccgaaaagctaatttctcaagaaatgaaactagaataaagcagcgtgtaatatgcttaaaagcagtaaatccgtaaagaagaagctggctgggcagttaaaacgcggaaagcggagggttggtaatatccacaaaagaaagggcggatgcctcgatagctcaatggtagagcttgcctatagattgagtggtggcgtgggttcgattaccacccgaagccgaacattttgcacatccttatcatatatatgaattctgggcgcttcaaacacaagtgtgggatgatagggtataaaatctataaaaaagggcggatgtgccatgcagtagctcaaagagctgcctacacatttagtgaagacgtgggttcgattcctagccaatattatgccccatttattattttattttgataaatttccaaggagaaagtgttgccggtgaagggatcggttgagtttttgaaagcagtcggatttgaagaagaagtgttttgggccgcatccgatggccaccagccaagcagctccaccacagtgcccggcactgagaaggaagcgtactttgtaatgcctgagccgaaaaacgaagccgatgtgcaagggttacgcgaaagattggagaaagcattgcaggaactacggaatggcaaaccaattgagctccgcttgttccgagatccgagggtaaaattatcattaacaaatggaaggtggcaatcagacaggtgtccgtggagtttcggaaccaaattttgagggtgattagagcatccccaagattcttagtgatttctttcttttttttacagaatgatcccggatgttgagataaaaatgccaaaagagcacttttcttaagaatccaggagtgctatctatgcaaccgcaaaaaaaatggttccaaaattccacggacacctgctgttggccttctaaggctggtatgctcgctagaagaaagctgcattcactaatcagggtcggggtcgttttggcgccgacgttttggcgccagcgcgagttttttgattataactttttttattgttaaccaaatttaacattcttggtatcattcgaaagcttaacgtgtttagaagctatttctaagcaattgtttcgtgattagacaattatcaaaaaagttataacctgaaataacaaaaaaaccaaaattttggaagttttttcttaataacttttttacaagctaaaattttttttttttttgtaaggctaatagagcttgtgaagggctttcgaatgataccaagattgttagatttggccaacaatgaaaaaagttataatcaaaaaactcgcgttggcgccaaaacgtgggcgccaaaacgacccagtcccgaggaagtagggggacgggacaaaatatcgcagccggaatatcgccgcacgaattatcgccgcgacaaaatatcgccaccgaaattaaatttttttttcatacatagaaatttttaagaaaaaattcttagaaattttttttataatcggcggcaatattttgtcttggcgatatttcgggcggcgatattttgggctgtacccggaagtagtgcaccccgagacattcggggggtctcaagtgatcggagaagaattttgagattcttctatactcaaacaaattaccgcacatgtaacgtactcagatcgtgaaaagcaagtgcctcgttgaacaaattgatctccactctaaatacggtgcccagctccggcttgagcttcacccgtacaaaaatgctttcaccgctctgcaaaaggccatcattggcgttaatttgggtgtacaaaattctatcttttttatcgatataattctctggtaaagctgccgctttt

SEQ ID NO: 10232 - DNA, 3141 bp, Heterodera glycines
cacatttctaaactgattttatccaaaacttttttcataattctttcagtgaatatattaaagaacaattcaaattttacaaaaaatggaaatgccaatttgtgcttttcttcgcgcccggaaaaggaccatctcattatgcggatgcacatcacatattcaagctgaacgaaaatttaggtgagagtaagagtatataggtacacagagggacatgctgggattttttaagcaaaaaaagaccaattacaacaaatatactaaaaaatctaaggctactgaatgataaattgatgaaaaaacaactataaatagttcgcaacttttataatttaactattttttaatcatttgttttgaagaaatcagcgcaaaaatttacgaacaatgaaatttttaaacctaaaatttttatcaagaaaaacaaaatgttgctgataaatttttgaaaaatttttcttagcggtgtatttctgaaactttttcagttcattttcttaggggagtatttcctcgattttattgcattttttaatggaattttttggaaaaaacgtcaagaagcatcaaaaggtcaaaatgccaaaaaaggcatttataaggcattaaaataccgaaaaaagggaaaaaaagcacaataaaatcaaagttaaaactcatttttgcattttgtccaaaattattaacataaattcactaaaaacaaaaaatacacccctaagaattgatccaatggttctcaaataatgcaaccctaacaaataagaaatgaaaaaatttctccaaaattcatctccaaaatttcggactttttttcaccgtgtcattattttggcatttttcctcataattttcgttaacttttcgagatttttcgtaacaaaaaggctaaaattgtgtaaaatatttataaaagacatcgaaattagttccttttgactaattatgaattttaaaaatctattaatcattgttcttttttgtcaattttatcattttttcacctttttagacttttattttattttatatttatttatttttattacattttgttataattagggcttagatttatatgtaagaaaaatcgcaaaatatgtacataaatatgtattaaaaaatgccaaaatatgtaagaaatatgtacaaaaatcttcaaatatgtaccaaaatatgttaaaaaaaaatgccaaaatagcatcaaacaagtacaaaaataagtataaaaaatttttatcaacgattttagggcagtaaaaatggtcatttctttttatgcgtgttacaaatcagaaatttttcgagattttccggagtaaagctcatccgattgtctgccagaatatttttgtatgctgaaaaggaacgctccacttcacacgactgaatgggcgcatatttgaacattgcaataacgtccggcggcaaacgtgtttgaacatcttcccctcgaagcaccataccaatttcctagaaaaaattgagttttaaaaactgtttgtatatatacccaaccaaaattctatcaaatcccgggttgtttcgcaaaaccgtgttaaacttttctcgaaccaatttgcccacattgcccggtaccaattgcaattcatttccaacatcgctcactaagtccaaacctagaaaatttgcatagaaaatatcgagttttcacaaactttcaatgagtgtgagattgcgtgattctaatttttcaattgctccaggtaaaatgtcaaaatgtgattttataaaggccaaatctccacgaatgcctgaacagtcaaaggcaatttgtgattggcgaatagcatcagaatcggatgggttgaagtcccgaataatcgcaccaatttggttaagattttgacagtaataatccgctgcgttgagccaagtcccccaacgtgtgatgattgggcgcggtgggagagggagatcacaacgttcgcggaatttggccaagcgggatggcgcttttgaaaaagtctttttggtacttgcaatcaatttgtcaacatttggaaagaggccacgaatttcctcgcacacacgatggagcccatggcacaaacatgtgagatgaatgagatttggatagaaaattttgaggcccttaaaaaaattggtttacatagatagcactttttataaatttttcattgttaacctgtgctgccttaaccatgtaacgtgccgcgtcagtgacaagtaacaaaaggtcgtcagctgaaattagctccctcaaattgtcgttgataaagcgagcgattgtttcatggttggttttgtccagaaatttggccgcaaccaaatgcggtttgtgcaatttcccatccaaaatgccaatgatcaaatttgcgacatatctgccacgagaatcagtcgtctcatcaaccgatgcccaaattttttggtgtttgaatttatttttaatctcagtcattttctaaattttaccatctctttgaatggaaagggggataacctgctcataacatgcaggcaaataatttttatgcaaggcatcattatacggaaccactcgcttgcaatatttttccagaaaatctgtaagaaaatttccgctaggtattcccagaaaatactaacctctaaaaccctgattttccaatttaaaaaatggaatgttcgccgaggtgagagcggtacacaaatccattgagaattcatccagttttttcgtcgtttgagtggtcaaaaattgttgttttttgcttccacatggccgcataaaaagttcaacatttgctttgtgtttagcagtttcgttgtgttgtttcagttgataaaacattttagaagggacctgaaaatgcttttcgttgtttatgttgttgtagtcgtgttgtttgtagatgaaaagtgatgctttaacctgctgttgacatgcctgacaataaatggccttcccatcagttgtgtagatcgcttttccgtcgactctgctgatccagtcgttcaaccaagctgattttgattttattttgggcattttcagttacttttatgataattttttgaaaacctggaaatatgtacgaaaaagtgcgaaatatgtaagaaaatatgtacatatgtaatatgtagaaaaaccccgaaatatgtaaaaatatgtat

SEQ ID NO: 10233 - DNA, 1350 bp, Heterodera glycines
  unsure (1)..(1350): unsure at all n locations
tttgtaaacagatcagtcaaggctggaatgcccttgataaaacattaatgtctagctccttaaacacctttaagaaaatattagaattgactctgatttctgaaagcaccaatgtataaaccaattattacttttngaggcatttttttgactttgaccaattttattttcatataattttttcattattgtttattttaacctgtgatctcactcgatattttatccacttactctgcgtctattttactgtgatcactgatcagtcatcagagaagtggtccccgcccttctgatggcaattttttctttatcgataaataaataaaaaaattattaaaaatgtgatttttttaacttcgcctaatttttcagactttttttttttgcattttttcgtgctttttggatttttttttctgactttttggcgattttttatgacttttttagtcgactttttgaagatttttagtgacttaaattcccagccctacttatgtggtttagaccacataaaattttttttaaaggcatttccaggggttttcggggtcgctaagcacgaatctgaactcagattaaaatttcgaaccctaaccacgaattcgaacatttttcgaattttctttgtcaaaaaataactttttttttcgccgtcgccttcagtgaaattccaatcaattttgttaaatttcgctttttccgattagtgattggttatttcttatttcattaccatattaatgatcagcacccttctcaaatcgctgccttaaaaattttttttttttatgtggtctaaaccacatacagtcatggtcatatgtttagcataatttatttttcgaaattaatttttcacttaagcggttagaaaggcacaaatcgggtaaagatcagaagcaattatgtagcatttttaatgggctttccaataataccaaacttgaagaaaagcatccgcacttacaggttgggtattagttgaaatgaatttacccccatttttaggtggtcatatgtttagaataaaattttattttttaaaaatctcaatattttgcagtccaaaaattctgaaaaaattcctgctaaggtaactttgagtgctgatcaaaaaagtcttttacagcaacttggtccgatcgctccttcctggtgatctgaacaccccaatatacagtgaaaaacggaaaatttttcgaaaaaaattcctagggggttgggaaatttttttttggaaattttaagtgggcccattagaaagagcgtaaaattctctaccgatttgctttttgaatgatgggtctacgacttaaacccgctgaggtatgggcacattaattt

SEQ ID NO: 10234 - DNA, 6957 bp, Heterodera glycines
  unsure (1)..(6957): unsure at all n locations
aactccaaaaatattctgctgatgnntatattttctttttattttatatacctaattaattttctttgtttaccattttttattttaaattttttaaatagtagtatttgttttgaaattgtggctctgtttgtaatcgaacattttcttttggcgaaacgaatatcataaaaattataaaacaaaagttaaaaaatgcatgatttatgaaaagagtgctcatttttagcacaaaaatcacctattttaagcaatgtaaatgcaccaaattttccctaaataagctgaaatgcagaaaaagtcattatcggtcattctattttatataaaagagattaaaaacggaaagaatttgaaaatttaaatatttattgaatcttaaatacaaatatgcaaggggtattacttgaaattggagattgctataattttaatttactttagagtttaaaaattttataatttcacattttagataagctttttgcataagatagattgtttaattgagttttctattttggtacttttcatctataagttcaaaaatttcgctacaatctttccatccgagatttttttaacaaatttattttcttgttggcattcaaagcatccatcaattatttttattaaatactgttgtattcaccaccttacatgtaattgcattttaagaatgagtacacatagtttttgagttttttaatatacgggaaatattaaaaaaatgggatttacattaagaattattttgctgtaattaaaagtcatttaatttataattagtcagcatgttagccattttgacacctcgttgagaagttcacggggaaaatgccgccgctttttgtctgttgtactgcttgaatttgttgttaatttaatttttcggttacgcaattccatttataaaaataattaaaaaataaaataaatcatttgtattggtggctgaaataaatcacccgtctcaaaccgacgctacattgtgaccactggtcacagtgtggcattccacctctcatccatccatccctacactctctcgcttctatctttgaatgttctctcaccttcgtttctgattctctgaagatttaaaatataaaaattaattcatctgaagaaatgtattcttttagtctttttataattcttttactttggaaatataaaaggtatttgctttttatttttttgatttatgttgaaacagagttatgattaattctttgtatttttcgggttaaaacatagtcgtcataaatataatcttccgttacttacaattagctggcaaacatatatttccttcttgaaaatcaaacattaaatgttataatattaattataattattataattataatattatttaatgcaatttattacattttgcttaagaatgtctttatactgcttttcaattttagccaattgtgttgagagaactttaaagggaattaaaatgttaataaaatttgttaatccttactgtgtaatttcctttcttataatttctccgttgtagtttttacatttatagattgtgaaatgacattgtttagagctttccatttaaatttgatatttaaattgaaattttaaacataatttttaaggatatttatatttatcaaaaataattgaacatagctcataaataattaaattcattttcattccacttgaccaagttcataaattattacctccattttgaaaaacattatatattattcagaatttttttgaaataaacaataaaacaaaaaatcatagagaattttcattaatattttatctaattcaatataaaaaagttactttagaaatattaagtttaaatttaatgatgccatagaaataacatttattaatttatttagaacaatctttttgcaaatttgataattaattatgtttgctcttaatctattgtctttatgattattttgtactctacaaatatttaaattaaataaaagattataattttaaaaaatcaaatttccgataagtttaaataagaacatactcgtcaccattggcttcaaaatttaagccaaagtatgaaaaaaagaaaatagatttttttaagatttcaggattttcttttactcgtttgggcgtcatgatgtaataatttggcaggctacaatttacaattcaaatgaaacttttaaaatctaaagttaaaaatttactaattagataaactgaaaaataaaacaaaataaatatgtcgataaaaatgtttgcgttttactttgctttttgctcatttattgctccttttccatcccttcccatccctgttctcatccattctccacacattcctccctcccctccctttatccgtcagaaattgattttgtctgctggggtcaattgggggagggaagcattctgctgcaattgggcacaaatgccattattagggatcgtatttttagtggcaaaaaaatcccaaaataattaactaaatagtgacaaaaaaatgccaaaatagtggcaaaaatagtggcgaaaaagtccgaaatagtaacgaatagtgacataattttcagcaaaaaattaagcattttaactggtagcagtgcaaatgtggtacatttctattccaatattttcttagcgaatattgagctagaaaaaaaaatttggggaagaatttttgagaaaattttccaatgcttagggggtgtatttttgaaatttttagtttggttcttaggaatgtatttttcgcttttattgcattttttgggaaattttccaaaaaaccaaaatagtgccaaaaatagtggcgaaacgccagaatagttgcaaaaaactattttagtgttcaaataattttttttagttgcaaagctccaaaatagtgattcctagtgatgaatagtggcgttaaaacgaagaatttcctagctaaaaatgtgtttttcatgcatatctcgtcgaaacaaagccgcagaaaaaaagacgttccctagccattattaattaaaattgaataattttgaaaaacattttttgccttactaaaattacttatgaaaagaatagttaaacattagatcctaaaccaaatccaaattatctaattttatttaatttaacaagaaaaaaagacccgaacccttgggttttgcgggtaaaaaggaaaaaacggggtatgacgaggtgtgaaaaccaagggaccgtcgaccgcctaccctcctgaggaggctaaccccccccccccccccgaaacccaaaaaagtaaaatattttcagtattttttttgaaattttaagcaattttcttatactttgaaaagtaccaaaaaaataattaaaagagcatcacattagtgaacttgtcatcttaaataaaataatcaaatattttataaattaatttatataatttcattatagtaaaaataccaaatctttacaaatatttaaaaggaaataaaaccatttgttaattaagtgaaaaagtatttaagttttttcaattatcatttttgttgttaatacgttatacaagcttagcagatattcgctaaaaaataaacgaacgtattccagcacagctagacattaatcaatgctaaatagatttttaaatattagtacattagtttaaaattgatattaataagttcattatctcattatattaatgtattagcccatttaaatgctaaaaaattaagccagttgagaaatgtaaatgattttttcatgaaaattaattattattaaatttaaaaatacattcaataaaaaagactccacaaagtacacatctttccaaattaaaaataatgaatttacagaaattaatcattgggattgaaccaaaatgaaatttttcaaaaaagctaaaaagaggaaccttaaggttttaaaaattatttattaatttatataataattccggatttaaatgaactttacattaaaagctgatgagaaattataaattaaaatacttttataaattacagccgggacaatagttaaaacacataaaataaagtatatgagaacaaaaaacgttgattcaagttgaatttaatgataataagcttaaatgaatattgtatttaattattatggtcgacaacaataccgagtctaatgggtatgatttaacgagcgcacatgggataattaatgtttctatcgtaattaaaataattttaaaacattctggaaatttaaatgaaacatactcaaaagaataaccttaagtgttattttaaaattaaaaattaataaataactatctaatagaattttaatgtaattatttatacccaaaaaacttgaaataagaatttataatattttttaattcagcaaattttaattctttaattattttcataactattgaaaatcaatccatcagtggtgattaaaattaattttaacatttatatgtttattagtattctcttatatagagtaaagatatattaaataacaatcaaaatggaatattaccagactttctccagtatttcagcagataagaaaatgatgaaattatatgattaagtgaattaaaaattaatgatttcaaaaaataaaaaacatgttgacttttaaattttaaaagcactctcattttattatttaatatattattaatgaaaaattacattttaaatttcttctctcttaccgatattttattatcttattcttttctattaaaataagaagcaaaacaaaaatttaaaaaactaaaaattaaatgtttgtaaactatttcaaggacaataaaagcattaaatacattttataataaattatgatacttgtaaatatctacatcaccatcccataacaccgcctcattgttggccgcggcacatgaccgatctcttaaatacagagataaactaaataagtaattattaaatttatattaataaattattttatatatttttttaaggatgaagaaatttaaataaatttatggaatataaagattaaaaaaagtaattaaattaatttaaccaaatttaatattattgttataaaaaaataagcttcacaattaaattaaaaaattggttgttcttttcacttcaaaaatcacataaaatgagaaacaataatgaatttaataataaaatgaatttatgattaaaacatcatgaaagctaaattaaacaattgcttaaattgataaataatgaaaaattatttataaattaattattatttttacatagataattctgataaagaaaaatgtatagcttattaattatgacgatcattttgcaattttttccttttcataaagttaataaattatattatcatgaaattttctggcctcccaaaaattagaagagatacagctgtgattagaagaagtacaaccactgtcgaaaagctacaataatggttaaaaagggtacaatcatggttttaaaattaaataattaaggaaatcgtttattaaaaagtaagattaaatattgaatgaattccaattttcaaatcgtatatttttgatcatatttatagctatcaaaagataaaatataaaaatattataattattagtcatattttatttaactttaaatataataattattgttttctcgaaaacattttaattataatgcaagtgctgggttgcttttattaatcacttttttttaattccaatatactcatttttagataataacttttttcaattattccaacagtcaattcttaaatttaattaattgtattttttttttaaatttaaattacagcaaatgagttgatttattatttaaaaattaaatggaataaatttcattcgctcaattaaatcgagaacttacttattcgacatgcattgtttttgaccagaaattctcgacgccaagtcttgaaaaaatataatgcaatggaaagaattttaattttctttggactaccgtttgccaaataaaaaatataatcttttattaaacataaagaggatttgtttttatttcattttattatttaaattattaattttttcttcacggtcgaattaagatgctcaatctcttggcaaatatttatcaacggatatttattaaacttcaaaatttaattctttaattgtataatagaattaatggtttcatctgtggcattgttattttaggaaaaagaaattagtttaattacgagaaacttttttgatcttttaggttcaaattgatttaacctaaaattatttttggtttttgaatattatattaaagtaaattttggttttttttatttctcaatccgaatttatattgtaaaaatcttaagaatgtctttatgaatatttattaactagttttttaaataaaatttgttttactttttgatatttgtagatttttaaattaatataattatattaacagttattttaatagtgaataattactcaatgattgtttaattctttacacttttgtacactgatttctttacacaatttatatttattccactgcggacgtgatcagcgagaatgtttaaattttaatatcctactttaaatttatcaaaataaacctattaatatatactattatattttgaatttattattaattatttaataaattaatgtgtctagtttaattttatagaaattatttaaataaacttgtattatttattgttcaatttctgatcaatgttgattattttccaggtcgtgcagttcgtttcttacaccgaaatttcacggcacatagtcacttaaaaatattaaaagtagcaagaaaattcccaggattatgagaaaagttcgttaaaagatcatttcttttaatttattattatttttttctataaacaaattcaggccattttcatgtcaagcagatattttatgtacagataaaataaaagttaatatttatgtaataaatattttttaag

SEQ ID NO: 10235 - DNA, 3248 bp, Heterodera glycines
  unsure (1)..(3248): unsure at all n locations
taaggttcgctggcgttaaacaattttgaaaggcacaagtccaattcgaccatcaaacaggacgaaattacttacagaaaccgagtgagtggaccaacgagattttttggttacgtaaatatttattttcttttcggatttttgtcaacgaaaaacgactcaaaattttgcgtatgtgcaattggcccaactgcgccgtgagggacgagtgcaaggcgcggtttgacgaaatcgcgactcaaaacggagtcttcggtatcactcgcgcggcgtgacggtgttcgggtaccgaactacgaaagtgtgtgcctgacgatggacgcatcggtggtcgggagaaggggcaacgattggcagtgaccacggatagagtttcaaaacatttatgttttttttcatttgttatattcccattaattaaaatttatattttgataaataaatgtttataaatgggcgaagacaacaacaatattgaaaggacagacagtgatgaagtgaggtttaatttctaagagatcatttggcaacgatgaggactaacgtattttacaacaattgcataaaaacagtgggtaacagagagggcagctacgctgtggaggcacagatttaacgatccagttcgaaaggcattgtgagtgataacaatggccacatgacaggaaaaagacggattcgtcgttgtaaattggataaaggcatatagagcatgtgatgactgaaccgctgtccctcatctgaaataaatttgtttaaaagcttaatctcaattactttaacaaaccgcaacacgcattttatcctcactcgcacaacgtccatggtgaacttctgatgatttgctggcaccagccgcgaagaccaaagcatccctgaacgaactttgcataattaagcgagagagggaaagaattggtcatttaaataaccagaaaagtgcattcacctgataccattgacgacgcccttctgttccagaagctgttgcaccgccatttcatacctctgaaaggcattgtgagtggtgcccaattagtcatccgttgccacccccctccgaattcgacctgtttgtatctgacggggtctcgggcgaatacgtacacggggtaattgcggttgttgctaactacagtgaattcatactgtcctcgctcgttcaaaggtccgctgaacagcacatgaacttaacagaaattaggccgtcaattaaataattggttaatcccgcgcaaatgatctcttactgttcacgtcttcctggtgggcggcggtcagagtgattggggtggaaatgttcaggtcggggaacaaagcagccaaaacaggcggcaaagagacggacggaggaaagggaaggccgaaggccgaagtggcgttgagagggtcggcggaagcggaagcattgacaaaggcgaaagagggcaaaacggagccggagatcagagctttcgatcgtacgtcaaaatatccctcccccgcgcgaatgtatcgaatttcgtcgtcattatgcaaatgctcctcaaagaatttgctgatgcattgtccgtaattggccaatctttcggggctaatcacaatttgatctcgataattgtaaccacgtgacagcgaaagcgaagacaaagcgacgcattcattggacaaaaagaccgaaaatgaggagaaattaagtaaattaggtaaaatgggggggggggggggagggaatacgtggaaatattcgacgcccgacacggccaaatcgtccagggaaacgaaaacggaaggacttcgatggcacggctcccgcgggtcatcgaccaaatcactcataagccaacagaggaccattctctaatgacaataaaactttattatcttctgaaatcaatagatttatgtttaacaatgcgataaataaaatgtgaatatgtataaaagggacaaaacaaaaattatatgctctaaatcagtaaaagtaaacgtgatggtaagatgaaatttttttttcaaaataatttttgtctgcttgtttctcaattctatccgtgccgataaacaaagcaaattttgtttcgagcattttgacctattttggtgcataatgtgaattttgtttaaaattttttattcgagtccgggttcggggttagaattgaaaattaacaagggctcaaaacgaaataaaaattataaaaagcacacaaagtcgaaatgaaatgactgcttcaactaaaacccccactatttattggcatgggcactataggccaactccactgtgcagagaaaagcctagtactatctcgtcgtttaatttttctttataattcctatcactttggcgaactatttctttattttttaatagaataaagtatttatttcgctcaatataactttttttctatcaatacaatttttacctaatttggcatatcgatggagaaaaaaatatgaacaaaatgtaagggtttttaaaaacaaaaaaagataatctaaaaagttatggagtaattaaaatttcgcatttctttttctctcctttgacgtactattttcatgtctctaacacatgtaaaaagatggaattcgtaaattcgaatagtttttgttataagggtacaaaatcacctcaacatttagaatcaatagaaaaattattagttttcgcattttagttaaaaacagcagtttatagacttaagttataacttgataaaatgaaagtatcacaacttttttctgagatgtcaaactgctgagcattcacttagaaaaagattctccttttcaaaaatttttttcagatatcaaatttgttcggtttggttgggaattaagcgagttatggctgatcaaattaaaaaatacaaaaaaggcatgtaaattaaaaattagcgcgcaaaaattcacgacaattacgctctttggcgttatgaacaattttgtctgacactgggcttgaccaaaacacattctttaaaacggtaacatgtgattcgcgaaaaaaagggggattcgtccagtgaggtgatttcgcagaaaaggggaattttcgtccagtgagtgattcncgtccagtgagtggatttttgtcagcgacccataaataattttttttttaaaaacaanttttagttaattnaagggctaatagtttattatcccgtattaactgggtaanttttaaatttgataaaattgatanaatcagttcagatctncataaattnaaaatactttatatataaatataacaa

SEQ ID NO: 10236 - DNA, 3511 bp, Heterodera glycines
atatttattttcaaatccagaataatcgaggggacagaacctggagttcggcgatgccgacattcgatatagaaaaatttttggatgatttttctactttcgggagagattcccccacccccgggtatgggtctgattttgaatttgttttacgcaaagtttcataaacttcatgttttttccttgcatattttttgttgatattttaataattaaataatattaaatgcctcatttcgatgtatatgaagcccttttcaatgccatttaaattcattgtaacgtttttgtctaaatattttttttgtggcgacgttatgtcccggcgacgttttggggtgtaccccggtcccttagtctatataaaaaaaagctcaaatgcaaaatttatgaaaaaaaattttcatcactagggttggaaattatatgcacatgcatatttttcctaactgtgtgaggcatgaaacgtacgaaaaacatatttttagcttgtttgaagcttctagaacgtatttccatatgcatcttagtgcatatttcgcgatttatgtgcatattttggcatttcgtgcatattttatatgcatatttgagcattttttccgcaaatcctctattaaaacggccccctctattaaagcggccctttaggttctaatgaccgaaaaactttcaaatatattttttgatttaaatttatgccaaaaataagtaataaaatagaaatgcaccctttttaccaattttcttcaaaataaataaattttattttgtattttgggttttaaaatgcttattcatacgatatttagctattttcgagatttttatgcttaaatttaacaaatttgtaaaattttgccctcaatttggaaaaatttatgtgcatattttgcatttttggtttttatgcgcatattttaagattttatatgcatataattcccaaccctattcataactttgctcaaaagtaactaaattaatttttgatttcattcggcagtgttaaatattctatattagcttttgaaatttgtaggataaaaatgaaagtttagtgctatcaaacgttaagaatatttattaatatgattatttttgagcaaatttataaccaatatcattaaattttttcatataacggaggacatagagctatcgtatgatatagaaaaatgcaaaagtaaaattattcttaagagggtgtttctttccattcattattcatcaatcagcagcttggaacaaagggaaatttatcaacataaaaaacgggcaaaggtgagggggcatttgcgatgaataaacaaaaattcccttaagggttgggttgttgattaatttattttgcttaatttatcaccatatatgtatgtatgaatagatagagcctcctatcgttgcggaatgaacgtgtgtaatgaattttaaaatgatgaatccccccccccccctccttttgcctttgccttttacgcctttccataatccttctccattcagcatcaccaatccctgtgcgtgctgtgcactgtgcgggggtgtgtttggttggcgaatgttcggtcgatcattttgtaatttcttttttccacgctgtcaatgcgtgcgtttcgttggcaatgactttccctaggctcattctgcacaaaattatattctttcggcaattccaaatctttttgctttaacaattgaatattaggccatcttttacgagtttctactttattttttcaaatgtgcctttctcgattgggacaaatcatttatgggggactcgctcttgtcacgattgttctcatttgtgtgtcgatgttcacagacggtgagtgaggagcattttctgtgatggtcagagaaagatttgtttgaatgcaatttaaaaaatggaaaaacattctttgtttgggttccgtttttgtcaaaattttttcttttattgaaccattctgagaatttatttcaccaggcatttctgaatttttgggggaatttggtgcattttataaattctttttacaattttttgctgcgtttttcaaaagtggaggcgcccggtggtgccggaaggcgcccccgggaaatttttggtttattgtgtttaaaaaataaacaaataaaattttactgtattatctatgtatctcgagatcaagttttactaaattcaaatataatgttaaacaaaatacaaaaataaattatttttttaaaatgtgctgctctagttcagtttatgcttccaagcatatatgaatagaatatgacgtggtttatcataaaatagcaaaaattccttgtgttaatttgaatataccattcgaagagaaaacttaagccaaaaacgatttcgaccaaaacattggtcccattttgacattatgtccatattgacattttcccaaaaagcctctattaaaacggcctccttcagctaaattggcctttttgctcctaaagataggaagattttccgaaaaaataattttttaaggaaatttctcgagaattttgttaggtaaattataaattttcttaaaagttggtaatgtgccaaaaataagcaaaatatctcaacaaaagctttcgaatgatgcctttatcaggcgacttttctaaaaatctccaatttaaatcaaggggacttttagccccgttctttcccgataatagtcaaatcccggtcacattcttatttgttgtccctaattactaaaatattcaaaggatggcgcaaactcaattcttcctcgaacgccaccggcactgtgatggattttgttgagaatccgacggtcaatatggggctgatgttctgcaaagggccgacgatgggcgtcaacggcagcgcatcggccgacggtgcgtcggtggcgcacaacgaaaaggaattggtggatgtgtgcaaggaatggttcctggtcagctccgttgaccaattgccagcacaatttgtcccttcaccacagaataaacccgactgggagaaattcgttgtcggtgcgatggtcgtctctttggttttggcctgcctcgcgttcatttggaatttggtcactttctgcgcctgcttttgccactcccacgtgatgaaaccgttgcccgggttggccggactcaccgccatgtgtttggcagtggcactcactgttttctacatgaaaaaccagcaatacatccgtaactcccgttgtttgaatttaggcataaaacaatgctttggttttagcgatgatgaaggacaaacagttcgacaacactgaagaatttcggaagttcatccaaaaactcgacaatgtaaaaaaacgcagttttaataggcttcccccattttgagaaaattttgcttcgagggggatttttgaatagctgatcacatgtgacatccattagagttgtcaaccacttcactttacgtcactgatctgctgatttaggatggaaaccatgtcggctattcctagaaaatgggctgtggcgcggccatcgtcgctttggcgaattc

SEQ ID NO: 10237 - DNA, 2498 bp, Heterodera glycines
  unsure (1)..(2498): unsure at all n locations
tcaattcaataaattgaaaatntaaagactcgagcttgacttttctttccttattacctctattatcaggcccgagattaccatgtaaatcaagaggcacgatgaaagagtgccgcatttatcacagttaagtttttatttgtcattatatatagaaaaacttgcataattttcaatggatttttaacgctgtctttgtgtggtccactatttcatcctcatcttcatcctcagcgtaatcatcaaaaaattcatccatttggtggtggtggtgtctgtccgttcccagatgatacagagacgacccgtgcccagtcgggtaaacttttcctcctccaccgcttccgaaagtgccaattttcccaacggctgatgatgaagaaccatctccggtgaaatattgatggtattggctttgaactgcgaattggtcggcttttcctttacgctgcagggaattgcgttggttagccggttttatggtgacaatcaaattgtgtgcctgaaatttaataaattttatttactacacatgaacaaaaaaaagggggtggggtcagaaatttccctttatgaaaaatgaactccaaaaattttctgaatattttttgtgctcttcgcagtgacttttaattcgataatacaccttaaattgaaaaaatctttgactaaaaatttaatgaatatcgtcagaggtttctatggcatcatgttcaattggagactggactgggcccggtttttacagggcctgggaaccgttctttttaaaaaaaaatgccaacccagtccaggccggagacctagcctaaattcttcaatttcattttaaaatataaaaattgaatcaaaacagtgatgttatttatttatttttggtaaagtctgctaattgtatgaattatgactattagctccaaaagcgtatttaacacaatcgttttttgaatttctacagaataaaccagaataaaaaaatcaatggaccatgaaaacgtacattagcaaccatcatatcagcgacttggtccaacttttttccattcaccttcaaaagattgattttagtaaggatagcaaaagacccattgcctcaatcccattgacttcaaccacttcgtcgccaacactcagtaagcccgtcgattcggccagtcccccttcgacaagccttgagatgaaaattccttcgcatttaatcggcccttggtgagtcatcctcaatgacgtcccttttgaccaataaattttaatccttcaaaacaaacaacttaccatctcttatgaaaaagcccaacttccggtcgtctccgccatatttacaaagtttcactcgccggtggcttgccggcacaacgttaacatcgataattgaagaaacctgaagtggcattggaaaaggaataccatgcaaaaaagggacttgtctaaagtcttcggggttgcttatgttgtaattccttttgttgggtcgcgcattggcggaaatgagcatcgaaaggcctttccgccgcctatctgtggcatcagtgccatacccatatttttcctcccaggattcgccttttcgctgaattaatagctgtaaatagggtcttgctgattcaagagactttcgaaaattctaaaaaataaattaaaaaaaaatccaaataaagtaaacaacgtcatcatttgtgatgggcagcaaatcgccagtataactggtgtaacaaagtgtgaacggaatttggtgtagggaatgcactgtttcaatgaaggagcgaaattctgaaaaactcatgatacgttcgccattgacagggatggaaaaacgacggaactccgaatcgaacttggatttgatctaaagaaatttccaatgcaaaattccactggaatccaagatgaaggaaacttacatgcattaatgccataaatgatggaatgaagcagcaaactaaactgttgatatgtttttacaaggaatatttggtctaaagttttgcgtaatttcatcagaaaatgtctttttctgcggtgcacccagaaatcatggcctaacacagggctcgcattggaaaaattcgccttcaaagaacgtgtagagcatttcattaaattcaaggacatttaaaaagtttcatattcagcatgagcacttttttcggcgcgccttttccaaaatggggaacagtggggtccagcgatgcggccgagaaaattttttaaatttgaagcaatttattaacacagcgtccgggaaatgagctcctgtgccagaaaagatttgcatgtgtggctcagtggtttttgtaagatagtaaagggacaaagggtggtggttcgagtccgttgtgcaacatgaatattttcatttatttttgtccaaaatattaaaaaatcacgatatttgggaattatttttgaaggtttttgccaaccaaattggataatcttggtatctttcgaaagctaggaagaatgagaagctttttctaagcaaatgctaagcgatt

SEQ ID NO: 10238 - DNA, 1319 bp, Heterodera glycines
  unsure (1)..(1319): unsure at all n locations
caaaaataaaaaagtaaacaacaaaaataatggaaaaccacttcacgctaattagtaaacaaaaataaagttcaaataattgtcgctgttttacttaaatgaaaaaattaaagcatgtatgtgaagcgaatgaaaatataatgattctcatctgaacgaagtaataattttaataataaataaaatatcaatttgctattttcttaattaaaagtaaattaaaatcgtttgattgagtttttttaaatatataaatatttattttgatatatttcttttaattaaagttaactattttatttttctctaagtatatattttcattttaatgatagtttttggtatttttattagatttctttattgtatagtcgtcataaatttttgtttgcatattttttattgaaaagcttattttaacttatactttactttattatttatggccctctccttaaaaacaatgcgaagttgatgcaattattatgtttaagttgtattctttaggaattgcatgtattcatatattattttatacttaattcacaattatttgcaattcaatactaccaaattacttattaatttgtttttgtttagcattttttttttattaaactatatcttaatcatttgaatttcttgttcacataaatctcgggtcctttcatgtaaatttttttacaagtgcgtttcttcgatagaagtgcttgttttaaagtattaatttgactttttaaattatgtaatgtttatttgtatagtgttatgaattattctataagtaaataaatattatactaaataaattctatttattaactgattctttataagcatgactagctaatatattggtcttattatttttattatttactgatttgtacaattttcagcgatgttaatactaaattattttaatgaactttcataaaatccaaataattattttttcttcttttctcgaaaattaagaaaaattatataaaaatttttaaaataaaaagataaatatgttttgtaatatttgttttggttaatgaaaaaatataataataaaagaacatgtaaaaataatatagaaaaattaaaacattttcttacaatatagtttatttaacaaaaacttaggcttgataacgttcgtttatccttttgggccaaaaacgaaaccaaaaatcagggctctgaaaaccggattaacgaaaatccggagattttcgttccaaccatgactanaccaatctttttaacccgtttaatcggaaaaatatatttgtttatttatgaattattttattttatctctaatatca

SEQ ID NO: 10239 - DNA, 1132 bp, Heterodera glycines
ccataaaaatgaccaaaataggtttagcatcacattttagtattttaaaaattaatttttgatatatcgatttttgaaaaaaaaatccattttttagggatacattttcaaaaaaactttttaattttcataaattttttttataaattatttaaaatcctcaaaatatgtaaaaaaaaatgaaaatatatacgaaaaattgcgaaatatgtacgaaaaagtctaaaatatgtataaaaatatgtacatatgtaatatgtagaaaccccgaaatatgtaaaaatatgaaaataaaattccaaacttttgttcgcaaacacaaaaaagaaagtgtttttcctactatttagcgcatgaagaagccaggaaaaaaaatatgtatttacataaaaatggaatccctagttattaatttttactttttaaatacattcaaaaaattttttttgaaaaattggtttacttttataatttctaaattttgaaattattaaattatttttatcattttctcaaaatcaaaactgctttatcgttttattaattatgatctttatttttatcttgtagtgtaagaatattctgtttttcgaaatcaaggtcaaaattaaaatttgttattagtaattaataatgttataaaatatttttgcatactttaataagtgaaagattgttaatttttgaaaatttaatgaatacctaaatatggcgatcagcgagtattattttgcgatttagattattgatgtttataaaattaatttttaaacattcattaaatatacgtttgtatttcaattaaataaaataacataacaatttttttttgagtttacggatatctaaacataaataaaataaacttttattcaataaataaataatatatgcgagcgataataaataaattattttgtatttttcaaattattttctactaagggcatttttttgtatatactttttaaaattgtattacatttttgattgccttagtgattcttaaagtgaagctttaatttttatttttactcaatgatccaatattgatgctttcaaaaaataaaattttcatatatttatttcagctttttgaaattattttgtaattaaataataaaatagtgaa

SEQ ID NO: 10240 - DNA, 3328 bp, Heterodera glycines
  unsure (1)..(3328): unsure at all n locations
tagaaatggatgtcagattcgtgatcagagacctcgaaaacnccagaaaaggcgttttacacgattttttaaatttttgtttttgtttcgcaaaatggcggggggggggagacaaagcacattattagcgacgacaactcagttcaaaaaatttcacgtaacacacttaaaattcataagagctaaaaacgaacatcatattcgtgtccagcgcacaaaattacacaagaaaatattatttttcaaaaaatttcgggggatgacaaaaagcccgaacataaatttattgaataattaaataaattaaaataataattattttaaatccaaagtatggttatgtgcacatcttctgacatcagtgggaagggactcttctacacaatttcgtttaatcgatcagtgataatgcacattctattgatcatcatatacatcgcaattgttctggttttaaaattcaaaaacggtaaaaaaataataaatatattgtaacatattctaattatcacccatgagcaaagacgaacccttcacacatttccctttttggccaatcaatgttattcatcttttccacattccccccgttcaccattttattcactatttctcttttctctaactctcacaaatccccgcaaatccccgccccttttccgttcaattgtttcccccaccaatcagtcagtcgagtcggaggagatgagagtcggacgtcggagcgatcaaagacaaattaattatttattaatcattcatttattcgcgcatttaatccgacataataaaagagccatacgaacgattggaccctttggacttcttggggatcagggcccgattcctaagattaagacccttcagtcctgggacaatccgtctcctcccatcccgctctggcatggatcctcacgtcttactgaaacaacgaacagcaaaaactttattctcgaatttattgaattaacacccaatgaaattgctttttaagcacacctcacaccgtctgggtacaataaattatttaaaataaataaaaaataggataattttataaattatattataagatattttataaattttattaaatatcattttttaacccaaatattataatttcctataatataaatacattatcgtaaaggtattgtttcttttattttgataatttatttattttgaaataaacatacaaactaaaacgattataaaaccattaatcttttaataattcatctctcgaaattagaacacatgaggtaagagagtgctacaacggcaagcattactgaggttacataccgttaaataagtaatactctttcttgcattattttaatttttttatatttgaatttacttttttaaacataattttttataattatcttaaaatttttgttggtctttggatgcatgtttatttgatcttcaaaattaaaagtctcttttatcgagcccgtttcaagatatttattttataaatattagtttttaaacagtgtcttaagtagttagtccacggtacccgtcgccgtcgaagtgtgaaatttcacacctcaacagtggccgggttttcacacctcaacgatccccggttttcaccttttttaccgcaaaaatccaaaggtattggctgttttttcgcgcattattttgggggaggggaaggaggtcgacggtccctggttttcacaccaaacggacccgggttttttttttaccgcaaaaacccaagggtatgggttttttcggcaccgccgggccccctcccctcgctcatttcctaaaagttttttggaaaaatgcgccgtaaaaaattgttaaaaatcaattctgatcccaaatgcattgaaatttatgaattgcttatttcttctccaaaattgtaaattcgataatgggaggtgaaaattatattatttaatacaatataatcgaataaattgtaaaaaaataaatgatttgaagcaatttagcaaaataccctgatttttgaccttaaaatctgattttttgcacatgatagtctgatttttgaagattttcgatcacaccgctattttagatgacttgaaccctttcagtaattttgaaactaacccacccccacccccattcaaacccatcgcaaattttggtatataccgggattttaactaattttttatcaatttattgcgaatgggaaagtctacttattttctcacaatcaggaagatttaaccttgtaaataattaattttttgctagatgttcaattttctaattttacactatattattatttagttttgccttttaattttttttatgttttgataaatgaagagaatttataattttttatttaaaatttaacggaccaaaaaatgtgcaaaaaaagagatagaaaattttaaatttatcggacgaaattggagaaaatcttcggcaagaatttgagcaaaaaatgaaaaaatgtatgaaaatacgacagaaatgccatggaattagaaaaagttataagaaaattcaccaaatgttgaagaaaagaaaaatcgaaatgaagaatttggtgagaaatttggcactttcatttcgtcgccattttcataattttgttttgatatcagaaaatccgctctctgcagctcattatattttctaagtattttggtattttatagcgtcgggagttaatctaacaaatatattttaaaatatgaagatgactttcgattttgattaaattaatttaagaaatattccctatgctatagaaacggtcttcttcttcaattttggtcattttcaacttattttgccatttttcctttttttagatttttatttgttaggattgtttaaattttttcgaaattcatattttctttctgatcgataatctttttttaatttttctttttaaattatttatatctgtctgtttgttctgccacccataaatgtaagtaaaaaatatgctcacatattcgaactattcaattgaaaataataaatttattaccaacattattccagaaacactcttcacaaatcgtgattccttgaaactaaaaaaaaatttttttaaatttaaatttctaaaattgtataaataaattctaaaataataattttaaatgaaaaacgtaaaaaactcagcgtaaatatatgcaaaaaaaatatatataaattaattatttgttgattgattttaaattgtcgaaggttttaatataaatttaataaattatagctttaattaacaacagattttaataaaagaaaaataaaaatagtttaatcgataaagagaattattaaactatagcca

SEQ ID NO: 10241 - DNA, 4157 bp, Heterodera glycines
tcatttaatgctgtttaggcggtcaaggattgaaaaaatgtaagtctgaacctaattttggacataggcgcaaatgtccaaggcgcaaatgtgaggttaccctacagagcaacccttcttctctagcacatcgcgttatttttgccactcagaaacaattccgttcttttataggtggtacattctctatatattgtatttgcaatgtctgaggcgaaaaaagcagaattggatgctgataatgaaccgaccaacgagaagacggcgctaagtgaggaattgaatgatcaggaaatacttttaattagtgagttgttaatggagtgggagcgagtgcatagccctaaaaattccggggggagaatccgaaaacttttttgctctccggtccaaaaaattttccaagattcatgaaaacctttgggttcctagggatttattagagcactattgcatgtttttacatatattttttaaaaggtacacgtgaagctctgcattgtttctactgccaaaaatcggaagttgcaacaccaacagaagttttgataagaaaagatggcacaggaattgtaagttttcgtttttgtagattttaaaaccatggaaaataataatttgacattatctttttcgggatttatcctttgtttagggggtttatagggtctgcaaaaattaaaaatgaaccactaataattatgtaaattacaaaaatcattattttacgcagcatttggcaaaccgtgcataatttaagagaatcagccggcgatagtgactatttaaagttcaggcaagaaggcggttccataatccgttgatgctcggccgggacgaacatttattcgaaattgagtttgcgctgactgcgaccattggtgaaaaaatgatattcggccagaacttcgatgggtgcaaaagtgacattgaacaggcaacaagtgtaagaaaatatttaatgttgaaattgactgattttgggcattggtaaaaaattttcctttttcagaacctcaaattaattctggaagaagatggcttgaaaaattttggaagcatgatcgacacaaccgtaattttttttttgttgtaaacagccaaaaaaacaaaattatttggcatttaattcaaaaaatttgcagaaaaaggatcgccacatagaattaattcggttgttaattgctagggatgcgatttttaggtaagaaaaatcccagaataggtacttaaataggtaaaaaaaaatctcaaaatgggtaaataaaaattttttttccaattcttagggtgcatttttgaaaatttttttggtcgattcttatgggtatattttttgattttattgcatttttgttaagaattttttgaaaatcctaaaaataggtaacaaaaatgccgaaataggtataaaaataggtacctaggtaataggtagaaaaatcccgaaataggtaaaaataggtattataaaagtgggtgtagaagctccaaaccaagctaaaaactcgttttttatgcttatctcaacgttacaagtgcgcaaaaattttaggtatttaactaaaaatcgcatccctattaattgcacttgtttaaggtttacaccggtccaagcataaaggaaaattttgacaaaaaattccgagaagcaatggacgaatgcgtaaagcgagtcaaagagctgttggaagcggagggcaatttggtaacaaaaccaaacaaaaaatgaatggaatattaaaattttaggagattgtcgaggcgctcgctcggcgcatttccaaaagcaaaaattggacaatgtccgaagaggaaattaaaacgtttttcgagaatccgatggcggacaagaaacagactggccgttgaatgatttaacatttgccactgccggaaaagcaccaaaatatttatttacatttctatatatttttacaaacaaaatttctgataaagatttctttattttatcaacacccctctttaaaaaagcgtaatgtaaaaagaaaaataggaggagaagaaaatggctcgtcacacaatcacaattaaagttagagatgagaaacaaaatgcttaaaaaacaattacaattatttattgtttggtcattgtctgtttttgcctccgttattcgcctttggcatcggtcggtcaatttgttaattaattaattggtcatttgctgaagggaaaaatgaataaattcttttcattttttctagatttcctttttcacctttttccctcttttcggattctccgtcccatcgctgtgctcattttcttcgaccttaaatttaaaaaattatatcacaaaatccgattaaaatccccggggttttggatattttctcatccatttttgttttacttgggctcggaattggtgcgcaatgtcacgaattttgagcacaattcgattgtacgcctcggggccgcggtatttgaacacgttgaaaagacgcgccttgacgacgagcagccaaaattcatctgaaaatgaaaaaaatgagataaatttttggaatgaaaatcgggaaaaataagtatttaaaataaatgtttcgcttttcctaagctcccatcaaaaaactgctgataaaagcataggaaatggaaaatgaaataattttggacaaattttgttacggcgaaagcaaatttaaaaaggcaatcaccgagaactggcattgtccaacagaagaattacaaaaataaaattcgcaccaaaatcctcgggaaagttcggcacgcccattgctttttggcactcgaaaaactcgcgcagttttggcatagaaaagtcggcgcgcaaaaggtcgtccgcgctgggctcggcggcgtcgccctgccgtatcatttgctgctgctgctgctggctgagaatgagcgtggcggcggagccgatcaaatccaagccggcggacgaagcgttggagggcacgtcgaagccttgttggggattgactaaattaaccgaagaaaatggaaaaattgagggggcgtggggaattcgtatgaaaaggatggaaaggaatacatggcagcaattttttaaaggtgtggattggaaactcgggtaatagtggcatggtagcacactttttcgaaaaaaaacccaattcattttaggggttttctgggtcaggaatccaattctgactgaaaatcaccaattcttcaatttctcaggccctgaaaatccctaaaattagttcattacgggaaaaaaatttcggtaacaatttgtcagacgatattgcatttttcaaaattgctaaaccattcgaatcggtgactgacgtggcgcccgaagtgtcaccgtccgtttggctctgctgctgttgaagaaaagtgttttggtaggcggccatacgccaccaattctcggccatacaaacctaaaaaacagtcgaaacctccgaaatttgaattttttctggggctcccaaaaagcacaaaaatgccaaagacctcgcattgaacgcactcgcatggcgacgcgtcgtcttcctcgtcatcacccgccgcacctccgccgctcagttcgtcgtcctccgtctccgccttctcgccgcccgagtcgctgctagccgcgcccgaattggacgacgccaccgcggacgaatgcgattggctgcccatcggaatgatgtcggccgccgcacttttagtaggctgacaaaaacatacttacaaaggagaggcgaaagaatgcacaggatcactttctaatagggaaatattgacagaatattcagctaaaaacgggtttgatcatttttagcgcatttttaaaatggcgatgagtggggttgccgctcgctgagctcgccgaccgtgctgccgcgtctgtcgtctgacccgttgaaccccgagatcgaggcgttcggcaacaagctctcggtcttctcgtgtccatggtcggccggcgatgaagaacgctagtcgtagaggccaggagaggaggagtgcggtgagtcggtagccgagatttaacaccacccgggcagaggagcagaaacagacgacccacccgatcagacgactgatcaacgacccggtgatgaatagcaagaccagggagagccgggggtttacatgtccaattaccaagctgatcgacgcagagggagaaaccttatcaattc

SEQ ID NO: 10242 - DNA, 2105 bp, Heterodera glycines
cataaagcactcctgattttccacgtaacaaagctgttgccaatagaacacaatgcgtttgtgcaataaatccaaatactcggtaaatctggatgagcatattgaattaatcaaatatattcacattaaacctgataaatgcctcgcggtgccattttgaaagtgccatcacaaacaatcgtttccgttcgtttaaaaagcgccaactgacggggcgaagaaaagagtgccatcacgtccgtacactctagcaaaaaaagttcttggaagtgatcgctttcctcgtgtgcaattcttccacgataagtcagccacagaggcttgcttatttcttgctgaagttcctgtaatgtccggattttcatcgtcctctttgattgggcatagtacaacgcctattgagatttaaacgagcatattattaaaaattaaatggacttaaaatgagttcctaccttctttgttgccactgcattaccacaagcgctgtccctgatttccgctttttcctgagtaggtaaaagtttgtaattttcttccacgatgcattcaatgcgcactttcgccgatgcaatgttttctctggacccaagtgccagttctgcttgcactttccgtcgttcctaaaattcaagtcaaatcattctctacatattatttacacctcaactccaagaacttctgtttttcgaatcggttcgcaaaagtgagggtactttgcaccatcgctggcccatgatccattttcaagcacttttctggttggtaattttctgtcgcttggtgtccgaaacacaccccttttcggaccaatttcaccatttcccaacccaggagaagtcggacatcggaaccggaaccgagggcgacatggttggacgagttgagcgcgtacaaacgagaacaaaggaagagtggcgaaagtggagggaaaagaaagggaggaaggcatgaggaggaagttgcgaatggagagggctggcaaatctgacaacatttaattcgatcactcaattctgcccaaattctgcccaaattctcatttatttttattattaattctgctttaattttaaatgctttttcgatcatttaaattattaaattctatttttcattttctctcttgttatctccgacacatatctctcgcaaattgacggcggtctcatccgccatatttaagccattcatttttttcccatcgctctcttacattattcacttaaaattgtttttaatcgacaattccgcttttttgcaattctcatcacatttttgaaattaaatttcttcattggaatttcattgaaatttgtgttttgcaaccagcaaaccggaggttttctgagcaagttttccgccacacaaaactaaactgctcgatttcaaattttggcggaaaaccggttccagcctaaattacttcaattaattttgtctcatcaaaatttcataattgctttccccttttacaagtgaaaagtatctgacattggcaaattggaaattggacgcgcagaacaaattgcaaattggacgagccgaacaaattgcaaattggacgagccgaacaaattggaaattggacgcattggcaatttggacattggacgcatcgaattcggacattggacgcatcgaattggacattggacgcatcggacaattgacgcatcgaggaccaattgagtgcactgtcttggtgcacgtctcagcgcgccggccaaccccatctaccaagacgtgctccggacacttggaacatctttccggtccttgattttccggcaaccagcacatacaaagcgttgaccgtcatcttttttgactcctgcagatgtccatttgtagcaataattcggattttcggagcaatcagttgtcataactgttttagaaccaatacgcttgctatataatttcattatggcactaaatataattgtttacgtttttttataatcaagaaattatgaattagaaaattgcaggcaaaaaacgaatcgggataataaaaacgaatcgggataataaaaacgaattgggtgaaaaacgaatcgttaccaaagcgaatccgcagaagacgaattgggggtcgatca

SEQ ID NO: 10243 - DNA, 1687 bp, Heterodera glycines
  unsure (1)..(1687): unsure at all n locations
aaatggtatcttccattttctaaattgtgtcatagccaacttcngattttcttacaaatttccgcataaatttttctcccattcttttggcgaatattttcctttttgtttgtattcatttgacatttcaataaatttttgaacaattttgattttttcttcatcagtttttgatttataacttttatttttttgaagaccaaattctttgatccatttataaatatatttccgatttgtccccatttttttcgctatttttccatcaattttattccattcttttgctgaatgttttcttcctttttgctttattttctcttttattttataaaattttccaattatttctctttttttgagttcatttcgtttttcttcttctttttcttgccatttttctccaaatatttcgccaaatgacttttgttgcaattttttcttttctgatccaattttgacaattaaaaataatataattaataaaagtagcggaaataatttcatttttgtcgtctcgaaatgattttattttatttttcttcaattaaatggcaattcattttttgaggcatttaaatgatattttttctgattaaaaaactgaataaatcattattttaccaattgctaaattaatgattaaataaaattttattgttattttaaaatttaattataaaatgtttattaattcacaagaaaatccgccgtaaaaaaacatgctttttattttattcaaaattttttatatattttttttctaaataatttgtagatagatttattatatggacagtcggaaatcataacaatgatggttcgttactaagaaaaaattatttacaatagaagcaaattcagcgtatccaattgagaaaaataaacggattttatgccagttattttgacaatggttcgataaaatgtaagaattaatcagtttttatgtcgtaaataattttcttgtttgaaaatttatccaatttttcttataatcatccatttaaatcctccaaaatctctcctccaagctgtttcttccattttgaaatggtcgttctatcaattttcataattttcgcgatttctttctcactcatttttggattttgtttttttatttgccaataaattttcattttttcaattttttcttcctccgttaatcttttattgcttatgccaaattgtttcttccaattcgtcattgttctatagccaactccaattttcttgccaatttcttcataattttggtcccattcttttcttgaatattttcttttttgcttaaattcatttgtcattttaatgaatttttgaataatttgacgtttttcttcatcgcatttaattttttgaagaccaaattctttgatccatttataaattttctgtctatttgcccccaattttttcgctatttttacttcaatttttctccattctatttctgagtattttcttcctttttcctttattttctcttttattttataatatttttcaattatttctcttttattcttctcatttcgttgttttccttctttttcttcccatttttctccaaatatttcatcaaatgatttttgcggtagttttttattttctattttaatttgattgatttcaatcagaaaaataaaattggaaggtataataggcggaatttcatcttctt

SEQ ID NO: 10244 - DNA, 4163 bp, Heterodera glycines
tttgtatgtaattaattcatttaatttccatcatttgtaattaattcaatttcattataattgccgtccctcttaaaacgcattccattcccagcaaagcgattcaaagctctaatgacaatgttttattgtgtaatttcaccacatcactgaatagagcacatcccaacaaatgattcattgttcatttttttacaaagaccgaatgaataaattaataaatattgaaaatgtacaaaatttgtataaataaaatagcatacataaattatgtaatacatacagcaaaagaatgaaccggctattacctactatagtttcggagaagcttatcaaagtaattaaatgccaaagtcgtccttcgtgaacttcacaagtgccatttcccgtccattttcttgcatttttcccaacaaatccatcacttcactcacaacggattggtgcactttgtcaattggtctggcggcgtcgattcgctatgatttagttgattacatcgcctattaattattcccatttgaccgcactcactcgccaaaaggaagcgttaaaaagtgtgcccatttgcgcgtacactttgctttggaactcgctccgttccatcacttccgaaccgaatccgccgcgggcactgacattggccacgtcctaagaaatgaaaactgtgcaagaaacaaaatgataaaggaggcagacccgtaaccaaaggggctctaatgcactttatgagtccaatcaattgacaatcccgggtttttatacaataactttgttcatgttcgaacaaaccctatctttttggtatcattcgaaagcacaaagtctgaataatgtaattatacgagaaaacaagagaattctagcattccaagaaagttacaaacgaaaataatcagcaattacttaattaatcaaatcttttttggtgattgcctgaacgctgcgattttatatattttagcttcgttagactgtgtgctttcgaatgataccaaaaagataggatttgttcgaacatgaacaaagttattgtataaaaacccggaattgtcaattgattggactcataaaggtcgattggactcataaagtgcattagagccgcaattttaaccaaattttaagtatgataatcgtccaaaaataaacgcactggtcttcgttgctcagctccaatgttgacacatatttccgacgtaaaaccgaggcgccaaccatcgccaatttgcgtccatagttgaacaaaacaccgacacacatcaatccggcaccgccggtgaacaacggatttgcggtgaacgcgtcgagaaggcttccttttggggcatttgcgagtgaagcgcccgcttctgctgacggagcggacgaagaagaagggaaaatcgatgaaaaactattcatttgagcaaagtgctaaaggactaattaaaagaaaaggagcatattcatattctcaattcaaaaatagcctaattgaatgaaatagaaatgcttaaattatttaatttttttgtttaaaattaaaaaattgataattaatttggcttggctttgcaatttcattaattcgggattatctatacatttagggcagtatatgtatctattgttttgagatgaatactgaaaacaatgaaaatcacaccaaagagacttatttctcgcacaaagagcgaatgttcccggaattggatggaacggacaaacgacttatacccactgaacagtttttaatggcgtgccagggaattgcggaattcgtcggtcatttgcggcctcatttttattgaccgtttatttaaataggttttctcggcatggcttttgtgccggtgaaaaatgacattgccggaaatgtgcacaaagtaaggacaaaatttgagacggaccggaaaagtatggaagtgctccaagacttggtggacattgacttgatggaaaacggtggaaaaattggcaccgccacggaaggtcttttgtggctgaagcggtgcgttttattagtaatagaccaacaaaataatgtgattttaccaattacaaaactttccctaaaaaaatttttttttttgagaaattgtggatgatttttatccgaaaacaaatgtgcatccttttacagggggcttgaatttatgttggaattgctgaaggcgttggtccgtgactacaaaaaggcgcgaacggatgtcggcgcagcaaccaaaacggagaatttggcggacattcttaacgaggcttatgaaaagacgcttaaacggcatcacaattttatctccaagcaactttttaaagtgtgttatgcgaatgaaagtgtgtggggggataagatatgcctttttaatttgtcttaattaaaaatcaaaatgtttgtaggttgttctatatgccgctccccgccggcgcactttgttgttggctgttgcatacggccacgaaggacttgaagaaatttgtgttgaacacatcgctgagctgctcacgaacttcgaggctaatgtcagtgcactggtcgattattaccattcaaaaaagttggaaatacctcccccaaaatgaattatcttataaaatattcaaccacccattcctttccaactctgtttttgtaaataacagtattttatttacgataaagaaaacagtgttcccaagtgtaatgagttttgcatattacgggggaagggtgccaagtcccctatgacaaaaaaatcagggaaggaaagggggtaccaagtcccctttacgacaaaaacgggggtgccaagtcccctttaaaacgggggtgcaaagtcccctttaaaaagggggtaccaagtcccctttacgacaaaaacgggggtgcaaagtcccctatgacaaaattagggaaggaaagggggtaccaagtcccctttacgacaaaaacgggggtgccaagtcccctttaaaaagggggtaccaagtcccctttacgacaaaaacgggggtgccaagtcccctttaaaaagggggtaccaagtcccctttacgacaaaaacgggggtgccaagtcccctttaaaacgggggtgcaaagtcccctttaaaaagggggtaccaagtcccctttatgacaaaaacgggggtgcaaagtcccctatgacaaaattagggaaggaaagggggtaccaagtcccctttacgacaaaaaatggagggggggggggcaaagaaacaattaaacaagggaacactgagcaaaaaaaaaacaattatgattttaaaacttaatcatcctgctccatcgaattgatctcggccagcacagtcacttcccacttgtcaatgctctcttttggaaccacctgaaagaaacaaacacttttatataataactaaaatgcgaaattcgttcaaaaactttaaaaaaatcagttgaacggtacttttatggtatgaaaactctaacaaatacgcggaactgttttccctgtgtttattgtgattcatgcaccaattcgattaaataatttaaatcgaagaattattcttatttgatgatataaacttattcagcttgtaaattgattgcttgttcgtaatgtattttcggaacacttaccgtaaaaagaccgtcgctgtcctcgcccacccacgccatctccacacgttgccccgccgcgccctcgtcccgaaccgccaacaatgcatgcattgccttctttgccaactcctccttgctgagtttttctcgaccttgcatcttctcaatctcagttttcgcagcctgtgcatttttgctgaaaaaatcactattattttaaatatctattcttaaaacaaaattcaataattgaaaataacacgagaatcgagtggtgctgttttgaaagtgaaatttggcattaaagcgttagagaagaactgtctttgtcgaaattaacaaattcattgtaaaggttccgttccaaaatatgacattctcatgcgcaaggactagccgtttttaaataatctgtgatatgaaaacaaccaaaacaaaaaagattacccaattacccacgagtggtatttgagacactgtccggaaggctcaacgcaataaattgacgacccgacctaaacaaaaacggaataaaaaatataaaatgaaaggtaaacctttcgatcccattggacaaaaaacattgacactccgta

SEQ ID NO: 10245 - DNA, 1248 bp, Heterodera glycines
ctaaaaagtaagcatcaggcagaaaactttcgaaacaaataggtgtaatacatatgcatatgtaacataagtatcaaaagaaattttatcaaaccaaaaaacactgaaaacagtgaaaatatgcttactaattttgaaaataagtttgactacataatgccaaaaaccaataaaaaaatttttttttattcataaattaaagaattcctagaaataaacagctcttgtattgttacgggatgtaaatattagtaaagtttgtcaataagttcttgtttattgtgcgtccatggccccacgaaaaccgtttgcatccgttttggtcggataaaggatatccaccagaaagggctcatcgtccgccgcgtatttggtcagcggaatgtcaaatggagggaaaagagctgaaaaattgtgtatgaaaaagtgaaacacaaaatgccactccatcaaggggagaataaatgctttaaaacaaaaaatattctaagtgaaatagtacatgacagtgattgccccagcaaaaagggagtgccacgaccaccaaaatttcctggggcaatcattgtgatgtgttttttcgcatggattccgtgatatttcgttgttttctacgcccctgggttcgtaaaaatagggatgggtcaacaaattggaattaataaaataaagaaatcaaataattttgcattgaaaatttaaaaaaagagttgggttttcaatcgtggaaatggccgacaaaaaatggcacagattttctttaaaaaatggcaaatgccacaatttgagccctattctcttccgccccgattttccgtcacccattcaaaaactcccgggaaaaagttttcgtttccaatacaaaccgccgccgggggattgtcggcgaagatggtcctttgcacatatcagaacgccaagttcaaaggagcggatgaatagttgggtgccgcccttctccaacttgccccaggcagagtgggacaaattggcactggtcagcagcagccattggcactcgccagcggcgtccaacgcgacgtaacttttcacgtggggcgaagcggcggacataaaacgggcgaggggaaatcaacacaaatagagtaaatactgacaggattatgtacggaattggtcatgaaaaatactcattgtcagataagaattcaaagagaaaaataaataaaaataacgaaaggcccgaaataaaagccccccaaaaaccgaaaatgaaaaataagtcat

SEQ ID NO: 10246 - DNA, 5387 bp, Heterodera glycines
taaaaaactggctttttaaaaaattacatcgctaaatttggaactttttcgccactgttttgccatttttttgtcatcatttagttaattattttggcattttttgccactaaaaatccgggccctagtcatgaaaagagggaattgatgattatgttttgtatctttttgtttaggtaagtgtcatggattgaatttagtcagtttattttaaaagattacttcttttttttttgtttatttctttaattggattaatttaaattgtaaaatttacatttacttttttttgttgttgtataattagggctgggaacttaagtcaaatttttaattagtttttttttgtcttttttctcctttttgggatttttatgtttttttctcacttttaaggcaaaatttgaaatgcattaaagaaaatgccgaaaaataaatcgttcgatcagtgaaagggcaattgaaatccgatagaaattttcagtaattgttaaattaaaaatgccaacgattcgatgagatttccgttcccttaatgatagagaaaaaagtgtccttattcgaaaagtttaatatttcatatacaattgaaatataagcaaattaacttttttgattaagttacgtgttttgctggctaaaatgggttaataaaatttttttttgcctattttgagattttttgtgcctaaaaacgaagccctgctgataatatacaatttaatagataattgtccattccggcaccaacctttttaataatctttttcaaacaaacattttcaatataaatcaaaatcaaaataacaaataaaaatcaatatagaattaaaaaatgtattcaatatgaattgaaaaggcggataaggtgttttcatcaattttaaagaacatcagagcatgtttcttctgcagatttggctaaaatcagaattcatttaaatgaaatttatggaaaaatattttgtgagaataaaaaccaaatttattttagtggtattctcatttggacatctaaaatcctcatttgaaatgctcaaataattataaataatttatcctaattactaattactacactctcccgctttgaatgctgctgtttccccgtttccgctaacaaataagcaacacacaaaatgtcggtgctgtcgggccgcatttgaaaatgcttgtaccttccttttttcttagctcttttgcttcgcgattagacaatttctaaaaaagttatacatgaaaattgcgaaaaggtcgaaatttttaagttttttcttaataacaaattcaggcttgaaaatcttttcgctttttctaagtctaatagagcatgtgaagagctttcgaatgataccaagaatgttgaatttggatgaaaaagaaaaaagctatatttcggaaaagcatgctggggcgggtcggggtcactttggcgcagccactttggaatttttttttaaattttgaacaaacccttgtcaaaatcaaatttaatattccgatttgagtccagggttcgggattgagcaaatccgagtccatattcgtgatcactgatcagcaccctcgaaaacgcattggatagtatttttgaatcaaaatataaaagttaaatagggatcatattctatataattgctcaccactgcattagcatgctactatgaaagaaatggcatcatagttatgcacaataaaaggcaaattaaaaattttttgagatatttaaacattggcgccaaaaaagccaatttataacgtgtgccaaaatggccgcgccaaagtaggcggttccctgctggggccgaaccgtgggggccgaactgagcgagtccgaatcaattacatattattataataaacaataattgtgtcattaactaattgacaaactcacgcatcgtgcgtgagtcacgcagcattggtgaagcacaacacctaattaaatttggttaaaaaattgatgaatacggctaaattaaataaagtgattttttcctgaatttacacagacatggtcttctgctgtttgttgtccaattctttgcccttttgttcaccaaattggcattggcatgaaatgttctttagaggatgtgaactgcacaatctcaactggaaatttataaataataatcaaaaaatttaaagaaatttttcttatatttagagcacgactaaaaaggcacaaaaaatcgcgaaaaatgcattataataggcactaaaaaatttaaaaaagcattaaaaggcacgaaaaaggcaaaaaaaaaggcgtttaaattgattaaagttctatcgaaaaaccatttttgaaaatgtttttttcttagataaatattgacgatttaaaaatgattttttttaatttggatccttttgtataatgttttttcccaaactttgaaaaatgcattggtgttcggcacggcacacatgcgaactctgctcccgttcagccgttttctcgatcacatgggctagaaatgcagagggattagccaccacagtaatggtaatcagtggtgccagcattaaagccccagcacttcaatgatttaaattagagaacggcatggacctggatatagggcctggatttttcatgaacctggattttcctgggtttttaattaagaaaatccaggcccagttctaacacagaatccatgtgcattcctttttcaaaatatcgatctctatttaaaatacaacggagcatttacggcatttttttgttcttttatttcagtcaaaatttcgtgtttttcgcgaaaaaaataaaatagtctcgttgctgatcacaaatcaatctttcctgtatattttgcatgccgcactttaatgtaaaagtgaaatttaaattgattgaattttggggacgggggttcgaattagcaaaatgaatgtcagattcatagccaagtgacataaatttgtccaaaaaatttaaccaaaaaattctttgacaacattaattaatctttccgtatcaaaaactaaaaaagtgccaaacttacattgtcgataaagtcggtgacggccgagaaaagttgcccccggcgagccaatttgcaggacaatcacgaaaaagatgagagccaattgtcgagacatggttttgtgtgtattgtttgcttttttgacggttttgctaaaaaaaataatttttttttgttatcaaattggacggacaaaaaatgtacgattagtgaaagaaatttattaatgagcaaaatgaatgatcaaaaacaaaacgaatggacggacagatgaaaacggttcccagtgataaaataatttcgtttttgaattacatatttgtctcaattaattaataaaataattaaacaaatattattttaatttaataaaaacgatacggccaccgttaaagcggtaatgggttctggcattgtgccaaatgggcatgcgtaattctcaaatggcccatattagagtgcgtgataaattcttcatccaattttgccacgtattcttttacctgaagaggaaaaagctgtcatctgttttttaagctctcaaaaggctctttaaattgagcaaaaattcaaagatttctcacgtttttgtgcaaaattggcaaattcattctcggcacaaaaatacaatgctgggattgttgttgccgccaatgaaggaaaaagcaaccgaagatggcgaaccttaataattaatttttatttttaaaataaattaaaatttaaaaaatgtacacttaaaagaaaaattaattttttaattatttgactatacgaattataaaaaaataaaataattatgaatgaatggacaaaatgaatggatgggatggttaaagcaaaaatgaaaatgattcccaatgaatttatgtttaatgttttccgctgattcatttagcacaaatgctttacagaaatatttttcccataaaaatgataattaattataaattcataaattacagcgtaaacaaatattggtataaaaataatttgttaaattttcgttaattaattaaaaaataatttcacacaaaattgacttattaacctccaaaaaagtgtcattaatagggggtcggaatcgtcggcaattaatcattctcgagtttcagcatataattattttaattcttcacgttcaagagtcttgagcatttttagaataatcctgccacgattgattaattaactttattaatttggtttttaaggattattcaaataaaatttttgaataaatgagaagactttccggacaactcaattcataaattttctatggcacgagaatagcctctgggggaaactttttaagttttcggtatttttcttatgaatttttcgaaattgtggatagaaatgctaaaaagccgaaattcgttttgaagtggcaaaccaaaaatagattaaatttaggtgttaaaattgactttaatttaaaagtgagcggaaatttagttttttttcgtctttctctcgtgaaatgcaaccgcagaaaaataattatcaaaacaaaccattattgatcatacataaatattaattaattatccattttacaccaacctttttattacttttcaaaacaaaaaaaacattttcaatataaatcaaaaataaaaaaacaaacaaataaataaataataaatatcaatatgataaagaaaaagtatatatcaatatgagatttaataggcggataaagaagtagtgttcatcaattttaaagaacattcaatttgtttgtttctttggagatttgagctaaaatgagaatttaatttaaatatatttaatgaaaaagtattgtgcattataagccaaatcctaatcatttgtgagattaaaaacccaatttgttttggtaaaatcctcaaatacaatattgttaataaatagggatgccaattttatgtaaataaatatttttacctgccttctccatgctctaaatgatttttatactattttgaggatttttttaaaagtccaaaatttcggcaaatttttcattttttatacatattatgagaattttaaaaattttttagaagtttttggaatccaagggtgctggtgcatttcctaaaaaccgccacccatgcgcgtttcctaaatccgccaatgggtttaaaaacaaaaaacgggtaacacatataaattcataacttggctcaaatttatccaaattaatatttagtggtgccattcaatagctttaattgttctctatcagaatatgagtattcgaaattttttacttaagtataaaaaaagttattgttataaaatttaaaaaagtattagatccgaattttttgctcagaacttttttgaaacttaatgaaatgttctgacatttaaggtaaatagagaattcttagg

SEQ ID NO: 10247 - DNA, 693 bp, Heterodera glycines
caatcactgggactctattctcctgcgttccaatcactgggactcaatccaccagcattccagtcattgggactctgttctcctgcactgcattccaatcactgggactcaatccttcacttttcacggattcttcggcatcgcaatcaccgaggactcagttctccgacattgcaatcactgggactcaattctccagcatttcaatcacccggactccgtttttatgcattctaatcactgggactcaattctcctgcatttcaatcactgggactcaaccctcaagcatttcaatcactgggactcaacacaccagcatttcaatcaccgggactcaaccctccaggacttcaatcactgggactctattctcctgcgttccaatcactgggactcaatccaccagcattccagtcattgggactctgttctcctgcactgcattccaatcaccggactcaattctcctgcattccaatcactggggctcaatccttcacttttcacggattcttcggcatcgcaatcaccgaggactcagttctccgacattccaatcactgggactcaattctccagcatttcaatcacccggactccgtttttatgaattctaatcactgggaatcaattcccctgcattttatctttgggactcaaccctcaagaatttcaattcctgggattcaa

SEQ ID NO: 10248 - DNA, 3211 bp, Heterodera glycines
ggctcaattctacggaatgcaaatcactgggactcaaatctccggcatttcaatcattgggactcaacccaccagcattacaatcacttgtactcaaactcagcaatccatcgacttctaccgcattacatcactgggactcaattctacgacattccaatcattgagactaaaacctaggcatttaaatcattggactcaaatctccggcatttcaatcaccgggactcaaatctccggcatttcaatcactgggactcagaccaccagcattccaatcactgggactcaaatctccagcatttcaatcactggactcaactctccagcatttcatctccgggactcaatctcaccatacgaatgtaaaattgaaaaaatgcaaatgacaaattttttactgatttaaacagaaatcaaaatgaaaacgaatgtacaaactgaccttataccgttatttgtaaatccattttgtaaaattaactcctctgccaatgagaacagtaaataagcgataagtccaaccaataaaaacaacgaatgatccattcaaaatcttttttcaaactcttttcaaatttcaaaacgaattctcgaaccaaaactaagatcaaattctcgagtcaaaattaagaacgcattgagtttgccatattcaaaaacaaaagaatactcacaacaaaattaattcataattaatcaaatcaagttaatccacaacaaaggaattcatttacaaaacaatttcttttttttttacaaaagaataagactattcatttccaaatgcatatttactaaacaaaaactttttctattaaacaaatacaataataaacttctatttctttttcatcattattataaacatacaaaacttcttttcattaataaataaaaagagaaatttattttaactgtgctttttgcaaaaactgacgaaaacaaaaatgaaaaaaagcaaaaccaaacatttcattttcaaattcatttttaacgcaaaactcaaacaaaacgccacactaattcaaacaccggacacacacaacagacactcaactttattatataagactaaaatattaaataattgatttttctcatttttctttaaaaattttgaaaataagtgatttcgattaatgttgattattgcttaaatggatgaatttttaaaattttttttggttatcttatatttaaaaaaacgcccttattttactataattttttgcacttgaaaacaaataataaagttaattatttagtaaaaaaaaattgctcgttcgtcgtccattcttcgtgaaaatgctccaaataagcaccacatctgaccacgtctagtggaaaatgccagtgataacattgccggcggagttggctttgtatatggccgattgggaccactgctgccaaaaatgccatcgcttcgacacccataactagggctgctaattttatgtaaatacatatttttttcctggattctccatagcctaattagtaggaaaaacactttcttttttgtgtttgcgaacaaaaatcgggacttttatttacatatttttacatatttcggagtttttatacatattacatatgtacatatttttatacatattttggactttttcgcattttttgtacatattttgcaatttttgaagattttttaaggaaaatttttagattccccaaaaaaattgcaatttttcgtacacattttcattttttttcatattttgagaattcataaaattttttgtgaaaaaaaaaaattttgaaaatgcatccctaaaaatcgattttttttttcaaaaaatgagatatcaaaaattaatatttaatgtactaaaatgtgattctaagcctattttggtcatttttgtggcattttgtgcctgtttcactttttacgaagaatttttacccaaaaaattaccatttaaaaaattttatcgatcagtttaatcggaacccattcaggcaaaaatgttgtcgatgatgaagagctaaatttaaaagcaaataaaacattcattgtattatattatatattcacactttttaaaaagaaaaaatacaattttttaaagccatggccaaaactttggcaaatttggttaaaataattttaaatttttaaaaacatggaaaaactgacactgaataaagtccgaattgtacaaaatggtcgcatcgtccggcatcaaataagcaatccaccaagaaaaggttgaagtctgtgccgtgatcagcagtgaatcgcatgccaacacagcaaaagcaaaatcatttgcccttggcattgattttggcaaaaaaacattggcaaaaagcgaaaaataaataaaaatttatttaatttaataagcaaatatttaaatcattctttgcctggccgttgaatgataaatccgtcaaaaattgcttttcttctcccagcaaaacaacagaaacgaaaatgttgccaaatttcttcttgaatttaattgcataattaaaacagtgaatgaatgctcattaacgaacaaacccttaaatattcaaatccaaattcaattcctttctccgtaaaatcctttttcgattcccaaccgaaattgacaaagtctcccattcgaatgtgcacgcaaaatttgtgcgaatgatcatctctgaaaagaagaaaaacagaatattaaactagtaaattcaatatatttttattttattaattttacgttttttaaaatgtattaaaagtgtaattaatgaccgtacgtaataaaatattgttcattttaaaaataattaattattatttttttataccaacccaaataattcatttttgaatgccgtaactcttttacaaatgccttttccaaactgaaaaatttgacgaatttcggtcctccgactttcaaagtatttgtacgattggagacaagattcgccctgaacaattcatttttatcatgtttaatacagtaacaaaggcttacatccatttccaaatatttctgtttgattcttgaaatcgcaaatcttaaaaaaacaaaattcggaaattacttttaaaaaatggctaacgcattttgtaattttgaaaataaaattgtaaaaaataatttttacgtgttttgcttcctaaaaagcattaataaaattttttttgcctattttagtgcctattcgaggatttttgtgcctatttagcgattttttt

SEQ ID NO: 10249 - DNA, 914 bp, Heterodera glycines
atcaaaattttatggtcgtgttttttggaagcgggatttttacggggctcccgccactcttttttcaaatatattttttacgcaaaaattttttttggcgttttgtctgtgcgcacttttggtcaaattgatgatatatgctgacacaatttcaaaaaaaaaaatcttccataaaggaatggtcccggccgtgccaggtgtttgttttcgacagtgattggttgcgacagtatgtcgaagactaacagctccagtccggcggtgccggtcgcggtaattgtttggatgttatatacccaccattttgggaggaaaaaatcaacatttaaaagtcttaaagacatgttttcctgtagtttcggattctctgatcagcgagcactattctgacacccatattgatcaattttcgaaccatggaccagatttataaacaaaaagtcggaagttcaatttgtaaattcgtttaatattacgcgatgatctgctgctgatttatatatttgtccactttactattaacttttgatttgatgcaaaattcgcataaaatgaccggaccgccgttgagccgtaaacggcgtggggcggtgcccacgcgcatcgaacaattggagcgcatgttggacatgacaaaatttatcgaccaattgaaacgcctgatcgactagccgattaagtgcctgattttggtcttccagtggtttccaacgatgtattcgggaaaatttttaaagtaaattttgttttataagctccatttacaccagcaggagagcacaggccgagcggactcgccttcacgaccttacaattgaacacgaaatgaagaaaagaatcaatgaatggacaatttggaagaattttatcagccaaaacgaaacacaacctccactttttcaacaaaaaaaaaa

SEQ ID NO: 10250 - DNA, 1765 bp, Heterodera glycines
ggaggaaaaaggggatattctcatcgtcagttcaattggtgggtaaattgtcctggtgcgctgaagggcgtcgaaggattccatattagtaggatagcataaaattttgtgtacgtattttgtgagttgcagttcggcttgttgttcccatgtaagcaagaaagtggcgagaaaaaaatccaaaaacttggtgataatgcacagaaaatgactgctgaagaagtggaacaagtgtgcatttttttgtttgccaaaatgcactgtgacacaaaaaagcattagtaaacgagaaaaggtccgagtcggtggttattcttatgtaagggatcaaccgctacagtgacgaaattattaatcgtcaatacaaatggtcaaaaaaatatttttaaaataataaaattatgaattaattaatttttaggtgtttttgtttgtttttatatatgacttgttttgatggaattaagtcaaaatatgccataattttaaagatcagaacgtaagactcactcaaatatcttttagaaagtgagcaactcaaaaatcgttgtctctgtgcaaacaaaaatacctttccatccctctgctaattgccgtttttcttgtaataatatttggcaacagcgctgacgcctgatggtaaatattcatttgattacagtatgtgaaaacctgctcaatctttgcgacattccatggttacgcggatttacccacaatgaaaattagtagtcaaaagttcacgcaaacattttttttattggagtcttttttaaatgtttttgcattcagattaacactgagtattggtgaatcaagttttgtattttcgtgtaagattttgagtataaatattcattgtggtgcaaagttggagagcagtaaaagggacaagcgtttggatttgtgataataaccaattatttttccctaattatttgtttaaataccttatacataattacataaaacatatttacaatattggtgccttatattttagtaatgggtgacgtcaaagaatatattaaattgttcaacacaattgctgagccgtccggagacttcggagacgccatgcacaaaattggacgaatttcagaaaaagcggccggcctaattggactttctgccccggtggccaatttgttggcatcgattgcgcacactgaagtaaatttattcatttttctctttaattttcagcttttttctgagcttttcaagcactcatatgtacaaatttaaactttttatcttttgtcaacttaaatttgatttgcaaaatttttgatgaattacgtttagttaaatttttccttaattaaaatgaaatgtgttaaatatttttggtctattaaagatctttaatccatttcctggttgaaaatgatagtcctcagtccggctttcctggttcatgagaaactggtcctggtattaatggtagcttattaatattcaaaatatgccttttagccgcacgaagaagttttgttggcattgtccgaatttcgtcgagacattttcaaacgcctggactatctggaaatgaaaaatttccacttgatgcgcgacttcaaactttctcagtacttgacgcaatatacgtttgtaagtgggtggaatggtaacattaatcaaagtcattgggatatttttaagcaaatcgaaatgcctttggcaaatgcgattgcgacgttcaaaaaaatgttaaaaacaggtgtgcggaagaattcaacaacggtccaagactttatcagcc

SEQ ID NO: 10251 - DNA, 5380 bp, Heterodera glycines
  unsure (1)..(5380): unsure at all n locations
gagattctaaaggatcgggaagaaattgaggagttgttctcggcgatcacgaacaatttacaagcatggtcgcagaaaaaaatggtaatttacattgcactaaagctactataattaagaaaaggagaaatgttaagttgtgcaaataaaaatgatagataagataggatttcgcttttctgtgattagatttgtttttccgtttttaaacatattttctgtcattttttagtttttgttcggttttttccgttaaaaaccgagtaaaaatcgcaaaaaatcctgcaaataacggaagataaattgtgaggttttataaaaaattgctttttcaggaaatgttttggccaatcgttgcaaagctctacgtaaatgaaacattgaagaaacaacaaatgcccattcaaatttcaaatttcaacagcactgcccaaattatcaagcaagcgcttgaccaacgtggctcgtacaggtaaatcgaattaattcatgatcgaaaagagaaccaaaaattaaattggataaaattttataggtttagtaagattattgtgaaatagatttttttgctttgcgttgtatgaaaaaacctggaaaagagataataaatataataaattgacataggtacattaggagttgctaattatttctaagattttttaatgcttttaaacaaatatttctgtgtcgatatagaagattcttgctttgtaaatggatgattttaaaatttattaacaattaacaagctatgtcgattagaattttgcttcggtaaaataagtaaaggtgcttacttataggggtaaatttccatttattgtttgcctctatattcggaaaatgataaaaaataaatttttacttttaattaaattaaaatccagttttataacatttccatcgcctaatcttcataataaaaaatttttatacaaatttagcttcttcaacaacattctgattggagaaaattggagtggtgatgaatggatattcacagattttgatggttctagaggatttaccattattaatgaatatggcatcaatgtttatgtctttcgttgcaaaagcgattatgtgcgcctgctaaaagcaaaacagtggcttttagaccatcggaaacagatagtttccgtcattgagtgggtctaattttttttaaaaaagtaataaacattgaaaaaatgaagcctgcaaatggtttagggtggctgagtctcaacaaatttgtaacaataatatttttgaactttattttacttattttcagtatttttaaaattgaacagctgagaataatataatgaattcttttttgtgttgaaatgatatttcgcccttttctcaaaatatttgtttaggaaaaatgaaaggtttttaaaaatttattaacgattaaaaatttttgaaattttccaggcggatagtatttatttcaaaaaattctccctgtaaaatttcatcattctgaaaaaaagaattaaaaatttgatttgaaattttcgcaaataaaaagtccttacccagttcctaaattttttttctctgggttttacactgtgcaatcgagaaaaacattttaagaaattcagatacttttacaacgaacgacgcaccaatctcggcattctgtacgactacattttggaaaaattccctgaaattggcggaccgaatttttaccaatcaatcgtgttccttcacaataagaaatacctggccgcctcctgtaccatcaattttggaatttccggcgaatattttcacaccctcgaaacatttgattgttggacaagcttttatcaggaccctggtcttttttcactggccgccgcatatcgcctgtttttctttttgtgaactgtgtgtaattggtagggatgcgatttttagttaaatacctaaaattttgcgcatttaatacgcacagataagcacgaaaaaagcattttccacttggttttgggtgtctacgatgacttttataatacctatttttacctattttggagtttttctacctattatacctatttaaggattttcagaaaattccttaacaaaaatgcaataaaatcaaaaaatacacccctaagaattggaaaatttttcccaaaaatttatttgttttttatgtaacaaaatttttaatttaaaatgtcaatgttttctaagagcatattaaaaatatttaaattattcgtttacaaagaaatagaaccaaaattttccccttttgtttgcttttttccactaaaaatcgttaataaaaaattttatttacctattttggtacctattttggaatttttgtacctatttaatacctattttgagatttttttttacctatttaagtacctattctgggatttttcttacctaaaaatcgcatccctattcatctggtttggtcccgctgattttctttttaaatattctttgtgcagctcatgatggtggtgttgcaaatgcataagtaattgcgtggttggtgattggggcgggtgagccttcttataatcacaagacttgcagaaggcaacgcgagcagacagtttgaaaaaatcccaatttagtgacatattataataaaacctaacaaaaaaaagtaaaaattaaaaaagtcctaaaattcattcattatttcgaaatttgtccggtattcaattttaataattttagtgtgtatttaaatttgtgactgaattattaacaaaaacataattataagtaaatatgtgaatcttttactttctctcggtttgaaaattatttttctctcattgtcacaccacatccattcttaccagtgcttaaaatttcgtgtttcgtgctaaaatacaaaacacgaacacgaaacgtcctaaaaacaggaaaatacgaaaaatacgaacacgaaacacgaaacgatcaacatccctgttgcatatgccatccatcctctcattccctttgtgtttttgccgtcatacccctcatcctatccaaagtccgtccgcattgtgccagtatataatttcactcaatttccccctcgggggctgcgagatgtctgcggtgggtcagtctgtgctgttccttgcctttagcaattctttcctaaataaccaattgcactgacccacccaaaatgctctgaggtttttgttgttgacccaaactattcccggttttgaatacgtaaatattttgttaatgcttttccttcaataactaatttgaatggcttaaagccttaaacccggggacacaacaattccttttttcaatttttttggtgctattttattatatgtagtgcctttttcgcgatttttggtttgttccttttttgcgagctctagtgattaatagggctgccaaaaatatgtacaaaaagtggtccaaatatgtacataaatatttaagaaaaatcccaaaatatgtacaaaaaaccccacatatgtaaataaaattttttttaatggtattttttgggaaagaaattccctgtaaagtatgaaatagccacaaaatgacataaaaattactttttttggtattttttggcaacattttcaaacttattttttctttataaatcttcaaaatatgtacaaaaatatttgccgaaattttggattttttttgaggatttccaaaaatttccgtaaaaaatactcaaaatatgtaaaaaaaatgaaaatatatatatgaaaaaaatccaaaatatgtacaaatatgtaagaaaatcccgaaatatgtaaatatgtagaaaaatcccgaaatatgtaaaaatatgtaaataaaagtcccggtttttgttcgcaaacacaaaaaagaaagtgtttttcctgctatttagagcaaggagaagccaggaaaaaaatatgtatttacataaaattggcagccctagtgattaaaaaccaatatttttttgaatagtttggtgtttttcgaaattgtttggcatttttcataaacaaaaattatcccagtaattagtctttgacacccacgaaattgttgtgcaaaacattcattttcattcattcattcgtccacctcacatttcttttattgatttctttttctcacaaatggagaaataataacggataaccactttgttactccaaattgcataaaaaaggattttataaaattattttatttaataggagtaaaaaacccataattagcgcgcgtaaataaatcgaaaattacacatttctgaccataatttatttattggtcgctaaaataccataaattttgattattaattttgttgttttgactttacacttatgccaataagataggcattattgataaagattggcaaaccatacatttggtctttcgttaacagtcaattggactcataaaattaatggactcatttaattaatccaggaaaacaaataaaaaagaatgacgtcatcaccggctgagcaattaagagaggcaacagacgccgcatttgactcggtggccaaagctgtggaggccaaatatcaccagcgtgaggagcagaaggtcaagcagtaccaggaagaacgggaggaatgggagcgaaggatggcggagacgagacgcaaatttgagacggaacgccacaattttgagcaaaaaatgcgcatgaaaagggaacaacagacggaggaattggcacaaatggaacaacaaatggacgaacagagacacaaacattgccgagagcgagaacaacaacagcaacgataattaaataataaattgatgccaaatttgatacttacaaaacaaatacaactaattaaataatggctaattggttgatgggaataatttttacaatattattcatctattttaataaaataaataaaactatttttttgcagtacagcacgagaaaaatttaatgttttaccaattttttcatgtgtttttcattgcaaaatttaaaaaataaataatggtttaaggaaacatttgtgaaagataaactaaattaaacgcacagaagcgaccttaattaatgatttttgattatcaaatggagacaatggagctgacaaaggaaggtcctagggtgtccgtgggatttcagaatgaaatttggtcagtggatagagcacctatgggttcttaagaaaagtgattttattttttgcggaatgagcccgagtgccgagttatgccgtgccaaagtttttgtgaataaataaaataaatatttatttgcatttcatcatagtgtcaagtggtgtagtggtagtgcgccagtcgccgttttttaaacaccaggttcggttcccctgcgtgtatgttctttttttgtttttgctttttatcaagtaaattatcaaaanagttgtttataatacaagactttatt

SEQ ID NO: 10252 - DNA, 1442 bp, Heterodera glycines
aaaataaggcaaaaaatgtaaaagtgttttataattttgacaattttaattaatttttcaatttatttaaaataatttttagcttttaatatttaatgtatttaaatatttcttttttttccaataaaaattttaattaaatttaaaaatttcaaaatgcttgataaaatttctatttgctgctttaaccataaataaaatttacaatgtttaaaacatatacggtatatgttgaacacaaaaataaaatgtacaaaaatgtgtcacaataaaaaattgtgaattttaacataaatttttaaaaaattaatcagaatgaaatgcttgagtatgtccataactaatcataaactaatgaagataaaatttgttcttttccccatgataaattttttgcataaaattgttagttcattttaaatttgaaacagcgcgccaaacatttatatttggcattctgtttcacttttttttggcttcatttgcgcggcaaatggttcaattgaggtgattgtccaatatttccacatttgcagccatcttttgcacagaatgggtgagcaaatccgcacaaatcagcagtcagacgacaatttggataaaaactgaaaggattaataaaaaaataagggcaaacaaaattgcgattttatttttctaattttattccaaaatcaaattaaagactaatgtgcagagcgaaaattttaggataattagtcctcagaaaaaatattttaaaaaattaataaaatttaaaaagctggaaattcagaatcattttgttaggcccctttttattcttttgttagttatcttaattaataattttatttatttatttattttcaaattccaattcacaatccgtaaaaattgcaggacgaattcgtcctcacataagtcaaaaaaaaattggtgagcttctgacaatttttagaagatttataatttacgaggaaaaaaaattaataaaatttaaaaagttggaaaattcaaaaaaaaaaaaacttgcgccccttttcatcaatttttcgttatcttaatttttaatttttattgttttaatttcaagaaaaattcagtttttttttaatttaaaataagaaataatttgttttttttctgcataaatataataattctcactagcatggcgcctttggatgccaaagggtacaaccagactcatctttacgatgatttggcttatcccaattcgggcattggcttgccggctttatgaatttcaggtgaattccattgacaaattgtcttaaaaataaaaattcaaaaaaaaaaattgaaaaattattttgaaaattcaccgttttcgaattgatttggaacggccacgaaatgtgtgtgggggggaaaggtgaattttttgcttgttctcgtgacaattcataaaagccgtcatcatgacttttcatcgatct

SEQ ID NO: 10253 - DNA, 1316 bp, Heterodera glycines
tatttttgaaaaaaatttctcaattcatagggatatattttctgaaaatttttcgggtcatttcttaggggtgtattttcccgattttattgcatttttaatggattttttcaaaaaaaacgccaaaaagggcacaaaacggcaaaatgccaaaaaaggcatttaaggcacgaaaatcccgaaaaaggcaaaaaaaaggcataataaaagtcaacgtagaagcctcaaacgaagtgaaaaatgtgttatgtatgcttaatatatcgaaactaattcgcagaaaaaaaggcatatgcctcaaaagtcgagctctagtaataatatttaaaataaattattttaagattttatttcaattctttcaccttatattcagtcctgaatcggctgacccatcggtgggcaacgtttttttgaccgccgttgcatagccgctgaatgagtacgatgagtttgtggttggcgttgagttggccgtttgcggttttcgtccaacaattcggtcttcgtagctcaattttttattctcatgcacatcgaaactccagcgcaattcgtgctgaaatttcagacgacgttccgccaacgatttgatgctcggcattttttgaacgggctcatcacatcttaaaaataaaatattaaatattttccagggcaattgccaattgttcttatttttacgagctttgtccttgagaatctgaatcttatgaaatggaccaaatcttaaaaaagaaatttcaaatattccaaaaccctaaaattggatgattttataacggaatctatgaaaaacttggtaaaaatttcaaagaaaactttttttggtaggtaatattgagattttaacgcccttttgtcatcattttcaaaggaaatatattacaatcaaataattaatgaaaattttaaaataatttttattataatttgcaatggtaaaacacattgataagtcaaacaggtcaatgatgctttgcccgttgaaactgttggccatttttaactgtgaaaaaaaaatgataaaaattaatttaaaaaaatgaattatttcgaaaattattttcttaccaatgtatcggtggacttatgtactgtgctgtccgtacgcataatccgttggctaattggaaagcttttgctcaaatttgtctcttctttatttctaagaatatcaaacgaaaatggatcgctaaaaaaaataaatttaattaattttcaacagtttaaattttaattacctttcaaatgggtcccaactgtacaaatgtgaggccagcttagtttggtcatcttcatctaatttaaaattt

SEQ ID NO: 10254 - DNA, 2242 bp, Heterodera glycines
  unsure (1)..(2242): unsure at all n locations
aaaataaaaaataaaataaataaacaaacgcatcatataaagataaagcagagctgtcaaatttttttaaatcgaacaaacaccgtcaaaatggaaattttcaaatattataagtaaaatttacttattttgtttatgaatttttttgttctgcaccctttttccagcaaaattctgcgaatgagagggaaatggtgccgatgtacgggaatttcgcctactggacatttcgcctactcgacatttcgcctactcgacattttgcctgctgaactaaaaatcgaaagtttcgcctactaacacaaaataagaagtttcttactaagccaaaatcggacgttctcctactagcctaaaaccggaggtttcgcctaatggtcatttcgtctacttaaccaaaattggatttctacttatatcctaaaatggatattttgacaacggaaaatgcgtaaattcaaacactacaaagtaaaatattaaaaatctataaaattaatttccataagcatatgagtttcttcatcactctcttcatttccacagacaggtgtgaagcgccattcaaagtcggcctcgtagaggaccaaaacaaaaaaaaatttaaaaaaaatgtaaaaaaaaacattcatcctcgaatccattaaaaaaactaattaagctgtccagtaggcaaaatgtcggttggcaaaacgtccaattttacttgagtaggcgaaaattccgattttggtcatgtaatcggccgtgccgagggaaaactgtcaaatatgttatcattaatttaaatttaagagcaatgaagttggatatcaaaagcctttaagaatttaaataaatttcttccacatttattaattttctaaatcttattcatgaaattaaaaattaattagtgctgttttgattgagaatatacaaatttttccaataaaaattattcatcaactattttattccttctaattgtttttcataatttgtaaatttacttaaattttgtcaaataaataatcctttctgaatttggccaatttcttttcatgatcatataaattaccatttttattcgagaacttaaatttaaatttgagaaaaacaaagatatatttttgttataatgaaactaaattaataattcgatttaaattagtcaatataatcgaaaaaaataaaaatttggcctacttcttctcgtgatacatttatttatcattttattctcgaatttttccggttcttaacaaatattgaactataatgaatcattattttattgctttcgttcccctttaattcttttcgtttttggtgatgatttattcaatcaatttttccaacttttctcgcgcaacgcacaaaaatttctccatgaaataattcgtcccgtaaatctccaatttattttagtgaaaatagttttcacgctgaatctgccaaaaatgactaatcattttcaatttttttgtaattttaatttttatgcatttaaaatgcattaattgttatttgttttcttttaaattgatgctctaaaaaataaaaaaactatttaaaatttaaaaaatttgattaaatgatatatttttgttaaaatattattttttataaattaatagcaagaaaatgtctaatttattcgtaaattttacataaaataatattttttttaaaacaacattaacacgattttaattagagtttcaaaaatttccgtttaatctatgtttgtttgtaaaactactttttttatattgggaatttgtaatttcagttaaataatgtggcattattgcttaaatagtgcatatcttttatttttgatcaccttaaatacaatatccggttcggttttgactcggcaaaggcgacaaaatgccaaaataactgcttacaatgaacagtatgccaaaacaatggcggcactgtcggccggggcttatgccctatcgccaaatgaatgcatccggcggtaaatatgaaaatttcaactaattaagaattgttatgcatgtttcataaaaataagaaaaattttctctgaatttatttttttaaatttaattaaattgtgatttgagacaattccgaattgaaatgaatatttgaagaaatttgttattattttctttataataatcaaaattcacactttttatttaaaaaataaatataaatttttgaaaaagatcctctgtnttatttttgctttgctttctttcataatagtgatttatgcata

SEQ ID NO: 10255 - DNA, 758 bp, Heterodera glycines
tttaagaatgtgattagagaatgttcgttaatgaacaatattaattgagttgttaaattatatttttttttgtttttaaagacttttccggtgacttttactgggcattcattaggaggagcattagcagccatcgcagcagccaaatgtgtcgcacttggacttcgaatgtacgaatctaatggagtaaaaaaaattttaccaaaagaacagagatgccagttgtcctgatttcgggaattcatttttatctaattaacaaagctcacttaaattttcaaaaattccctggcaccatctgacattagatcccttaaatttgggtaaattcttatgaaaatttctgaaattggaaattcaggactaaaaaaacgtagctgtgaggataaaaattgataatttaattttaaaatataccgtatgcctcctaagggaatttgcatcaaaaattttggaattaaatttttatttcaggagcaatcaggtgacattgtacacatttggtgagcctcgtgttggtaatgccgcctttgcttcaagatttgatcaacttgtgccgaataggtgagtgggcattcagcaaaaacatttaaaattgactaaaatatttttaaaaaatgtttaaaaattaataatgcaaataaaagttcagttttcgtgtgatttttcgcaaggacattgtgccacatttgccgccctgttcaacaacggcaaagcgtaacaccggagacattggcggtattatggacgaagagaat

SEQ ID NO: 10256 - DNA, 2600 bp, Heterodera glycines
  unsure (1)..(2600): unsure at all n locations
actcacgttctcgctcccactctcgctcgcgcagtcgtacgcgctctcgttcccgcagtagctcgtcccgctccgcttcatagaccgcgcgctgacgaaagtcccggatatgcgaacagacgcacggtcgggcgggcggacagactacctgtcgtatgaacgaccaaacggccggatggaatgaggaggaatgacgggatggatttgattggatgcgtcagatgttggaacggaaaaaggagtcggataatggaggaggaggaggaggcggaatgcacggacctttgtgtgggttcggtttttgttcttttttggcacctttttccattctctcccccccccccccccctcccntcccccgcctctcctctttttgttgtgtgtttgtgtgctgctgcttctggtgggcgtgtcgcgttgtttccactacctactcatttctctcgctttttctttttttattatttgtttttccgtcgtcgtttccatcatcgataaatattcatttaaaaattttcaattttttcagccctcgggggcgatgtgtgtgaggagacagacaattttgggagtggagttggtggagaggactgaactgacagacaaggagtgctcaaatcaggattcacacacacgggacgggggacaaaaattcaaactcgaggagcacactcactcactcattcgggattctcgaggaatgggacgggactaggagcaactagcgaaccatcctctttcaccgatcacgccaatcagtggatgatcgggacgggatcggacacaatcacactcagacgggacaggaatggaacggacggcaaataaggacaaattattgccttttgaatgtgtgaggcatttcaaaatgttggcccatttttagcccaactcgggccattggaggatggtggagtggactcgatgaggggacacacacaatttgtggatgggacgggggatcaattaggagccacagaacgaattgaaggacactgaggaacaaaaccgaattgaattggacatgtgcacactttggagttgcatcaagaaacggactgtgactcccttttttggaatagaacgggggcagggcacataaatttttaggtcggttcgaagtggactgcatttcgttttaaaatggcatggaatttggtggcgcttcattcgtcagggagttgaacgcgtacaaatttttggctattttatcggctagtgaaataaaaaatatatatatttaatttgataatttaaggatgatcagtcaacttttatcctttaatttatatcaataaatatgaaaattttggatggatttcatgttgaataagaatttgtcgccatctgttgctgctctgatcaaaattagtcacaatttgggcctttgttagaaaacaattaaatcacttcaatgtacaacatgagcataatgtacttttgtaaattgagaaaaacaaaatgtgcaaaaaatacaataaaaagatatgaaaatacaaataattaaataattcaaatgcctgacatttaaatgcgatttccactacttgtacataggtattgtacaagcgttttgtcccgttaattggcagtgtgtgtgaaatttcaaatttgggcttagcaatcattaattaattacactcgcactaattgagcatcatatttttgctgtgtctgggcattctttccgcttcactgagattgttgttgctgttgtgattgttgatgcgatgctgttttgtgtccgtttcattgatgatgagcgagcccacagttggggctgatcacttccccacattgagaagacgacaaccttaaatgatagaccaaattattaataattatttaaaaaaattaatgcacattttaaaacaaagttggttttctgagtattgaaaaatgggtcagtggaatgttattttgagaaataaatatcactaatgaacaatttttctcttggaggcttttgtcgatccaaataaaaattgaaaaattatgacaggagtttaaaatgggaatccattggaatttatgccaaaaaccaagcctcggggttggcaaaatttgaagagatgccgaaaagccgtaaaaatcttaaacttattggtacattttgaatttctcgtcaaatttaaattttaccggcagtgcagcaacaactgctgacacataaaagaccactgcccactcatccttggtgccattctgcacaatccacttggtcaaaacctggaaaaaatgaaacaattaaatttattaattcattcatttatttatttggacaagccttgttgccaatgctgaaaatggagaccacgaagaaggcgatgccagtgataatgccggagaatggtggggccaattggagcagtgccgtttggacgccctgaaattttccaaaatttgttttggattgtttagttgaagtcgagactctcggccatgaatacccattttttttattaaaaatttaatgcccggcaagaagaggaagctcgaaaatcatcaattttcagtatatttatttaaaaatatggtaatgatgccgatggtagcccaccgtttttgaagaaatttttttttgttttcaaaagtcatga

SEQ ID NO: 10257 - DNA, 2836 bp, Heterodera glycines
gacacaaaaaatcacggggatttcgaaaacggatccttctgcccgcggatcgcggaaaaacgccgcgaatcgctcacccgtgatgcctaagcgcgttaatcgcaattgatcaatcaattctcgttcaatgccggaaaattcccagggatgatcgcagaggtgtacaccccttttaggcaaatgatcaaatgctttcgtaataaattttttgaacggtttccaatcacgaaacaaattgtttcaggttttaaaaattgtttccgatcactatcagtgccaaccagggatgcgtcggatagatagtgctgttcgagactctcgagtcccgacgactcgagaaaaatctcggggtttttgagtctcggggtcaagtctcgggaaatttttggtctcgaacagcagcactagtgtcggaatgccaatttccgtgtgccgacttttcgggcttggaattccgggccgattgccgtaattttttgagggtgtcggcacacattccttgtgccgatcaaacaaatccaaaggattagcaaatgttgttgcaatcgatttgtgtttctcgggctctgatcagtctgatcaccttgcaaatgcgcgtgccgcgcctccgctcctcccacgcgtcgaccgccgtttggtcgtcgccggaggcgaaagaggacgcagcttcgcgtcgcgagctgatccatgaggaaaggctggaggacacccatttgctggccaacaaaaacagaatgggcagcgcggaaagaagctgaatttgggaaaaaatgtttttattaccaatttttatatccaatctgaattattatatttatttttaaatttgtaatttaaatttgtttcttttaatttaattcaaataaaataaaagtttaattagttgaagtttttcatttaaataaaattaatataatttaaattaattttttatttatttcgaaattcaaaattcaatttattctttttgtttttgttttattagttttttttatttaattgaaataaaaaaaaatttccgaaattttttctaaattaaatacttaaaataaataattttcaattattaatagacgggataatctatgcccgcccttatatactcaggataaaaaatgtttttgaaaattggtttgaatttattttttgaaattaaattgtttttttatttaatatacctaaattatttttcaattttttgtttttgcttttccattgactactcactagagaccggacgggatcgggatcccgcgggatttcttcgggatcccgcgggattaaattcgggatcccgacctcgggatccctccgaccccagttgtccggtctctactactcaccccgttttgggtgggcgccaactccaacacgtcgcgcatgtaattgggcaaaaactgcagcatgatcaccagcggatattcctgttgaagggaaattaggagccaattaattaacaccaattaggtaatttgattagcgtataaaattttgttgtaattaaatacggattttacaacaaaaagaaagccgatttatcctcaactacataaatggcttatccagaatactcagaagaaaagccggttaaaaaacggacatggcaaatcagcgaaaacacgttgacccacaacggcacggaccgtgccattttgtgccacggcacacgcctggactgagtgcgtttgccgatgtgttcacaggcgatcctggggaaaagcaaattaattagatgctaaatttttaattgaaaatgtaaaaactgccaaaaaaaaagatttaaaaattacctaaaaatgaatttgaagaaaattttttaaaatttattattttggaatatttcaaaaaaaaataattttattttatttttttattttattttgaaatattataaaataaatgctaaaaaatttaattaaaaagatgaaattgccaaaatttgattttatattgcatacataaaataattaaattttctattcaaaattttttgttcccacctgctttcaatgtacaggcgttctttgttgggcatgcagcactgtttggacggtttgtcggcaccaattggaagccaaaggaaagccgccaaagcggcgaccaaagaagacaaatggaaaatcagaggccaattctgaaaaaaatggaaatttaaaaagcagcgaaaaatcgaaaaacaaaaaaaaaaaaggaattaaaatttctgtgtaaccaattaaaatgaaaaaaaagaagaaaattaattaggcaattaaatgcaggcggaataacaaacaaaaacaacagcaaatattctttttccggataattccgaaaatttttcgggaaaatgcgctaaaaaagggaaagtattttcaaaaattcgcttatgcttaaaatttaggcaagcaattttcaactttcagccacaatcaaaaaaaaaaaaacgtaaacattttaaattaatgagtgtcctcaattaagatagggatatttaaattaaaaataataaattaccccacaaagagcgccggccaccggcaaaatgaaaagtgtgcccaattgacggccgccagtgatgcaaccgatcgctactgcgctacaaatatatttgattattttaaatataatttggtagaggtttggtccgatcggagactcaaattccatcacttttggaagtgctctgatcacgtccggccccatttgagtcatcccctgatcagagactcaatcacttttggaagtgctctgatcacgtcctggccccatttgagtcatcccctgatcagagattcaatcacttttggaagtgctcagagcacgtccggccccatttgagtcatccccgtgatca

SEQ ID NO: 10258 - DNA, 2246 bp, Heterodera glycines
cggtcgaaatgcttcagtccaggggaaagtctacaattgtgagatgtatgaccaattttattgcagttgtagcagacgactcgctttgtccttggcgcgaaaattttttgtggcggaaccgtcgatttttgctgaaaatttggccggtgctcttttccaaatccagccgatttagtggctttttgcactcgcctctgcgcgtactcgcgagagcgacgaaactcgtcgaagctcatgcctggacggcgagctatttccaatcccaccgaaatttccggattttccatagcacgaattaggtgcttgactgcaaagtcgtcgacgaaatttgagggcaaacctgggtaagcgcactcgacaatgccgtacagccgttccgcaaattcatccaaagattcgtccgatcgtcgcttcatttcattccacaattcgttgaaagcccgcatttcggtgcagtcccattcgctcaaaattccttccattccgcggcaaatttcgttgaaatttttcggccgatgtttcatcgcggcgtcaaatgcacgctgtgcttttccactcattttgctttccagtgctgaaatgcgtcgattttccggccatcctcctgttgctgacgaaatttttttgaaaaatttccgtatttcgttcggtccttccgttcctttcagctcagggaatctttccattgttaggacaaactccaacgcgccaatttgcagaccttcttgcttctgcggttgttccatccgatgcgctttgtccgatgtttcattttgatgaaattgcataatgtcgaaatgggatttacttttcccgtttttatagtcagttttgtcgacggaattgctttaccgaactgacaaaatgcgtgatttgtttcacgaattcctgaagtgaagaggggatttgcttttcccgttttcaaaaaaaaaaaaaattcgccttgttcgtctgctcctcgcgtcctttctgggttttgttcacccttttaggttttccgtcgacagtccgttgaaaactgagggatttgtctcccgttttccaatcaattcaaccgttagggctcgtcttttcgcgggttttactttacccttttacaaaatttagctgtccacaatcggctgattcgactcttctcttgctgggaatttgttttcccttttttccgatttgtccacacttgtcgagggatttacttttccctattttcaattcgaggccacgtccaattgtttttgtccactgctgattcaccggtgccaggagcgccaagtcgtaaaaaacaaatatggttgttgtcaggggggctttaataatgttgttgttgcacagcacacagcaaagacaacagcccaaagcaaaaccaaaacacagcccaatgtcgaagacaattatttatttcaaaattaaataaggcgaagacaaatcaataggaaaactgacgactgcataatctaacaaaatcacaaacaaaaatgacacaaattaaaataacaaaacgccaatatatatttaaatctcaatattatcacagtgggattaaccccgcgggatcccctcccacaaaaattaagagttacaacgaaccgctagatagggatcgcacctgttctgatttatcagaaatcttctaatttagatttatcttaaatgttcttaaaaatttcaattaaatttcaaaaaaatttccaattgcattaaaaggggctgatgggtcgacaaagatttttcgaagggctcagacggtaaagagaggtcaggaatcaaatctgtttatagtccataaatttgactattttgtttttttcaaaaccatttttttgcgcacattttccaaaaaatttttgggggacaagggggtcaggcggtgccaatatgcaccgccgaagaaattttttgaaaatttaatgcgttttgttaactttgtgatgaaaaattagttaaactttaattcaatttattaaaaatttattcaaaaaatacttggcattctgactctgaaatttcctatgtggatcccgggggatcccgcacaaaaaatcaaatttgcgggtcccctgcgggatgagaatgtacatattattacggttagttataattttagaaattgatttaattttagaaattatttaattttagaaattgatttaattaggaattgatttaatttcagaaattgatccaatcaactttcgaacatgccttattttctcaaaaccgttatctatataagaattggaaggatt

SEQ ID NO: 10259 - DNA, 1326 bp, Heterodera glycines
  unsure (1)..(1326): unsure at all n locations
gagcattcattgcttgtcatgaaacttatggaacaaatttacggaaaaattggcacaaattggcattactgagaaaaagttagtgcaaatttgtcagttttaggggtatgatgacaaaatatttgatatacaaccaatcgacagtgatgtgaactntgggcttccggattggaaagaattttgcccaaaattaatggccaataaaattccaaaaaattcagtggttgtaatggacaaattaaattcagtggaaaccgtcggcatgaacaaagtaaattattttttataattttaaaaggggtatagaaaagaaaaaagaattttattccatgtaaaaaaatttacaattgaattaggttgctcatttttgataaacacaatttaagggtcaaaatattttaccaaaacttttggcgaagcaaagccgtggcactggtgtttttttgccgaaaaatgcctaacaacgcgtggcactgctttacagtatacgtcgaaggcgaaaatggaagaactttgaaaaactgtaacagtttatggtattgtgatttgtaggaaaaccttcaattacctgtgtggtgttctgttatttttctttcttttatagacaaaaaagcgacatttggggactttttattacaaaaagtcggatattcaaagatcagcaggtctcaaaatattagttagactcctaaatatctttttgtcttcaatagtacttttatcatgttgtgtaaagcattgagtttgttttttaaaaatggctaactgaacattgtgtttgtattccttttaaccgtatttacaacattaatattctcccctataattaatagtctctccccctaaaaaggtactcctactgaaggagtcacaccgtgaaaatttttgagaattcagttgagtttaacaaaaataagaaatatttttgatctgagagaggggggagggtgaaaaatagtataatattttagaaaaaatttactattcataggaattgaattctcggtgctatgtcgaagcgacaaaaatatgggtgtttgtaataattaatttaattattattttaattttattttccaagtaattaatcataacttagcttaagcttagtcaaattaataaaattaagtatttagcgacagctcgaagcatcctctactacttatgaaattttcaaaaaattagtaaaaatttacaaaaagttgtgaccaaaaaagtacgaaaaattttgactcaacaattgtgaccctagctttcttgaaattcaataaaattatttgaaatttagcagaacattacagtaatatttaggatatgtaattatat

SEQ ID NO: 10260 - DNA, 1177 bp, Heterodera glycines
ttttcgggaatttttccgattttcaggggtcaaaaaggccaatttagctgatgggaccgttctaatagaggttttttggaaaaatgccaaaatatggacataaatcgcggaatatggaaaaatggaaatagaaatccatcctagaagcttcaaaccaagctaaaaacatgtttttcgtatgtttcaggcctcccacaacccaagaaaaaatattaatttccatataattcccagccctacacataattttgtctaattaaccaattaaacatcttgatatcattctatagccctaactattctctattagctcagctaagcatagcactctgtcatttacctactttttatttcgcttctctgccgcacgtcagtaaactgatgtaaattacatgtttttttcaccctacattgcttgtttggcattttcacaatacacatagcaaaatccgggaattggcatatttattgattttttgattgccaaccttcaaatgaaatgcttttcctcaattaaatatttttcgtcattcattttatttaatttgccaaaatttcaatgaattattattttatttataaaattttcgctttaattgcccttcattttacatttgccattccaaatgttgtaaaggcagcggttcgtttttaattattattattaaactaaaacgagaataaatccttttttgagtaatttgtagacaaaaaacaaatttgattgttgaaatggaccaattaattttatttaaactacttaatttaatttaaaaaattccctttgatcagttgaaaagcgatgacaaattcgtcacttttgtaatgagtttgccacatatgccaaaataccatgacgagtggaagaaggaaattttggatgaaatttaccgtacccctgtcgctgaaaattcctacgattttgaagctcaccttggcattttgtttttgatgaaagagcattggcattgtgtcgaactcagaaaagaggatggagaaatttgcagaaaatatcgcagacaggcgcttgttttgtacgaatatttcctacgagtgtatcaccaaggtcagagaaagctccaaggcccgaggtgtaattctgctcgagatgaaattgctcgagactcgagagcaaggctataagattaaattacctaaaaatcttttcatttttatt

SEQ ID NO: 10261 - DNA, 2382 bp, Heterodera glycines
tttagcatgaatttgttttttcaaaaaaattttccaaaaactcgctaacgatttttcaaatttaaaaatatttgtttgaaaaatttcaaagtttgacgagctgctccccgtgggaacatccggcaaaaaaaatttgaaaaaaaactcagaaccgtagtgggaaaaatgtttgcccccacctagattgtgttttttgctagtcggaaatgtaaatttcgagaaaaaccaaaaattcttaatacctaaattagggaattttttctcaaataaatttcggatattttggggaataggcgcgggccgaatttcaggcactaatccccactaaaaagtgcaaaaaatatatagtaaaaacagggcctaaaatttagaagggaatgaacaacttctccgaccttgaccgcacttttggtgataaggtcgtagatgaacaggcgtccgtccgtgctgcccaccgcgatcagagtgccaaagcgttttaatttgctgaaaaaactaaaatttttcgaaaaattttgaaaattccacgcaccaacacgtcgctgccgccccgttgctgtccaggaaacactcgcgctcctccgggtaggcaagcgcaaaatttttgccaagaaaatcgccattcatcatcactttgagtgccgacgatctgagaaattaattgaaaaatatggcaaactcggcacttttggggggcatactgacatagggatttaagattttagcgactatttctttatctctgcaaatagagaaaacccgaaaaaaaattttctatccacaaattgcttagaattcgccggaaaagtttctcatcatcaaaagcttttcgatgataccaatattgtccaattcatttgattgcaataatcttcaaaaattatttacaaaaaaacacaaaatttatgcaaaactccgtaaattttttagtttttaatttcgtggggtgggggttttctagcccactggcagggatggtttcacaaatgtcaatccaatgcacaaacctgaatggtcagcaaattgtgttcccactggtagcgctccaactcacgcttcgtgaacatcaattcgcgatgccaacatctccggcataaattttttgtgcagatgaacgccggggacgaggcaaaaagccatgggcacggctgaaaaggagaaagaaaaattacattttatgaaaaaaaccgataatcgaaaccgagcatttcggttaacaaaacgtttcggttaaccgaaaacgatcaaaaaaataggtacaaaacagacaaacagaaaaaatgtattttactttttaaaggaaaattgacaatttatttaatatattatttttcttaaaagatttcattaaaaataccaaattttcaccgtccctgccttttttattttttaaagaaaattagcacggcaaaaaagcaccttttaatcgttttataaaaacctaaaatacacccctaaaaatcgaacttggtcctccgttcccgttgccgttcagccgccccatttttgtcaccgccgccgtcgtccgtcgccaatgcgcgccgcactttccgcgggattggcgtgtcgcttgaaatcactgaaaaataaataaaatgggaacttttttagggagagggtaagcctaaaacggaaatttaaaaaaaaatttggaaaatccaattcctcccaattttcttacaattttttagataatgtttaaaaaaaatctttgaaaattttaagtgttttaaaaatttcggtggagaaaacgaagaaatgaagtaaatcccaatttctgagagaaatttaaagtgattttcgaaaaattacaaaattttccaaatatttcaaaaaaaatttcgatttttatggaatttatacttttttataaaaaaattgtaaaaattgtcagtggcatttgaaagtattaaaaaattgtaccccattttttaaattttgctaaacctgggtgtgttgcctcataaattcggttcaaaagtttttgtttggtcttaaaatttcattgaatatttacaataatttgaccacaaaatacacaaaactttgccatattttatagcaaaatcgtcacttttttagttggggcggttgattttttttttaaaaaaccaaagggaagaccaaccaactttttggttttttctcctgttgcagttcgtcagcagtaccaccaccaccaccaattgcactgctcgttgtcctcggcctcggctgttgtccggcggaagaagtgcaaggctctcaaaaacaaaaattcagttgagacagcgaattttcgcaaaaaaagaccataggggttaaaatttgttcagaaaattgcttaaaatttcaaaaaatttactgaaaatttttcactttttgggtttcgggggggggggg

SEQ ID NO: 10262 - DNA, 1293 bp, Heterodera glycines
  unsure (1)..(1293): unsure at all n locations
gtcgagcacagcgaatagaggcgcgttgagcgcgtcttcagcgncaatgnccgcgtgcgtaaaagcatttctgcntcagcggaggcaattttgcaacaaataaatcctggcaaaaaaatgggaaattaaatgtgtgtttttaaaccaaaatcaaccnccattttttggttttctttttttttattaaagattcgctgttcatttttgaaaatatgtaacaaatgatagtaaaaaattgtaattttctgtgaaatttttttttttttgaaatctaagggtggaaaaaaagagagaggagatacatttatttgcgtcaatgtccaaattggactcaaaatttttctgtttttttttcaatcccaaattccataaacatcggctattttttcttgaataaatgtaaaccatgtattttaacccgttataattggcgctaatgtcggataatcgctaataaagcgtggggtttttgcggatcaaattcgaaatttaaataaaatttaaaaaatggcttacgagtcggtgcaattgacggcatataagtggtggtggtggtgatgcaattggttgttgttgttgttgcagtttctggtggaccaacacgctttcgacatcgatgtcatcatcgtcttcatcctccttctcatcatcatccattggcatgtcggcaatggcttcttccatcggttggcattggctttccgtcgtccgcagcgatttttgtccgaaaaatggggtacaaccgtaaaatggcacacaaaaaagtccaaatgtttccatttttaggccgtttattacaaatttggacaaagatttgcaaaattttgaggctttttgagcgaaatgctaaaactttaatgctttttttcattaagaagtttgaaccatttgggtaataaaaaaaaaatttgagccggattaagacgcaaaaaattgctcacaaaaccaagtaaaatcgtccataatttagggccccattttttctttttttacctcattcggaactgaaaaagacgaggatgatgatgatgaagatgcaccagcaacacaattggctggctgaattgtgtcctgtttttgttgcgccgcttctccgtcacaaccgacgccattcaatgggcacaacgacggcgccgtggaaggtggcgttgtactgcttcgactcgtcgtcgtcatctgagtttgatgtccatgccgtgccggagaagtgttggaagaaccgttggcacagctttgcttattctgatcaccaccagcagcaccaccaattgttgctgttgttgcggtggcatt

SEQ ID NO: 10263 - DNA, 1635 bp, Heterodera glycines
  unsure (1)..(1635): unsure at all n locations
ttctgaggtcttgactatgtcaaaagtaaaatctgatcacgtattcgtgatcagcgaccccaaataaccccctaaaagacatatttttggaagatttttgtgagaaaaatttttccactcaaaaaatcctgtccacccccctttggtcccgaatgccaaaatcacttatatttttgtatctttattntaaaagatgataaaaaggtcaaataaaatttatataatagagcaaaaaattgcggatttttgtagtattttactcttctctaatgacttttcagaaccgagatataaaattttttctgaaaaatagaaaatttccagaatttctggaataactttttttcatttgaagatataaatttcaattaaatcccataaaattctcctgatttttctctatttttagagctttaattcccttaaattgaccaaaccttcactgagcaatgaattttcaaaatttaacccaaaatcccaagggccaaaaaattgccaaaaaataaaaaatttttaaaaaattccaaaaattctgaaacttaaaatagacattatattcgtactcagcaccttattttaccccagaaaaatatttttcacccccattttcgtccgaaaaaacatttccgaaaatttctagggggcctagctcgaaaatttttgaaattttctcgacctatcctacaacattcgatagagtttcaaaagctctacaattttgctctaaggcaatttttggataagatcaactcctgacgagttatgggcccaggactcaaatgtcccgctcaggccaaaatttttttctatttccaggaaaaaatcaaaatttttccgaaaaaaataccggtcgatagagctcgaaaaactatattttggaagtggtctccgtttctctgggaaaaatcgttaaaaaatcctaaaattcaaaaaccaaaaaaacgttttttaggcctaactcgaaaatttttgaaaattttcgaaattttaaaatttggaaaaatcgagctttcaaagctctacaataagtccgctggagccccctcgctcagatcaaaccctgacgcggtattcacctgggactgaagtggacaaagttggtactgaatttctcctattttctgcagcccttcctactataggtagaggcctggaattttttttgacttttagacaacacttcaacttaggttcctaccagcggaaagtttttgaatcgggatttagaaaaaaagttatgggccgtcaaacgcacgaaaaaatgagaaatcagtccctggtactcagttggcccttggaccggaaaacctatatttttcccggatgcgcctcaaaaagttgtaagacccttccactactttcagggcgctcccggccttcggccgggagaaaatggttttagcaacgaaactccttgtcaatataacatatatagtaactagcaggtgcgtgcatgcgagggtggcgcttgggaaagcgctgcgcgcttcttgagcttcgctacctaggctgtgaagcgattcaaattgatcgaattggttggagagatttttttgaatttttaaaaaattattaggggtttttagtccacatcgaggctcaagacgggcgctttgcgcccgttttttgaatttg

SEQ ID NO: 10264 - DNA, 1499 bp, Heterodera glycines
gggcgaagctcggcttagcattcaaagccgaaggcgaagtccaatttttattcgaagtccgaagctcgaagccaaaaaaacccgaagtttttgaagccaaaatttttcaaattttattttttaattccaaaaattttttcataacaaaatttcggttaaatatcaaatttaatcaattgacagaacggctacagatcaattaatcacttttaataaaacaaatattttgaattttttgatcaaaatgtgcttagaaatttgaaagttttataaattcttaaagcatttcaatttgaaaataaaataaaacttttgggtaccggcggtttcggtaggcgccccggggaagtatttgaaattttaaccggtttcttttcaccaaaaaatgccaactttgtgtctttttgggccaaaaattaaattgaccactctatgtgaaagaacaaagtgcactaattaataaatatatatgtatatattaaatataaatttaccaaaagccaatctttttgaagccgaagtttcgcccacccctaattcgaacacgaattaattaataatatatataataaattatagactcttaacccatttattaaaaattaattattttcgtaaattaaatttaccattgcttggcccatgagtgtggtctttgaaaaaggcaattgtttttttgttgtcgttcgtttgaagagaaccgttgcatttagcagttttgtactctgtgcaacgccaagaaatgcttccgttcgcaagtggtcttgctttgaagtacatttgtcctcgcacttttaatttttcgcctttttcccgagttttaaaaaattgaatttgtactttttgcattttctaaatttgaatagacaacacgataaataaaaaaattaatttaaacgcgaatatttctaagagtatgaaatttgggtgaaattattaagggtttttttaatcaaaattgcattgtacattaattagtatttatttatgaagaattaatgccatctctaagtgggcagcgaaatgacttcgtccgtcacttcccatgcccttttcttctctgttgggtcatttctttgcttttggcaaagagaattttataaaaatgcaagccagcagaagaagagttacaaacaaaagattagtccgtcggcgagtcgtgcgtcggcgagttgacatgtaccctacccgccggcttagttgggcccgaaatgtcaagagacccatctaattctatttaaactcatcaaattttaagtctttgaacagaccgagccttgtaatgatacaaataaaacatacatatgtgtggcattgatatagaatgaatggtaataaatctagcaaaataagcaggttaattgaatttactatgatttaaattaggtgattgcaattacagacaattaaactatttttatattttaaatccttaatttggtgcccaacttccctctcacattcatttataattttgctacaatattcattaaataaat

SEQ ID NO: 10265 - DNA, 3255 bp, Heterodera glycines
cgcgaggagttggagcagcgcaggcgggcggtcgaggagcgcgaggcggctgcagacgcgcgcattgccgagttggcgaatagcaggaacttgctgcaatcggtaggtgggccaattcctccgtgagagggctttaattcgtagcaaatacaaaacccaaaaaatgtgagggagcaaaactttttttaaaattatcaaaaagggtttgctggcgctgcattaggcgccttggaatctaaacatttaatagtgttaagaaattgacaattttcgatgaggggtatggatcagggctggacgtaactgattttcagttacggccatccgtaatccgtcatgacgggggtcaaaaaaggccgtcatttggcgtaatccgtaatacgtaatccgtaattttcaaaatttttttttaatttaaaaaatttttaaatttaaaaaatccaatctaaaaattgttaagattaatttatgatcagaatatctgcttgtttttttgaggtgaaaatcccaaaatagtttttttcgcggtgtgcttttcccaaaaaactggggaatgtggggggggggggtggtcaggcggggccgaaaggcgccgccggaaaaatttttgaaaaattttatgcaatttgctataagattttgtctaaaaatgactaagattttggagctaatatttaaaaataattaggaatttttggagcgggcggtgccgataagcgccgccgaggaaaatttttttcagaattttaacgaattttgttaaaaaatagccaaatttttagcatttcctcttttcccctttgctagcctcccccccccccctttatgtatgttaatatactacaaattaccaagaataagtcagattaaatcgaaatatgggtagccttttaattagagtagagcgggaccgggaattttgggcaaaaccgggacttgccgggacctgagaagccgggaccgggaccgggacctcgatttttcttcgggaccgggaaccgggaccaaccgggaatttttaaaaattcaaaaaaattcaaaaaatttaaaaaattaaaaaaaaaatcaaattttaatttatttcaagtgaaaatattaaataattaaatttttatttagttttttatttaataaaacccaaaagttaaagctaataaattaatgaaaattttcaaatcaaattttcttcattactttcaaacaattaatcatttttggactaagtgatcgaatattattagaaattcagatttacgtttcacttaaattttttcggcgcgcttttaacagattttcaacaaagaaggctggttttgggattactaggctcaatttgtacggattttctttaaaaatgataaaatacaattaaaaaaaaattaagaatcatattttgtcgataggaaagccatgagtatatataaaaagaaatttcaaaatattttcatttctgtagagggatcgaaccaggggaaagaagaagggaaagtgaaggagactagccactaggccatttgcacagttggtcttgctactttatgaatatatttaattattatttctaaattttttcctttaactccaattttctcactaatttttgcactcagacccccattcttaccagtgcttgtttttcccggttcccggttgccctaccgggaccgggacctgagcttttcaaaatccgggaccgggaaccgggacctcggatgaccgggaattcccggcccggtcccagtcccgctctactctacttttaataatagaaaaaaaattcattttataaaaaataatcttgcaagaaatcgtcttgaaaaataatctaaaaagccagttacggatcaaaattacggaaaaatcccaaaaatccgtaacccgcaatccgtaactccaaaaaggccgtaatttccgtaatccgtaatacgtaatccgtaattacgtccagccctgattggcacacatctcgttttttgaaacggtgtgtttatgagtagggatgcaacttttagtgatttaacaatttttttgctcgatttttttgaagaaaggagctcaaaaaacgcatttctgctttggaatttttcgatttggatctcactatcggtcactagaaatcactattttggcgcttcgtaactaaaatagtgaaaattcactattttggcattttgtcactattttttcattatttcgacattttttggaaaatatccgcaagaaaaatgcaataaaaacgaaaaatgcacaagaatcgacctaaaattttttttcaaaaatatacccctaagaatcgacctaaaaattttttagaaaaatttctcaaaaattcatcaaccaaattttttttcttgataaaatttttggtttaaaatcagggcttggatcgaaaaattttcaaaatcagaacatcgggcctaaaaaatcagattttggggtcgaaaatcagaacattttgcaaaattgcttcaaatctgttatttttacatttttgtttcacttattatatttttcccctcctattatcgaatttaacaattttgagaggaaataagcatattttaaattcagtgtatttaggatcaaaaaatcagattttaagaattttttgcggcgcatttttccaaaaagcttttggtgaatgggcgaggggaggggtccggcggagccgacaggcgccgccgggaaaatattgttatttttaatgcgatttttaacagatttttgtccaaaaatgaccaaattttgccacaaattttatattttcttgtaaaatagtgacattatggcataaaatttctaaattatgaggatttaggaaatcagtacaaaataagaacaatagcccaaaatcagatcatttatgataaatcagaacagatccgagccctgtttaaaatgtcaatatttgccaagaattattagaaagtaaatttacttcagttgcaactgcaaggaaaaaaatttttttttaacttatttttggctgaaaattatgtcactatttagtcacttttttggcacttttcgtcactattttagtaactattttggaatttttcgtcactaaaagttgcatccatatttatgagatatttgaatattttaaagtggtgcaagacttatttgtcactctgtaaaagcatcgtgtgtgagaatttccccactatttataggcaattctataacaacaaataaaggggaggtgctctgatgggtaaaaatggatttggtacaagatgttgaaatgatgag

SEQ ID NO: 10266 - DNA, 2973 bp, Heterodera glycines
  unsure (1)..(2973): unsure at all n locations
ttcttgtcaacaattggctgaggacaaggccattgagcgttcgtcatattccaatgttttggcagtcaatcggaaaccatttcagaagaaaagggaaggctcctcaagcagttcttcagtcaagagtgcttcttcgtatggaaatttggcacaacgcggatgctggcgttgcggagtaagccattttccgaagaaatgcaaccatctgaagacgacatgccgaaaatgcaacaagattggccacttggaacgcatgtgtgccaagcatcaggcatggttgaagaagaacgatgaccgcatcaaggatggaaaagcgacaaattttgtaagaattggctcattaatgctggaaaatgggacgcagccgaagaaattgattgaagcggcaattggagtgaacggaaaagacgtggaatttgtgatggacatggggacggaagtcacagttttgtgcaaagaatcccaccgacaaattggaagtccgaaattgggccattgcaaggaaaaggccatccttaacgacggatccacgcgccgatttttggggaaaggatttgcaaaattctcttttggagggcaaatcaagaaaggacaattttttgtgtctgagaatggatccaaaaatttatttggaaccgacatgatggaaaaatttggacttttggacggatttaagaaaaatttgaagggcgaagtccatcgaaacatttcgctgtcggagcgaaagtgatcacaattggnaggatcacaaccgatgcaaattggttacgtcattagccgaaagggatgatgtacgacgtccacttccaagatggatatacgggacggtaccatgcaacaatttggaggagtattcaccggccaagtatgaaggacctggatttgtggactccgaatcgcaaatggaagcgatcgccacgcgaactccaatggcaaacgttgaatgccgaagaagaatggacgtgtcggacagacgtgtcgagaaaaagaatggacgtgtcagatgaaaaagatcctttttaagggtgaaatgttagggatgggactcaaatggccgccccaattatttatttgtttatgtccttcacctctgtactctctctcgactttcctccccataaatagtccgccctttgacccattctttcacttgtatcttcacttcatttatttgttgcatcatccccaatcgatattccccattgcttcatttgttatttaattttgtcttcaataaatttggtaattattgtttgccctcggccggcataacaattttcaaatatgttttttggtaagttagagaaagaaaatttgaaaaaaacataaaaataaatacgccatcataatattttagtaacagatcacttatagaaggaagattgttacttgtttggcctcaaaacggtcaagtaccaagaaatttaatgagaagtttttctggccactagaaattacattcgaatgggaacattttgagcgataaacataatccgatcggtccctgttgaaaagcattacactctgctggttggaaagagcatacttattatgcatgatcccagaggaaaattacaaaattagagggaaaattccaatcgataagcattggtcagattttaatttcgaaccccccaattttaccattttaacagcactgaagaacccgacaattttggatgcaattttcaggtgtagccactgtttgacccgatctaccaaaaggacaccaagcaaatgaaggcattgattggcacattgagcgaggagaagcggcgccgcttcctgcgcacgcgttacgctcagggacgtatccaggatttgggcttgggggggggggtaccgatccgaaaagtcaattcttaggggtgtatttttgaaaattcttcgcccgattcttaggggtgtattgtatttttgaaaaactttcgccgaacgacctttttttttttttgctcataccagcgacgctgggaaaataggggtgtatttgaaacgataaattagcattttttccatcgttttcacaatggattttgaaatttagctatttttacagcttttgctccgcccctggccgccagcaaaatgtttctttgtaatttggcgttggaatttaaaattaatatgttgctttcgttatgataatttggcgttaatttaaatttggcattgctttttctctctggggcgctggttggtcttgttggggagggggggggggagtaccgcgggggtcttggggggggggggggaaccgcttctctttttctcttaccgaaggagtaattgttaggatattttattcatctccctttttgatagaaaaagcatcagagtgcctaaactagcatgtaaataaaatttggtgcgtttcagagcattttctgaaaaaaatatttatgaattaattatgcaaaaaacaaataaaaacgaaagactcagattttcgaaaatttttttgagccagctagctcggcgctcatttcagtgtaagttagtcctttaccggggagtatccctgcaaagtttggtacgcttctgctcaattagcaaaaaatatgagtgatcgaattttcactaaaaaagttaagcctacattttttggcatatttaaaaagcaattaaaaaatttttaaaatttaataattttcctgcaccgaaggtactcactcggcctcttcgcggcctcgtggtgggccttcgcccccccccctcccacgcccttcagagcacgacaaatatttcaacaaaaattttgaaaaattgactagagcaatcgaacgctaacggacgacctaatggaaaaaaatccccgaaggagagaatttaattaaatccattccttcgggggaccgtgccgggtgccgcggggtaagcagtgctggttcgtttcatcacggcaccgaaccttttggctagtcagcaatcgttgcttaacttgccagatcggacgggtgcgcatgactttct

SEQ ID NO: 10267 - DNA, 866 bp, Heterodera glycines
cccctaatacggtactggttacgccccggagggcaccaacaaaacactgacgcctctgatgctggccgccgcagcgggaacaagcgaaatggtggagatggtgaaaattttggtaggagcataagaaaattaaattaaaaaaatatttctatcagaatttttgcagttggagagtggcgccgatccgaaccaaatgtgccttcgcaaactcatcgacgcaagaggttcccccaccatgaccagtgagtgaaaagaatcattaaaaaataaatatttgcttttttggggtcactgactcatacaaaaaatgttgttgaaaatattaaaatatgaattttcaattaaaatgccataaaataatttttttaattttcaaaaaatgttgcataattttgtatatgaagtgttactttgttcagaaaggcacgggattgtcctttaatataagtacagcagaaattagaaacggaaaagaatgccccccaatttttggtaaaaaaaattatttcaaatgacgcccttagaaatgcataaacactcatcccatattctttgccaaaatagctagctaatctacagagttaaaaaattgcattagcatcgattttcccaccatttttcaattataacggcggaaaatttaattaatataattcattaaaatgtttttatttagattcagaattattaatttattttcagttgtgacgcccctttgggttggcgcaatggatggccacttcgaagtgtgccaagcgttggtcaaacacagggccgacgtcgacttgggcgcgccgcaatttggcatcacaccactgatggccgcatgtgagaacactgctcgactggacactggttggtcgtcc

SEQ ID NO: 10268 - DNA, 1800 bp, Heterodera glycines
aatgcacctctgagaactcatctaataattttttcaaaaatactctcactttttagcacctaaaaatcctagtcctgttcaaataatgtattttcagacggcccttttttgaaattctctcattttttctttaccggcaactatgtaaattaattcaagtttgaactcaaatcagcttacgaaattgtgcattttcaattattttttataaaaatatatttttatcactgatttcaaattaaggggtcacggcaattgatattgctgcgcgaaaagggcatgtcgaaattgtcaaaattcttcgtcatgctgcactgtaagtgtgaaaatttcggaaaagaaaatatattcaaaattgttttttctttcttttgtttactattaaattattaaagtggtcaattttgtattgcaaattaattaaatttgattcgtttaaaaaattggttgatttaacgtgtttaatttccgccattccattcccactgaggggggttgaaaaatagaacccacccttgaattaaaaccccctctgtattataaccctcccccccctccaagcaaaaaattttttccaaaaagaatccaaaaattccgctgggtcgaaatacataagaaaaatagcaaaaagggccgtaaaattggtttaaacctcagaaaataaagcttttacatttaggtatttttacaaaaatccaacttacaagaaataatacaagaagttggaagctatcaccatcctttggacatatttatgcttcagccttgcgaaaccatttggaattgcctttccactcgatgtttgtcgccctcgccccgtgagctatccaagcgttgtactgttttcacgaattgtctttttgaatgggtgcaattcagtatggggcttaatgaagagcgacttgccgagacctaagatgaaaatttatactttttaactgtttactcactttttgaaatattactttgtaagttagtcgtccatccaaacataactgcagccgactattgaagcggctgattatgttggaggttagccgtttttgggaggagcacgaatagctgcagcttattgccgtctgacacgccgtgaggatgcctgtgaactgttgctagcctaatgaaatgttcaaaaataataaactgaactaccaccacgttcgcattttggtccatagaaccgtcatcgtcgagcgaacagctgcagcaggtgacttttgcgctgtacctcgttgtcctcagcagaaagagagcaaggagcatttgaatggcatggttttgagcatttccggcaatggtgcgcccagaacaggcgtttttgcattaccagcacaaaatcaccaaaaaacgacatatttttgctgggtctttgaaaaaattaagtttgaaaacctccctgaaaatttccttaaaatttcaaacaagaccgattctttgggttgcagttttagtgtttattgcattttaaaaatattgtcagtagatgacagtagatgaataaaattatataaatcaattttcaccgttattcacttaggtaataaattaagtggctaaaataaaaatcaatggcttaactctctgtcaaatgaacatgtttatgcataatttattggcaccaaaatgtatatttttctgagatgaatgaaattttttttgcataaaaaatcattatttaacgaaatgaaagtcaacatcatctttttgataatagaatttataagcatttgccctgccattttacaatttcattgccactttctaaaacgaaaaaattctttccgcaaaaatctttattca

SEQ ID NO: 10269 - DNA, 1344 bp, Heterodera glycines
tcgctgacccacaaaatgtccagcccacgaaatgtccaagtctcgaatttgagttttttattattcagatgggcctaaggttaggcaaggggtaatataaagggtatattcgtattcagcgaccccgaaaaccctaaaaatcctaaattagactcattttgtttttataaattttgaaaaattttggacatttcgtgggtttttactcttttggacatttcgtggcttggacactttgtgggggcgccgaataacttcttctttattcttatgcgaatttgacttaaaaaatctgtggagttttttatctaatgaatcattataatttttccttttattgcattatatttatgaatttagcataatctcgttgaacttcaattatcccaataaatatttagctataaaaataatattttcagttaaagctgtctccgcttttgcgaatgattaatcagacaaaatatatattcaaaataaatggtagctttggtcgcacatcctttcatgccattaccggttattttatgtggcattttttgtcaattaatgactcttcctgtttttgcgaaaataattcaaacaaaaaagttaataattcttttatttaaattttgttttaatattcaaattattaaaatatgcttccatttcatattcaatgtgatatatttaattttatattaataattgtcttgtgtcgtagtatcttcaagtattttaggacgtgaatgttccgacattttcaagtttttataatgataaaaaaataaaacatagaatttcacttatttttattaataatcatatttattcattattgtttatttttttctattaaattttttgtaattattttgcgtagaaattcacatttttatctttgctttattttaaggtgtttttattttatgcagcaattttttcacttttaagaaaataattcacagataaacgctttgtatctttccttaaaaatatttattatatttttaattaggttaactagaagattttatacctttttcggtgcacgatgtgaagaaaagtgatttttattataaatccatatttgttaatattttttttctaaattatattctaataaaaagatttgtattttaaacttaaatatattatattatttgttatttattaaagaattattagtatcgcttatctaatatttttatatttgaagcatactttaattattttcaattaaattctcatactgcactgattaatattaaaaaataaaatttggtttttgtattttaattcaagctagtttttgttttaatttgatcaataatattttagattaattgataaaatattatc

SEQ ID NO: 10270 - DNA, 2417 bp, Heterodera glycines
tgtaagggttattcgacgcattccctcatttaattatttcttaattatttcccattggccattatcaattcaatcaaattttatccgttcacacgtttcttttctcgctgtaatgtttctccgcccattctcttcgcatttctccttcccccagtgatcagttagtcagttagtggtggaacagacttcaattatttattccttttctcgcttcgtgtaaatccaacaacgagtgaataaatatatcgacagtcaatgagtcgttgggattttgtggcttagtcactggtcatggctttccctattccctcccatgttccatccgggatagacggtgcggttggtctggggggcacagtgcgcatccctcactaaagtatcagtttttattgtaatcaattttaattgttttttgacatctcattgtcgacgaataatcgttttttatgattcaattatgttattttataaattggttcctatgccctaatcgaattaaaaatatgcatttgtttctttaactagtcaaattttaaataatttatcttttaatagttcaattatttgttcacctgctgatgacaaaataacattgatcgaatttagttaaaattaagtaaaaaacagtcttttgatagtatttctttctcatattcttttcattttatcatcatatttattcttcttttcgttagaggggagtggggaatttgggggaggaagggagggggatgcgcttgggccaaatttggggagaaatttgtgggtggaatttggggcgaaatttggggcggaatttttcaggggggggggtttacaacggattaaggggccttacactactttcctcaaaaattgcgaaatatgtacgaaattatataacataccaacttcaattattttataattctcgtttcgatgtattcttttcataaaatgtattatgtcattcattgttaattgttcgtttataacaaaacatttatctaattgtttttaattatttttgtttcaattataattgttgtactcttaattttatgtaaatttcgagcaatattatatgttttgatggtttatttaaattttatcacgaatagggttgtaaaataaacagggtttggcgtactgatgcatttaatacatttttttccttttctctctttctccgttctgtctcttttcctctccatttttctcgttttcactcttctcacctcactctctcgctctctttcttttctacccatctctttctctctctctccctctctccgtcactcttcctcacagcactctccctcttttttctctacatcctctctccccgttcctttgtatttctcttgattttgactccctcacattcctctttttctctcaccattattttcttctttctccctctcactatctctcattcttttcctttctctttttctccgttctgtctcttttggtaacattttccaaatcaatattttgggcataatcagaaaaataacataaatcttccagcactaattagagccctttattacttttataaattaatatgtgttttgtctaaggttatttaaacttttcttcaaaaaaagacacacattaatttatttgttattattttcatctttaaatgataatttttctttcttttttaattattttccctttagatttttaattttttcgcaaagaaaaataaataatattattttatagtttattttaagataaatattaatttactcgttattatagtaaaaccatttgtaaactgcttgaatcaacacgtgttttccagaatatgaaagatctcgtgtatcgcagtgcgttacattaattactttttatttactcgaatgtttgtaaaataattaaataatatttttgaaaattatttcaaacttttaaaataaagatagattcaaaacatattttcctttgtttttcgttaattttttattcatgcctatttttattgactttatctcttgtcgttttgcttttgcggcggccacgctcttgcagatcacgcaattggacagcaagttgctgacgcctttgcacaatttatttattaatgttaactttcgtttttattaatcgaagaaatatttatttaaatgtcagctaataatccatgccacttatgagaattttgcgttttcgcttagataacataattattatttttttatttgacgtctattttaattgtattttatgccgtattgattaattttaattttatatattcattaattattttttatttcatcatttaaattacaaattcttttttttatttttttattattgtagctgcaaattcataatattatgcaaattttcaaccatggttattcctttttcaaacaatttaatcattaaatttaatgcttttttatttttat

SEQ ID NO: 10271 - DNA, 1607 bp, Heterodera glycines
tttctttcttttttaattattttccctttagatttttacttttttcgcaaagaaaaataaataatattattttatagtttattttaagataaatattaatttactcgttattatagtaaaaccatttgtaaactgcttgaatcaacacgtgttttccagaatatgaagatctcgtgtatcgcagtgcgttacattaattactttttatttactcgaatgtttgtaaaataattaaataatatttttgaaaattatttcaaacttttaaaataaagatagattcaaaacatattttcctttgtttttcgttaattttttattcatgcctatttttattgactttatttattaatgttaactttcgtttttattaatcgaagaaatatttatttaaatgtcagctaataatccatgccacttatgagaattttgcgttttcgcttagataacataattattatttttttatttgacgtctattttaattgtattttatgccgtattgattaattttatttttatatattcattcattattttttatttcatcatttaaattacaaatttatttttttatttttttattattgtagctgcaaattcataatattatgcaaattttcaaccatgtttattcctttttcaaacaatttaaatcattaaaatttaatgctttttttatttttattgtgcctttattttaattataggtttatttaatgtcaattgtcaattgttataattttttatgtatttttatttatttttattacatagtatattgaagatagctcagaatctgaataatttctcttgagggtcatcccgagtgaatggctattctaaaattcttttcatctagtttattttttcaatcttatttattttcttattataaattatttttaatgaatttactcatttttttaatcagatttttttttccatatattataaaataaaaatattttttggtattcttccgtgaaagaaaagctatggctttgagtaacagattgggcgaataataaaacaaatatgctcctcttaacattctctaaatgaaaagcttttccattttatatatttgaaaatttaatctccagttatatattaattttcatatattttttttacgaaaatttttgaattttataaaaaatactgtaatatttaataattattatttgtcaatatttaaatttttaagatgcagcaaaaaattgtaaataaatataaagttggttaacaattaagttgattgatattttgagattcgatcgattttaaaatacgttattataaattttatttgattatttttcatctaaattgagttcttatatgtattaaggaaaaaataaaagttactgtttaattttgattttcacgtcattatttctataggtaatttttctgttaaagagaagcccggttttagtgataaccgagtgtatatttaattaatttttaaattacatttttactgacgacaataaatttgctcgttttttatttgtgttattaagactttttaaatataaaatttgaaggcttttaacataaagaattttttaatttatgtttgacattaattaatttaacga

SEQ ID NO: 10272 - DNA, 1359 bp, Heterodera glycines
  unsure (1)..(1359): unsure at all n locations
tgtgagacgaggagaggagagcgaacatcgccaacaaccaacataaattatttcatttacatacattgatttattttttggtgctggttttataacgaaaatgcaaaaatatatgaaaaatatttacaataaacgaaaatattttattttgttatctgtatgaaaattttaatggaaatttgtggaaagaacttttttgaattcataaaaatatattttgcctagttttaaactttttctctcattttttcataaaattctattctgacttattataatttttgtaatttttattcattgccagattttatgaattcatttttttgccaaaaaattccgatcaaaatacatcatattttctaacgccctctttttcttttctttctccccccttcacgcctcactctctctctctctctcactactttctctctcacctctctctatctcctctttctctctctctctctctcttatctctgtcttattatctcactatttctttaattttctctctttctctacttgtctaatttcacccgtttctaatatcaattttccgcatcttacgcctttccaaagcaacgcgcgggcgaacgcccaccaaccaattgagagcagcagcatcatttagtcaacggatgacaaaaattcattcattcctttcatcgatttgacaattttttgggttagtaacgaaaaacatggcaaattaaataatgcaaaaatatttttaaaacatttgaatataaatttaaaattatcaaacaaaagtccaatactcaaattacttaaaaaatacttttttaagtgctgaaatgcaatgccaaacaataatggtagtaaataacattaatcaacgaagtaacctttttggttgcattttttgtattaaaacataaaaatttttcaagataaggacaaacagcaccctttttagcacgctttttccaaaaactagtacaaccgttaggtggtccgacgatacttatagtatagcggggaaaaaattgtaatttttaatgcgatttttttttaccaattttgtccaaaaatgaccaaatttaaaaatgccgtttgttattacaataatcagtaaaaaatattataaaagaagactctgcaaatttattgtaaaataaaataaaataaatcttcagaaatataaactgttatttttgactataaaataaagtaaaaaaaatggagcccattttccacgcatgtgaacaagaaaaatgaaaattacattatcataaaaaaattngtagcaactactatttttattaaattttctaaaacaaataaacttgaatatgaaaaaaattaaaataagaaagagtaatggtgaaaaaataa

SEQ ID NO: 10273 - DNA, 940 bp, Heterodera glycines
  unsure (1)..(940): unsure at all n locations
aaaaaaacatcctaattcggtttttctttctttatttttgtgtgcagacgcgagaaattaggttttaatgtacgctttttcaactcaaattagttcgctccttcttcaaaaccaccgttttggtcatttcgcttggccttctgcacggattggtcattttgccggtccttttaacgttggcacaccgtaagcgcagcagcagcggtgccaatgccgagaacgaccagcagcagcaaatcactgattgtcgagaggggaaatgggcgagaacggcgcgggacaatcggcgacggccaaactcggcaaattgcagcggaacatccgccgctgaaatatccgcgccgctccctccccgtgccgactttttcttccccaccgcttccattttcgaccaaaggcatttcgcatttgccatgacgaggacggggccaatgctcgtcagcagagaagcagccccatcgctttattcgctgaattcgattcattgttgttaaatttatatgtttttgctccaatgaatagcaaaagccacgatactttttatcggcttttttctttcattttaaagctttctgtccattcgcctcggccgtgctattgtcaaaaaaaaaattcgagaaaacagataaagtcatctgtgccggtaaaaaatttagacaaaagaatgccggaaaaaagtcaagagggaaaaataataataaaaatattcgcagttagtatttagaattaaacattaaaacatgcaaatcctaaactaaattatttttcttanaaaaagaaagaaatattcgccaattcttcaaattttcatggctcaaaaataagttgctttttttgccgtgtttaaccttttatttcgagactttagaattggtcccatgagtctaaacagcaatttcgctannaagcagcagcgaaaatcgcatcggaattaaaaaaa

SEQ ID NO: 10274 - DNA, 4473 bp, Heterodera glycines
aaaatttattaatttttttagcgcaaaatcaacaccctttgcgaaattttcgcttttttgcttatttttaacataaatttattaatttttaagaaaatttaaatttattcaatattctcgagaaattttggcgaaaaaatgattttttgaaaaatttttcgggttttgggctcaaaaaggctaatttagctgctgggggccgttctaatagaggtttttttgaaaaatgccaaaatatggacataaaatatggacataaatcgcgaaatatggaaaaatatggaaaatatggatatagaaatccttcctagaagcttcaaaccaagctaaaaacatgtttttcgtgcgtttcaggcctcccacattccaggaaaaaaatatggatttccatgtaattctattccctagtcataagaaatttctatcaattctcaaaaattcgaaatatgtaatacaatgaaaatacatatgtaccaaaaaagtcaatggaccttttattttattacgccgacctttgggaaataatagtccaattaaagtataattgttcgcgaatgatgtcctagtggcaaaaattgtcaaattctcattaaattacttagtcttgttaatgtcatccaaattatccaataaaataattttcctttttcttttctaaatttattaatttcaatttttataggacttcctattagaaaatttttatggagaagcagcttccattcctgaagctcaaaaaaaattctagatttccggccgaaaaacaccaaatttaaaattgcattttatctgcaacagattttgtgcaataattgctttaattacttttagaatgtaagccatataaaattaaaaagattgacttcatagcgacaattaggcatctgaatttgtttgctgtgcattgtcggaggatccattcttaagaagaaaaaaaaatttttaaataataaaaatggataaaaaaaaataaaatatttcaagaattaatacagttttacaatttccaatgagcaacacctgactgtgaatggcttctccaactcgtgctccatttccatgtaaaagcatcgcaaatcgtaaaccctgtccaatttggagaggtattgggcatgaaaggcgaccaccaaacgcacactgaggaaaacgccccggggataatcctcctaaattctaaaattgacaaaaaaaaaataataataaaaccaaaacagctaatttgtttattgtccactttaaatgaccctttttgtgtgctttatgccgcacgtgccaaaggacagtcggatttgcgcattccgtgccgccccgcgtccaatggcactctcatcgacaaacgcggaacgacagcgcggctctttgaattgaccttcaacaaacacaacgccaacgaagggattgcgagtgtcaaaacgctgaataaagtgcgttttgactatacgtgagaagtagagaccggacaactgaggtcagcggaatcccgaccgaatcgcgatcccgaatcggagtcccgtccagatcaatatcgatcccgaggcttttttcggcatccagcgggattataaggatttgcttaaactcaattttctttcagttttgtgccaaaatttatagtggctcaatcccgcgggattggcgtgaaatggtcgggagggatcccgactcgggatccgaggaaataccgttgctaattattcccgatgaaatttgaaaaagctcaggacggattccaatgatgacatatatataagaatgcgaacattggttgtttataaagccaattatgactaatttaattatatatcgatgatttgcagaaaaataaagaaataaaatacgatgaaagtggttaacaacatgatgaaaataaatagaaacttttaaataattatttatttaatatataaattacggtgctttttaatattaataaacttgccacttcaataaaatttccaccacagtcgacgaatggttcgccgatgatgccattttcgggaattgcaaatgccaaaaaatgaatttggaatgcgagaatagcgaaaatagaaacaaagaaaatgaaaagcatttgagaggagatttataaagaaaaattgtgaatcgtttgagagatggcgccgggggaatttcagcagcaaattaattcactaattaggtgaattgatcaaaacgagtgataatgaatgacctatgacaatgcaatttcgaaatcagaatggaccctcaagaaaaatgaatttaaaaggaataaaaatcctatttctttttatttttgtccatttataaattacctaaatgatttttctaaaatagttatgcatatccttcaaatcgaatttttctgttggcctttgctccctctttggccattgtcttttgccaaattggccattcccgacaaggattctcagtaaaaacttttgcataatccaaaaagtacaatgcacggcattaccggcagcaaaatgtacgtggacggccacggctcgataaattattgaatatttttaaatatagataccatacataatcaggtttaatgagaaaggaaacattaatctcgtatgaacctttttacaaaattaatttattatttatttaatgagtggaataacattggtatagataagacgaatagcttatataagcatgggattggtaataaacaaaacaatgaataaaatggtctaatttggtcacgaattcatttaacggagggatataaccccgaggggttagtggtcagtcatggcgcaatcctcccatcacattcactcgtcgtcttcgtcgagctgttcaaatgggcattgcacttcgttttcctccgcgccgttccgtccaatcgcggcgctcaattcgtcgctcgttttctcgtcaattaaatgcatcccaattcggttgaggaacagaatggcctggcaatgggaccacgcgtttgtcgggtcggcacggccctcggcggacagttgcgattcgctgcacgacgccgaccactcgcgcagccgaatgacataatcgttgacatcggacactgaaacacaccaaatgaaacatgacgaagaagcagttgaggttggagggagggagcgacggaattcgaatgcaaaacgacccgtcaactttctacaaattcaaaaaaaaaattttttttttttttgaaaagtccaatacatttccaaattatttttgtttcgctaaaatttacaaattacgaatcgaccacttacagtaagccaactcaaattgggcgtcgaggaaggtggacacaatgccaaccaattgcgccaccaatttgcccgtccgtttgcgtctgcgagtcgcattcgcccgcgacggcgccagccaaccgttggcatcggtttcgtcgtcgtcaaaaatatgctgctgactgagcagtgcggaaaaggcggacaggcgaagggacgttgtctaaaaggacaaaaaaatttaaaaaaggagaaaaataggctattccttattttgaaatcgcaaacgaaaatttaaaaaaatgaacaaaaaagcacgcaaattcacacgactcaattctcaggttgacccatttgacgggattttatcataaattgttgcatttatatcccaaaaataatgctgtttttcagaatcactaatccatttttggaaaccctgaaaatagctaaaaaaacaaataatgaagatgtgaattggtaagtttcgtttactttaatgcacagtcaccccaaaactgacttcgtttgcctccatcagatcgaaaaggaggtacgcaacgtaacgcgttaatcgaatgaatcgctccttgagacaatcgttattatttgggcgaatttccatggaaaaaaatttttgaattcttctaaaaacatatttttgtgtttattaataaatattagattgaaacatgcctgggcctgtgtttcttggaccaaagtccaggtccaggaaaaccccaggtttccgaaaaatggcctggacctgaaaccggactaaggaaaaacccaggcctggattcgattttgtacttttgcgggtttgtcaacattttttggaatttgaattttaatatttcatatgtttggcattataattgcagatattttgacaaaaaagttcaaaaaaaattttttttttttgacaaaatgggttaaccaaatttcgttcaatttccctgggtcgcctattctcttctgaaatatttgtcatttttcgaaaaaataaacatgtaagccctggtatgcagtacatatgggctttttggtcacaaatattgaattgaataggaataggatttttaaacaaaaacaccaataaaaattgacctcaccaactgaccaaaaactactatttttcttaaaaaaaaatcgcaaaattggcattttttgataagaatctgttaacaaattacactcaaattttcaaaatttccccggcggcgcctatcggcaccaccggacccccatgttccgcaaaagt

SEQ ID NO: 10275 - DNA, 2207 bp, Heterodera glycines
tttttgtgtatttaaaacctattttgcgatttttcttattaagaaagggaatttggaagtgggtcttggcgcccagcttggcggcgcccagttgagctggcgcccagttggcgtcgcccagtcggcggcgcccagttggcgtcgcccagtcggcggcgcccagtcgacccccaccgacaaactattacccaaaagccaatacaaaaaggcacacaaacgaaacaaaaattaccaaagtgacaattgtcaaattatggtgtataatggcacaggcacaaaggatttaatatttgatatttttaaatgttaattttaaaaaataattttttctcattaagaattttaataaatttttaacatgcaaaaaagtttttcaattgtgtatttttgaattttctttgaaaatttaagctaaaaatattattttcttgattcatattaggctggaataaaaaactatggaaattcatacaaatccggtctctactcatagacaactgaaagcacataaattccaaattatttaaaaattgaagcaaaattcacataaaatattgttaaaaaagccacaaaaaccaaataaaatgtgttgtgtacattcattacatattcactcattgacaatcaaaagtttactttaattttggcgaaatgttctcagccaaacggccgaattcgactgaatttaaaaattcaataattttaaattaaaaatttgccgatgggtcaaactcaaaattaacaccgatggcccaatcaatcggaggatttaattgcacaaagtgagcccacctttcgcagcgtggaaaatttgtcgaatgcgtcgccggccatcactttttgggcgaacagccgatcattttccgtgtcggtgccctcgcgcttcagcgagtccaactcggcacggaaattggccaaacggtctcgcagcgactgattccgctcgttgtactcactcctggcaaaaaatagccaaacaaaaattaaaattattatgagaattttatatttgactaaatattcatgttttcccaacggtttttacactttgtgagaaaacgacttaaatcaatacactcactcaatgccaatgatccgttactcaaaaaggtcaaatgttttttttaattttaaaatttgccaatttttacggtaagtaaaaaatgattacaaaattttgatttaaagtgcaaaaacagtttgttactgttatagtataccacagtaacttttatgttccccacctggacatttccagctcagcgaaaatgtgctgcaattcggcggcgacggaagtgcgcgagtcggacattgtcgtggccatttcatattgacagccgccgaaatacaaaggcgccatttgctgaggcgaagtgacgacaatctgagaaaatatgaacttaacgaattttgaccgctataaaaaattataaattaaatataatttagatttatttttttttttgcaatttcacaatgataaatacccaaatttcgatttaaaaatggcactttttggccaatgcagaaaagcaggcgagtccgccgcttttattattatgatgtgaaaagtatttaccaagttgttgttgttgttgttattgggtgtggttgtcccgccgttgttcttcggcgattgtgccgtcgtcggtctgttcaatggcactgctgcggcgccgacaccattggccaatggcatttgctgctgctgcgtttgttgccgattctcgaccacttcttggtacggaggtggctgctgcatctgtgaagattccgatagaccacgtttaattgatcaaattcagtttgaggggtcattaattgtggctaatttgctttgcaatttgtgcccaaccacaaaaaacacctgttgctgctgttgttgttgctgcgcaactgttgccgtcccgggcgttgtgatgccattctgttgctgctgtttttgctgttgttggtgctgaagcgcagccattcgttgtgcggccatttcagtctcgcgcattttccgctccaacaacattttggtctcttccgcctgtttcggcatatttttcaacattggcaagcgaattgcgcctgaaatggcacaaccccacaaaccctcagctgggatagttttgcgcgttgcgcttccgcctcggcttcgctggcacgtcatgcccgctcaatgggctcctgctcggacagaatcgcccgatccgcgatca

SEQ ID NO: 10276 - DNA, 1907 bp, Heterodera glycines
aaaatcaggcgagtccgccgcttttattcttttgatgtgaaaagtatttaccaagttgttgttgttgttcttgttgttattgggtgtggttgtcccgccgttgttcttcggcgattgtgccgtcgtcggtctgttcaatggcactgctgcggcgccaacaccattggccaatggcatttgctgctgctgcgtttgttgccgattctcgaccacttcttggtacggaggtggctgctgcatctgtgaagattccgatagaccgcgtttaatcgatcaaattcagttttgaggggtcattaattgtggctaatttgctttgcaatttgtgcccaaccacaaaaaacacctgttgctgctgttgttgttgctgcgcaactgttgccgtcccgggcgttgtgatgccattctgttgctgctgctgtttttgctgttgttggtgctgaagcgcagccattcgttgtgcggccatttcagtctcgcgtattttccgctccaacaacattttggtctcttccgcctgtttcagcatatttttcaacattggcaagcgaattgcgcctgaaatggcacaaccccacaaaccctcagctgggatagttttgcgcgttgcgcttccgcctcggcttcgctggcacgacgtgcctgctcaatggcctcctgctcggaaagacgcgcccgttccgcgatcaacacttgcgtctcctcggcacttctgatcacattctgccaaattgggggggggggggggtgggagaaagcctttaaatttggctcctaaatttttaaattttaaagctcgatcacctgcatggcgctcaactgttccgacagatggttcagttctgcgcggtagcggtccctctcctgctccgcctgcgcgcgctgctcacgctcgcggtgcaaccgcacctgctcctcctgcaaaggtttaaaaaagtcatacaaaaaaaattaaaaaacccggatttaatcagggaactttttgttttatgagtttctgctatatcatttttattgcttgtacaataatcgcttatttgttagcaatagctaatcattaataaaattccaaatccaaatgaccactaaaccaatcaataaatgattagtgttttttatttgtcatttcccactgtcactttttgctgatcgactgttctctgatcagttttgtctttaccattctgcgccttcgctgctcgtctgcctgctgcttcatctgttgcacctcgagcaggtcgggctgtcgtctgcgcaggtaaaggttatgcgtgcccacacagaggtcgagaagtgactgaaacatggggagggcaaatatttaaccaagcttcttctgtgatcagctggtaattgttccaaattgatcataaattagttaaacttgaaattgaacaaaggcacaatatcccggggtattagggagtctcgaaattcagttcaattttcgtaaaaagtcgaaccaaagcccaagccgggacttttaccaggtcatgccgcctcctccccaatttataatagtttaaaaaaatgaaatattttatgaatcagtgcctgattgatggacatgtcctgtgccctgaacttgattttgcttttgtccgcagtgcaaatggtgaacattttgtttttgaacgaaatgcatttgatctctgtccatgggaagaattaaatcctccggttgattgggtaatcgatgtgaattttgagtttgattatcgcttttaatgcctataaaaattttgaacttaaatttaatcgaattcgtccatttggctgagaacacttcgccaaagttaaagtaaacttttggtgtgatctgaatgagtaaatgtataaaaacagaaaatgcaataacatagaaaaataaaccctaacataaggtcgacttttggaaaattcaaaaa

SEQ ID NO: 10277 - DNA, 292 bp, Heterodera glycines
ccccccccccccccgccccctcccatcgccacgcaatttccgctgtggtttaatttggtgggcaaaatgtgattcgaatgattaaatacaattctaaatgatgatgatgatgatcaattattattatttaatgtgttggggcgggtgaaaacggcgggagaacagcagaagaagaagaagcagcagcggaagaagaagacgaaggaggaagaggagaaggaagaggaggaagaaaggacgattctcccctgggggggggcacacattcgatggaatgtgggagttggggggg

SEQ ID NO: 10278 - DNA, 951 bp, Heterodera glycines
taacatttttccatggcgccgtcggaaaccctcccgccctctcccttgagatctcgattatcccttattcttgaactgcaaaaattgctgatctgtgaaccaattactaccattctctccccataaatcactctgatcattgaccgtctaatatcaaatttttgaatttatcaccaaacataatgccaaagtcgctgatcattgacaacaaatgccccattagagactagggatggaattccgatgcattaaaaatttcggaagtcggaattccgaccccaaaaatgtcgggactcggactccgtgccattccctggtagacacacgccttgttctcgttggtagcattcctcttctttacaatgcactctgttgttacatttcccatacacatcaacttggagcagttgttggagtcgggccgtcaacaggtcacgtcccgacggcacattgcaattggacacaaattggacagccgaacgcttcttcagcgccatacgcttttgaatctgggctttttttggaggaaaacaattagtcaattagttaattgctcctttattagtttgctgagtggctaattaaatgttgccaaaacaattttaaaattaaattttttattttgaattcggatagactgggtccgggtaccagaccggaatcaaacccgtatagccggctttttcaagacccggacccgattttttgaaaatcaaacacacgtacctgtgctggcccgtttgtttgggcttttttctccccacccccctagaaatttttaaaaattttacttacttagatatttttcaagaaaatattttagaaagttttttataagaaaattctaaaaaaagtgtttgagaaattttcagcgattttgtggaatttttttgaaaaatcttagtaattcaccataaaaatttctcaagaattattttttctttgaatttt

SEQ ID NO: 10279 - DNA, 1841 bp, Heterodera glycines
tcgctgacgcattttctgctggacaacaaatttggacactttgaccacctccgcttcggtccaaatgtattggggcaatgtttgagcagtgatcggtgccaacgcatcgtacggaatttgaatggtactgtcatttcggtaagtgatggaaatgttgaagaaatttgacggtattttgtcaaagttcacactgccaaggagcgggctctgtattatgggcggaaagaaagcaattaattaattaattggtgcaattaataaatgtgtcgtaaaaggcatagcccgcgaaggctcccggacaatccgtcattggtcaatccgtcagtggacaatccgtcagtaactaatccataaacaaatttatttttaaaacacccaatttatttaaaatcaactgacggattgtccattgctgacggattgtcctcaacatacgcattgaccaccgacggattgtccacttactgacggattgtccggaccccatcactgctttaggccaaaaattgcactaaactcgagaccaaataaacccgagaaatttgtcgactcgagactcttctctgtttgggtgtcatgatttttttagcaaatcggattgcttgaaaatttaaaaattgttgtttgtccgttttcaaaaatccataattacttcattacactaattacctcgtgggacatcataacatacagctaaacgaaggcaattaatattttatgtgcaaaaaaaaactaaaatcaattttcacctgatcagcccgacgatgtcgcggcaaatctctcaatatgtcaccagtgtgccagatcacaacagaagccgctttttcactgtgtttttattggcaataattaaagggcatttgtgcaaaaatcaaatttgcgaattttgagtcatttttaattatagagttataaaaactgtcggtgccgacagacggacaaaaccaaaattttgctattctgtttttacacagtacgagttgggtaatttagtagtgctgttcgagaacgaaaatttcccgagactcgagaccaagacttgaccccgagactcgagacccaaaaaacccgagactcgagaccaagacttggccccgagactcgagacccaaaaaacccaagactcgagaccaagacttggccccgagactcgagacccaaaaaacccgagactcgagaccaagacttgaccccgagactcgagacccaaaaaacccgagactcgagaccaagacttgaccccgagactcgagacccaaaaaacccgagactcgagaccaagacttgaccccgagactcgagacccaaaaaacccgagactcgagaccaagacttgaccccgagactcgagacccaaaaaacccgagactcgagaccaagacttggccccgagactcgagacccaaaaaacccgagactcgagaccaagacttgaccccgagactcgagacccaaaaaacccgagactcgagaccaagacttgaccccgagactcgagacccaaaaaacccgagactcgagaccaagacttgaccccgagactcgagaccaaaaaaacccgagactcgagacccaaaaaacccgagactcaagaccacgacttggccccgagactcgagacccaaaaaacccgagactcgagaccaagacttgaccccgagactcgagacccaaaaaacccgagactcgagaccaagacttgaccccgagactcgagaccacaaaaacccgagactcgagacccagacttgcccacaatcactcaacaccacttgaacccgagactcgagacccagacttgaccacaatactcaagaccactagaacccgagactcgagac

SEQ ID NO: 10280 - DNA, 1089 bp, Heterodera glycines
gacccaaaaaacccgggactcgagatcaagacttgccctcgagactcgagaccaaaaaaacccgagtctcgagaccaagacttgaccccgagactcgagacccaaaaaacccgagactcgagaccaagacttggccccgagactcgagacccaaaaaacccgagactcgagaccaagacttgaccccgagactcgagacccaaaaaacccgagactcgagaccaagacttgaccccgagactcgagatcaaaaaaacccgagactcgagaccaagacttgaccccgagactcgagaccaaaaaaacccgagacttttctcgagtcgaaactcgagaccgagagtctcgaacagcactataatttagtgcgagacgtggcaccactacgagttgggtttttatcccgacagacgacgcaggaaaaaaaaagattttttaaatttcttaaaaaatcagcaaaaaaaaaatttctattattttccccttttttctaaaaatgcatatttttattctgctgtctgctcacaagcttatgtcctccgtgtacacacagcggtatgaacagtttttgtccccgaattgtaagtcgacaaattcgaaaatgctcgaatgaaaaaagttgttccaggcgagaataattgggcgttcatccgccgacgcctgcaaaaatgatgaatgtttaaacataaagttgaatataatttgatgaaaattgtaatttaaattttttgaatgtacggtgtgtacagtaatccaccagggctggacgaaattcgtttcgtcctacatttttgaacacttttgagttacgttttcgtattttgttttcgtccgccaaaattttttcgttcgttttcggttttcaaaatttcatttttcgtatcgaatgtgctttttcttttcgttttcgtatacgattttttttgtttttttgtgattttcgcacagccctggacccagcaaatggtattcggatttcccgaaattgttttgttttataaacatcaattttatttccaatttgcctcacaacgggtgcctaaaacatctgcacgtggccttgtatcttaaagagggaatatattgact

SEQ ID NO: 10281 - DNA, 1046 bp, Heterodera glycines
tatttcatacctaaccgagcgattcaaacaacaacaacccctttaaataaatgtttaggcattcccggcacaacgggacaccttggcgagtccggctaccctggtcaacccggctttcccggcgagaagggcattcaaggcttgcccggccttcccgggctggagggcatgccaggatcgtctggtccgccaggtctacctggcttgccaggcccagccggaccaagcttcagagacggtaagtaaaattttaatattttcgttgaaaaataactttaaaaaaattttatatcgtaatcaaatgccaactaaaaattcaaagaatttgacagtttttgaaatcaaaataaaatattctaaaaaattcattgagaatcattagtaggtcaattatttttaaaacttttttggatcaaattttttcctacaaatttttttaaaataaattttaaaataaattcatctattattgtcattttgtaaggttttatcattgtcacccactcacaaactgctcaagtaccgcaatgtccacaagacacaacaaaactgtgggacggatattcactgctgtatttggaagggaacgaaaaggcccacaaccaagacttgggtatgataattaagaaataagcaattccctttaaatattaattaaacgaattaaggtcatgccggctcatgtttggcccgcttctccacaatgccattcctgttttgtgatttcaacgatgtttgcaagtgaacaaaagaaaattcttgaattttccaaaatttatatattatttaaattaaaaattaaaattatccagtaataattaaataaaattcctacggtaattgtttcaaattccagttacgcttcgcgcaacgacaaatcgtattggcttgccacgggagaagctgtacaaaataataaattatataaaattaatttcaattaaattgattttttacctctctttcagaatgacaatgatgccggtcaatgagcaacaaatgtaactgagaagtcgcgttgtgccgtttgtgaagcaccgtcaaat

SEQ ID NO: 10282 - DNA, 3149 bp, Heterodera glycines
taattttataatttactaaatttagctctcccggctctcgtttggaagatttccgaacaactccgttcattgagtgcaatggtgcccggggatcatggtgctagactttaaatttatcttatcattttttgaaaaattttcagccatttcttcgccaacaaattcagtttctggctgacaaccattgaggaccagcaacagtttactgtaaagctactgtatttttaaaaaattaccatttaatttattcgtaatttacggtttatccaccaaaattcctttaagatcccacaaagtcaaacactgaaggcgggcaatcaacgttctcggatttcgcgctgccaagtttgtaccaaaacaactcgataaacgccgtttcaccaaaattattattgttttttttctattaaattgtttttttaattttattaattgtcatactgccaaattcatccaatttcaaaaggcaccgaatcatatttttattgctccttcccttttttcattatatttcatttcactttttttgtgttagttttttgcaatgccttcttccatctcttcttgcctgaccttttattaaaatttgaaattaaaaaaaaagtaatttaattttatttgtttattttttcaaatacgccaacacttttgcccagactgtgtgtttatatgcacttttttcctttttttaaattttgccatttaatgatattttagtgctgccatttgcttttgtaaccaaaatgtgaatttcacaataaacattttgccaaaatttacaataaatgtcttttgttgcttgcttttttcaggctttattatagaagcgaaaagatcaacagtgaccctaaaaacctgccgtaaaaatgttaggaatttcgaattttttaatttcaaatttgggtcaagaaccctgctttacacttgttggcaactgctggaactgacctatttcctgggggttagctctaattttgattatttcatttcatgctgaagcagttatctaaatgcattcaatatttgaattcataattaattaacagcaaatttttttctggaacaaattcataaataaattctttttttattgttatttatggaaaaggcacgcgcacattcagggccatatatatttttttgttatattgatgacacaagttacaatagcttctcttattacgtaagaagaaattcttagccaacgagaaaatggggtcagggcaggtcatccacagacaactcatccacatttttctcggataaaaattcaaattaaatgatgcaaaatgccgatgaaaaataaaataaaattgataaaatctcgtttcgattggtgatgggcatggctgtgctgttttccaattatgacatgggtctatcattaaacccattggtttttgctagagatcggaccggtcggtttttttttccggttttttacggttttcggtttttgaccgaaaccgaccgaccgagaattttttgagtttttcggtttttttcggtttcggttttttccgtttttaaccgaaaccgaccgaccgaccttatttttaggggtaatccagcgcactgatttgtgagtactaatatggctttcttttggctcaatttcgagtccctgcccagattagaacatttttagaaaattaaaaaattttttttgcatttattgctaaagcattgactatttacaaactctcaaattcattatcgactcaaactatggcgggtttcatcaattttattttatttttcatcggcattttgcacccatttaattttaatttttatccgagaaaaatgtggatgagttgtctgtggatgggatgccttgtggacgacttgactgtggaaaagagcatggaaatggcagctgttgaaaaatatcctaaaaataataattttattaaaattgtttttcggagttacaagaattaattggttagatggtcagttctaaaaaggcataaattaatctaattttgtaaaaatatggctcaattatttgctattaaaacattttctttttttcatcggatatgcactcgattttcgtttgaatttttcaaagttcttgacacaacaataacagcagcagaagcattttgattggtttttggatgggcaaatgaaatttgaattcgaattgaccacaatttaatgacccaaccgaactcactcttcaagatatcacgatattctttgctaaaaaacctttatttattaaaaaaaagattttattattaattctaaatttgcctgcaaatatataggattggtgcattgatcgcccctgcaattgtgaccatttgtaccactaatcgtgtgatcagaaattgagatgacggatcacttgtgatcagtccgcgccccacaatgttaaccaccagacaactggtgaaccaaaggcaaaagatcactgccatgatcacagccaatgatttgaaaatgcgacgagtgatttcaatttgggactgtgaagaattgttgctgttgttctgatcacttctgatcactgagaaatgaaaagctattgttttaataatcaattgtaaaatagtcatttaaatttatgtattttaattatgtaattaaatttaccctttagcataatagccatgataatataaattacagttgtagccaaagtaaaaataaccacgataagagtagcgagcaaatacacttcaccttgcaccatatcaccaggctcacaatagaccatactatttaaatataaaaaatattattttcaattagttaattaattaattagttacatttcgggatgttgtagatcaaaagtaaacgacaaataaacaatataaaaagcgattgacatggaaaaaacattggctataatcacatattttccggaaaatcttgagatgttacgaaaacttaaagaaggttagattaatttcaagaataaaaatttataaaattacaaaacggggaatgccaatgccacaaaacgatcaatgcttatccaaaacagatttagtgcagaatttaaagatgaaagtggtgcaaagaattgtgcataaacacaagtcaacagaggaatccgtttgcgaagaaaaatgaggactaaaataaataaaaaattgaaaaaataataaaatattttattttttatttat

SEQ ID NO: 10283 - DNA, 1584 bp, Heterodera glycines
  unsure (1)..(1584): unsure at all n locations
aatcagttcatanaatgccaattgatgtgtcatgaatntaagaggacgcggatgcccaaaaaacaaccattctttttctgcctttattattttaataattataggctgactgagaataaattttcccagtctcgagactcaagcctgagaattgatcacgagagtggagaatgagacgccatgaaccgggaacgagaagcaatcccgaatctcgacaaatttataattaggagctaattaggaacgtctctcgtctaatgctttggtgccttttttcatgcaacaaatgcgcaccttagcaaataaacaatgctttcgcctttatttggtaattcccttgtaaaaagtgcgcgaaggaacagcggcgcacggttttcgggttcgaattcgcccatgaaaaacacgaaatgtttgctcggatcaggccaattaatttcccatttttttctctgaaataacaaatttagattgtaattaatttaaatgtttttcactaaataaatttaatttttaaagaaattcccttaaattagtgttgttgaattttgctcacccttttcagtccgcctaatttgtctgtggacgtgacggttacggtaagtttttctacggtgtcactgcgttccaatggcaattcgacggtgaaagagccgtcctcccctctcgtcaccgtttccttcgcctttggaatgccgtcgtcatagtcaatttgcacttcgaattgatttgtcgcgccaattaccgccccgtcgaaattgaattttgtaattattttttcaattttcttcttctttttgccatatgtaaatgacggaagtgaaaggactgcttggagcagtaacagaaccaaaagaagatgaaccgaagacattttcaaacgaaaaatttattctaaaaagaatcgaaaagcaataaacaatttgatatatattgtgggatgttttgctgacaaatgagcaaataaagaaaacgctatttgcttgttgttttagctttctctgtatgttacacataaaaagcaaattaaacataattattcttttgtcgggcaattttcagaaaataaaactaaaatagggtgctgtgtcgaagcattcgccgaatcggtggccaatgtccgcgtgctgtcctggattttgttgggcacgttgcatgcccgtggcaatggcactgtcaacgcaatttgcagctccgtttcgggcccaaaccaatgtttgcccgtgccgatcgcttgttcgggtcagatggccgattacatccattttgtgttggccgggttcgcagatcagtcgaaagtccgccggaacttttgttcgctattggtcaatgttttgcttttctcagcaatccgtcgttcatatgtccgcccttttccatgcgtttcatttatgccaactttggacaatttactgtgaacagaccgccgccacttgtcgctcggaagagacccttcaaaggacgatgncacaaattttggacttttgggcacgcgtcaccccggncattcttcagctgctgtcccactccaaagtggtcagttttctgcttctaattaccttctgatcatctttttaatccgctcat

SEQ ID NO: 10284 - DNA, 3508 bp, Heterodera glycines
  unsure (1)..(3508): unsure at all n locations
taatttttcatttttctgaaaatttaatgggtttcattaagctacaaaaagttattgcagaaataaattagaaatgagaaaaagcgattttttgacagttcaattcgggctcaccaaaggtgagggcttttaacacaattaattgttgaggggaaatgggcgaaatttcaaaatggaggtcttaaggctttttgaaggtttttcagacgtcgccgatttgtccatgcgccgattgtccaccattggatttatatggttgtctcaattattatttttggatactttgtaaaatttgtaaaatgagcaaatgtttaaaaaacgagagaggtaaaaataaaatgaaaaagacacgcatttaataaaaagccatcatgagaattaataggcgtatctattgattaattaattgagggaaaaaaatattttagatttttattgtaataatttaaattttttatactttaaatgtaattttatctcactttttactgttttattccaacggaccatcactgggcgaaacttcggcttcgagtgttaagccgagcttcgccagaaagaaaacgaccgaagaatttttattattaggtttgtattttatggaaatgcataaatttcctatttcccctggactatgtgaggtttgaaacacacgaaaaacatgtttagcttgtttttaaggtttagcatggatttgctatatccgcattttccaaatttaaaattcttcgcagttacattaaagacaaccttaagcccaaaagtgaaaaatttcgccttttaggtcgtttattttattaattgattatgtgttttccaacatatttagccattttcgaaagttttaacttccattttttaatatgaagaggttttggaaaatttgcctacaatttggtaaatttatttccatttttttgcaattttgcgtccttatttcggaagttttagcaattttatggatatttttcgcgattttattgcaccattcgctttctctgatcgagagaatccaatataacaaatcaaagttgggaatattcttcaattattatttccaataatcctttcactgctctaatgaatatttaaaataattacattaagtcaaatgcccaaagacaatgcaacggtttatttgaatttgatatttttcatcggcgaagaacatgaaaaacaaaggaaaaagtttttggtggaaccaaaaggttcaaatgggttcatctgctgctctgtcacagccgttaattgctttgttttatgcctaaggaacatttttctgctggtgaaaagcgacggacgcggtctcacccaaacgcaaagggttaatagcgcaattagtggggagaggggggggggggggtataaaagaggctaatgacactcactcgcgaacccaaactaaattaggcgttaattagcttttggttatgattatatacattcctatatatatgataacaacttgctaataaaaaataaaaatatttaattttaaaacatgggataatcagtgatcgcaaatgctcttaactcatttgaaaactcattaatttatagctgcgtaataattattcaaaattaactgccttggtaattttagcctcatgagcattgagttggaagggcgcaacagcgcttaccgtttcgtcgcttatgcggccgtttgcttctccgtggtggaggcgatcaatgagtgcgttacactgcccatggagtacaactacggacaccacgtgcggcgtaccatgcaggaagagattaattattgtaaggtgattcttagattttattcttttgtatgtgcggccaaatgccattggttggtcaaaattcccaacggagggacgaatagacatcatttgtatgattcgttaaatggccaaatgctggcgattcaaaagtggcatggtttggtattgaccaaatggataatagagaatggccaaatgttagccatttcgagttggggatgacaagcgggatgagtctcgttttcacttatctctttaacattgaaaattttgaagagctcggcccgtgacatttggatggaggtcaaccaaatccgcaacattccgtcagcgtttaacggcaatcggaccgcgcgtgcgtctggttatgctagcggaggcggcggaggcggtggcggatacgcttccagcggaggaagcgggggtggaggcggtggcggatacgcttccagcggaggaagcgggggtggagctggtggatatgcatcagcgacgagtggcaccagcggaggcggcggcggaggctgtcaaccgtgctgtaaccctggcccgccaggcccacctggcacgtctggacgaccgggacgccccggaaagcctggctcaaacggcatgccaggaggcccaggcaagccgccgtcccagccttgcgagtccgtcacgccggttcgttatgcgcgctttgattgcgtagcaaatgttattatgctttttcccatttagcctccttgtaagccttgcccaggtggacctcctgggccgccaggaccacccggacctcccggcgacggtggaggacccggacagcccggccagcctggcagtgactcgggtgcaggttctcctggcccaaagggcccgcctggcccacctggtcagcctggacagcccggctctcctggagagcccggccaacctgcgcagtcacagcccatcattcctggcccgccaggaccaccgggtaaccaaactatattttttgaatcatttattctaaatgctcttttaggtgattctggaccccctggacctcctggtcctcccggaaaccctggcactgatggaggcgctggtcagcctggccccaagggaccgcccggaccaccgggaccgcctggcaacgacggccaaccgggctcgcccggccagccgggacaaccgggcggacagggcgagaagggcatttgccccaaatactgtgccaacgatggcggcgtgttctttgaagacggcacacgacgagcataaaaagacgaaattcataaatgttaaatgaaaaaatgaagagaaaaatatgaaattggaaataaatgaattgaaaggacaacaattatttaaataaatgttaatattaatagtgttgtgtctcattcattgtcagaagaatattggggaagaatgccctgaaaagtaagctaattttttctttttaagctttttcatgtaaactgctgacagctttttggcagtaaactttttttagctgagacaagacaaagaagcttgatatcgttcaaaataattcatcccattcagttgccaataaaacagaaaaatttatggctattttctaaaagaaactcttagtgatcgaataatatcgaaaattaaaaattttggttgtttttgggtaatgttatggatacaaaattaactaatgtttattccctattaatatatacaaccttactanaattgcaaaaccatattatagngccagggttttcgatatctgaggatttttcctcattttg

SEQ ID NO: 10285 - DNA, 920 bp, Heterodera glycines
  unsure (1)..(920): unsure at all n locations
tgattttgctcgcaattttatgatgttttaaaaaatgaggatttttcattccaaatgaggatttttttgagatattttagtggcagatgaggattttttatggctgaaatgaggattttcaaaattttgagatcgaaaccctgttataggcactatcatgcatggataaaattgtgaggtggcacaataggtaccacaaaatttccttgcaattttcaaggaaatttaatagaaaaaaccaatttaactttttgtcgctgtctaatgagttcaaaatgtcccttatgaaaatataaagatattaatgaacaaacattttctataatttggctagaaacgcgtcgtcacaataaaaaatatatattcaataaccagggaacggatttatatgtttttttgcgcatatgccatcgcatgaaaagctcaaaaatagcatttttacctgttttcctttcaattagagcgagtttttagcatgtataaaaacatattttgagcttttggcgaataaaaacatatttttatggtttgacagtttttagcacatattttggcgattttttaaaatattttgaatttttttttaagaaaattccttttttggcacccaaattcttggtaaaattaaagttttcaaaattttttattttttttattttttgacctttttcatgatttttttatttttatggcaaaatttaacttttaaagaaaaaaatccgaaaataagcattttgctagtgaaatggatgaaaatgagacttttatgcaaaattcatgtatttattaagcagtttttttcagtttttggcaaatattttggcttttttgggggtttttagcacatattttgngggttttttttggcacatatatatgtacatatttggcgttttttagcacatataaatcgttccctg

SEQ ID NO: 10286 - DNA, 1505 bp, Heterodera glycines
attgaaactccgtgagtttttaaagaaaccggaatatcccccccccgcccttttaaaatattaatagaaaaattcgtattttaatgagaatttcttgttgagatatgttaattaattattattaagaacacaactattgtgttttttttatttgaaggtaaaaaacacattttgaggtaagtatttttttatgtgactattttagataaaagccaaaaaaagcccaaaaaaaaaaaaaaatttagcaacaaataaaatcatttaaatgtttgtaatatgagagaatgcaaattgagtcccctcctaatttggggctcaccagactgaaatgggccaatcccgcttgtacttcccggttcaggtcagatcagcaccaaattgttcagtcggctcactctttggctgctccgttatggtcgttgggctttggtcggctttatggaggtccaaaatccgattgagaaatttgctaaatgggaaaaaaataaattaaggacaattgaacagagaaattttaataattttctaaaaaatatttgaattgtatgttaatttaaattagaaaaaagaatttatttttataattttgataattcatttttttaattattttaagcgtttcaccctgcgtaaaacaattccatacagcgaatgtacgcgtcctgaacattgctaacatctacaaaatagaaaaaaaataataattttaatgaaaattaaaatcattttttaatttcatgcaaaataaacgaattttgaagaaaaattcgcttgaaagcaatatttaaataaatataaagttgacaactcattaaatttaaattgatttcaaccggcaagagaatgtgtcgcaacagcttggatgggataatcgcgttgatttgtacatattttttgcagccctacaactcagtattgagttacatcattttttaaattcaaaaacttgtccaaaaaaaaaaatttaaagacggttattaagaaaaattttcatttcttaggaggtttattttcagaaattttttggtcgattcttaggggtgtatttttaaaattcccaaaaaatcgcttcttagaggtgttttttcgtttttattgcatttttgttaataatttggcaaaacgccaaaataggcaaaaataggctctttcaaaaatttttaggctttttaggcgctaaaaataaaagcctagaaaataggcactaataactcgaaaagtaccttaacaacaaccaaaaaaacttgattttcgtgcgtttcaaaaatagtttttttgtcgaaaattgaattttcaaatatgtcgaccgacgaaaagtgtaaatttggttcgtaccgccgttttcgtacggggaacattttcgtacgagttcttgtacaagcgtcagattcaaatagaaaaacttaagaactaataaagccaaaatttatcattttttgtttcccattcataaaattttgtagaaaattcataactttataataataacaaaatccgggacaaac

SEQ ID NO: 10287 - DNA, 1246 bp, Heterodera glycines
tacaaaaagtggtccaaatatgtacataaatatgtaagaaaattcccaaaatatgtacaaaaaaccccaaatatgtaaataaaattttttttaatggtattttttgggaaagaaaatccccgtaaagtatgaaatagccacaaaatgacacaaaaattactttttttggtatttttaggcaacattttcaaacttattttttctttataaatcttcaaaatatgtaaaaaaatgaaaatatgtacaaaaatatttaccgaaattttggatttttttttgaggatttccaaaattttccgtaaaaaatactcaaaatatgtaaaaaaaaaatggaaatatatatgaaaaaaatccaaaatatgtacaaatatgtaagaaaatcccgaaatatataaaaatatgtaaataaaagtcccaacttttgttcgcaaacacaaaaaagaaagtgtttttcctgctatttagagcaaggagaagccaggaaaaaaatatgtatttacataaaattggcagccctaataatgacattagaatcgaaaaattttaatgcagaaatgcgttttttgagctcctttcttcaaaacaattgagcaaaaaaaaaagttttttttcactaaaagttgcttccctattgattagataagaggaatgcatagttgacgaaaaaatttttgggtgaaaagagaggagcatttgttattacttttttatgatttttaggagcctaattctttctttgtaatttaaagaaaatgaaatttaatctttataaattaactagcaaaagaaaataacaaataaacttaattttttggtattaaattataaaatatatccatatttatttgtaaagaaatttatgaataaatttttaaaaaattaaagatataattttatccatcaatcaaatcccaggaattatttgcatacagatttttagaattaacgaaaaacaatatgaataattttgatttttttgaatttcctacagtatcatttcctttggtatttttaaagtaaatcaaaaacgtgcggctgcttttgcttcttgtctttattattgccgccccacaatgagctaaacgttttcgccaattttcatttttcgtgtaatttttctcaaagaacattacaaattcgcctgtctcaagttgaccatgttttttgtcttattttgacgtactatttctttatctgagaaaacccgaatttacgtgatgtctaatttttttctatttgttaaatt

SEQ ID NO: 10288 - DNA, 1197 bp, Heterodera glycines
tttaacagaatttgtccacaaaaatggccaaattttgcaattttaagcaaaaattttaagaaaataaaggatttagcggtgccgataggcgccttcgggggaaaaattgaggattttgaccatatttttagcagattttcattaaaaaaattcttaattttgtggttttttgtaaaaaaattattctattttcgttttgatgctctattacaaacccaaattttaaataattgtaaaacattgtgccaattaataaaatttaaaaatctgacaaattttcaccagtgtggcgaagtgacaaaaataccagtgtgggcgaagtgacaaaaatatcagtgagagactttcagaggggtggggtcatttcagtacggaagagttgttctaatgatcaattaattatttaaacttttaatctattaattagatgtgttagcataattataattatatttggctctatttcagtttacaggaccacaaaaaaagacacgacatgttatattttggtaaatttcatgcaacataactttttatagaagcacccaaattaaacattcttggtaagttttgattagagatcggaccggtcggttttttttcggtatttttcgattttcggtttcggtttttaaccgaaaaaaaccgaccgagaaattttgagtttttcggtttttttcggtttcggtttttttcggttttttaaccgaaaccgttcgaccgaaataattaaaaaaccgaaacaatcgaccgacttttttgacaaatcagttggccatttttttaacaaaattcattaaaaattcttaaaaattttcctctggcggcgcctatcggcaccggccgaccccccaaaaagctatcttttcttaaagaattagccaaaatctcaaattttggtatttttagacaaaatctgctaacaaatagcattaaaattacaaaaaatttcccggcggctcttatcagcacaaccggccctaaagttatggattgagctcacaattaaggcaccaaaaaggcgcaaaatggcactgaaaaaaggcacaaaaatcccgaaaaaggcatgaaaaaagcatttaaattttttattaatgatttttagggagcaaaatacgtaagtagtataagaccccgttttggtggccatctgagcgccgggacatttcagtcccagcgctctggccggccatttga

SEQ ID NO: 10289 - DNA, 1829 bp, Heterodera glycines
  unsure (1)..(1829): unsure at all n locations
aatcctacaatccctttcaaaatttaaactttcacacattattctcacacaggcacagattagaacccgcaagaggcagcgtagcctaaggcactaaccattaggccgcatgtgaacagaaatggcttgtttaattttgattatttattgtaaaaagaaaaaattacaatttcttntaattagcaaaattacacgaatatattatcacattcattttttcttttttcgggccaatcgttcagactaaacacttttctttttaactttttattttaaagcaatacccgtcgcactgttttccaagtattcggcttcacacattccggctgatcaaccggttggtcatgaagagaccgaatttttcaacgcaaaaatgataattaagcacgaaataataagcatgagaatgacaaaataagcacaaaaaattgaaaaaaagcacaaaatttggtgattttttggctaacaatttttattagttaacagtaaattctcatttttcttttagcactgacaattcattcgtaacaaaagtttaaaattaaaaatattgtaaaaaaagattttgatgatgaattttgagaaaattttccatttcttagggtcgtatttttcgttttattgcttgtagtcggtgttttagtcaaaattttacaaaaaatgtcaattaaacgcaaaaacaagcactaaaatgctaaataaaattcggtctctagttatcagcaaactcaaacaggaccgttttaaagttgatcaaaacggtccttaatgacaaattatcagaacactcttttcagtctgatcagcgttgcagcgcgatttaatgggaacatggacctgcggcgccgacaggcgccacagggaaaaattgggaattttcttaaaactttgggtttttgttggcttttttcacaaaaatggccatttttgagggtgttcacaaaaatcaacaaaatgaatttctttattcaaatcctacaattttgaaataaataatctcatgtttttttgcagagaaatatttttgccaccgttgcgacaaagtatttgttcatacttcctcgtaccgagtaatttttaattatttagcattaatccttatatgtaatttaaccaaaatttaagcgccattactactcggtccatttttcgggattgccgtacaagtgcagtttttgcagcagccaataaaatattttatataataatattaccatcagcaacaaatatgaaaattaatatttgcaattattttgctaaacttcttctttaagaaacaagaaattgaaagaatgttgaagtaataaaccggtagaaagaataaaaaaactgttaaagtaatggcaatacacttatgaattgtgatcccatgtattgcttttttttgctgctgtgttgatttattttcaatgattttgggcacagtgaaaaacagttccgtgtgcgcctaatattcaacggttatttaaattttgaattttaaaccatctgacgaacgacgagcgttcacaagctgatggataaagtgcatcaaattgcaagacaaaaacattgaattacaactacaaaacaacaatgcattacgggaacacatcgagatacagcagaatactgaatcatttgtgaaagaaaagagagatttggaggaagaaatattaaggatgcacggatcagaaaacagggaccaaggaagtatttgcgctttgtgctatgtcaaacaggtcacaataataataaatattaaaaacaaaagaataattttggctactttagcgcaattatgtttatatttccttgtggtcactttgcgctttgtacccgatgcgctg

SEQ ID NO: 10290 - DNA, 731 bp, Heterodera glycines
actaagtctgagacaatttttattaattttcggaatctttcgttcgaattcgggtccggggttagtgtcgaagtttggtgcgacattttgtcctgctcccagcggcggacggaacagctcaccgaacgcgctgcggacaagcgacggcgtgaagcagtcctcctcgtccttgtcctggtcgctgtttgggtggtgcccggcgtgacgatgtccacagtcatttcggccaaattgtagacggattggtatacagaagacagaagcagggatacggagctaaaatgtaatgcagaattgatatatggtaaatacaaattattgtgccaaaaagtcgggaatagttcgacaacaaattttcggcatttttacatgaggtgaaatttcgaatttcgcatttttcatctcaaaggcatttttccagtgagtccctctattagaacgggccaccaccagataaattggcctttttgatcacaaaaaaccgaaaaaatttccgaaaaattattgtttagtaaaattctctcgagaatattgaagaaattttaattttctcgagattattaactaaattttaaattttcaagaaatccaaatccgatgtgacgacaaaaaatgaaaaaaattggaaatgatgatggtcatcggctgacgcaaggcggaaaaaaaaaattacgaaagtgaattgtaagtgtgggaattggccgaaaatttcgttccttttatactgccaa

SEQ ID NO: 10291 - DNA, 2056 bp, Heterodera glycines
  unsure (1)..(2056): unsure at all n locations
ttttttatgcacaaaaaatcgcgaaataggcacctaaaaaggcataaaaaaatcgcaaaataggcaaataaaattttttattaacgttttagggtaacaaaacacgtaaaaacttaaatatttcaattgtaaatgaaattattaaatattttcaagtttttttcgaatatgaacaaatttttaaaccaaaaaattttnaataagaaaaaatatttaattttgggatcaatttttttgaaaatttttttcaattcttaagggtgtattttctgaaattttttttgggtcatttcttaggggtgttttcgtctttattgcatttttgttaaagattttttcgaaaatccttaaataggcactttggcacaaaaaccccgaaataggcaaaaataggcattataaaagtcatcgtagacaccccaaaccaagcggaaaacgcgtttttcgtgcttatctgtgcgtatcaagtgcgcaaaaattttaggcatttgcctaaaaaagaagccctacttattaacatataaataaaattttgtacgtttcagaggcactttcttaaaaaatatttataaattaattttgcaaaaactaaataacgaaaactcagaattttgaaaattttttaaaaaccactaagcgttgaaatttgtcaggttaagttagtactgtaccggggagtatgcctgcaaaatctggtgaaattttattaatcatagaaagagttattcaaaattaattaattaatttttaaaaatttgatcatcctccacaactgatttgtaattgatcagaagctcaccaaattttgcagggataaatgaccaaatttgtgattttgagccaatttgtttacgtaattttttaaatccaattttaatttaaataaaaaaaaagaagcaaagatggcaaatattttaatgagagagagagagagagagagaattaatttaatttagcatttaatgagacaaaacaacaaaagaaaatccatggaaattaaattcaaaaatgcattaaatgtgtatagaatgtacgggacgaagtgctgtgatgaaaatgagagagagatataaggcgacaaaaggtcaaaatgagaagcaacaaaacatttaaatagtgtcaatgaaaaagaaaaatggccaaaaacaaaatgtgccgttcgctatgatgatgatgagatgtcctagtaatcgtaggccttgccaacgctcttcttcaggatcaccttgcccacgtgttgcaacagcagcgacaccaactcgtcactgcgctcgctccacaacagtgccacctgttggaatatggaaaaaatttaataaataattttaaaaaatcgccggaaaattttttccaattttttttttgtgtttaaattggaagctccactaaaattctgggagcaaaaattcctcatcctcctatttttcctagtgaaattgaaatccaaaattaataataaatgctcgccggacgcaagccaccccaaccgaaaaacgcacatcctgcttggacactttgatggccttgatgttcggacaattgacggtgatgaatgcgagcaggtcggcagcggacggaaacgccttacgataatcgccattcgtactcagtcgggccaacgttttgtcaaactcaatgtgctacaaaaacgggcaaaagtgttcattaatgggcgcaaaaaaaccgaaagtgaaaattcgttaaaatttttaaaaattaaaaaaataaggcatcccccactcaatttgcatttcgatttatttgtctccaatgtaagcctactggcaacacttaaaagctcgtgccaaatttcaaggcatttgttcgtttaaaaaaaaatgagttttgggactggatattattaatattgtagcccggtgctgaactgtgcggtttacggaaaaatcgcattccctaaatgactaagggattatgctttgatttcattagttgggtagaacccacattgacattctgcaacatgcccatgacgacactgaactgtccaacgtatttgttgcgctcatcctcggaaaactgtggggagggggggggg

SEQ ID NO: 10292 - DNA, 727 bp, Heterodera glycines
tcggaaaaattcaccaaaaaatggccaatttttggtgaattttgagccaatttttaaagaaaaattgcgggttttggggtccggcggtgccgataggcgccgccggggaaaatttttggggtttttaatgaatttgttaagaaaatttccaaaatttgcgacccccaactcgccgcgaaccccctcccccacctaaaaattgtatggtcacaaccgatcatcataacaacaacacacctttttgctcttggccgccaatttgctgctggtggtgctgcccgcgctaaacaaaacattgtcaactgtgaatgtcgtttggccatttttctgttttgtgtcccatatattccggcttttatgggtgttttttaacatggaaaattcaattgtttttttaaaattttaatacagcaacattattatttttttgtctataagtgcgaccccattggacaccaccgtatgctaacattctacaacattatttgtacagcaggaagtacggacaattgctggtagaactgctccgtctcctcgtcctgcaactcctccggcgaggttgtgtcatggtggtgggcgccgtcgtccaactccccgtcgttgtcctcctcgccctcctttttctgggtcatcatcatcatcggtccctcctcctcctcctcttcgtcatattcctcctcctcttgatctaatgccattttgtcattgatgcccttccccttttgcc

SEQ ID NO: 10293 - DNA, 1211 bp, Heterodera glycines
cgcgaatattcaaaagtttccttattaatttaattttctcctcagaaatatatttattgttaaacaagttttcgatgactggagaaaatcccataaataaaattaacaaaaacgtatactgtatataaatagaaactagcgggtgcgtgaaccgtcggctatttcgctggcaaaaagcgcttcgcgctttgggagcttcgctacctaggcctgatcatgacttatagggtgagaaggttcaaagaggtacaacagtgattaaaaaggtacaaatgtgattagaagaggtacaacaaatgttagaagaggtacaacaaatgttagaagaggtacaacagtgattaaaagagctacaacaaatgttagaagaggtacaacggtgattaaaaaggtacaaatgtgattagaagaagtacaaaagtgattagaagaggtacatcagtgattagaagaggtacaactgtgattagaagaggtacatcagtgattagaagaggtacatcagtgattagaagaggtacaactgtgattaagaggtacatcagtgattagaagaggtacaacagtgattaaaaaggtacaaaagtgattaaaagaggtacaacggtgattaaaagaggtacaaaagtgattagaagaggtacaacaaatgttagaagaggtacaacagtgattaaaagagctacaacaaatgttagaagaggtacaacggtgattaaaaaggtacaaatgtgattagaagaagtacaaaagtgattagaagaggtacatcagtgattagaagaggtacaactgtgattagaagaggtacatcagtgattagaagaggtacatcggtgattagaagaggtacaactgtgattagaagaggtacatcagtgattagaagaggtacaactgtgattagaagaggtacaactgtgattagaagaggtacaactgtgattagaagaggtacatcagtgattagaagaggtacaactgtgattagaagaggtacatcagtgattagaagaggtacaactgtgattagaagaggtacatcagtgattaggagaggtacaactgtgattagaagaggtacaactgtgattagaagaggtacatcagtgattagaagaggtacaactgagagtagaagaggtacatcagtgattagaagaggtacatctagagtagaagaggtacaactgtgattagaagaggtacaa

SEQ ID NO: 10294 - DNA, 3034 bp, Heterodera glycines
ttttaatgctcatttaattcttctccaaatcgtttcttccattttgaaaaggtcgattgattaattttcagtatttttgcaattttctcgtcactcatttttggattttctccttttatttgccaatattttttcatttttttcattttttctttctccgatattctttttccactcaatccaaattgtttcttccattgtccaattactctatgacttactccaattttcttcccaatttcggcataatttttcttccattcttttgtcgaatattttcttcctttttctttatattcatttttcattgcaataaatttttgcacaatttcaattttttgttcatccgtttttgatttataacatttgtttttttggagaccaaattctttgatccattggtaaattttgtctcgatttgttcccaatttttttccgattttttcttcaagtttattccattcattttttgaatattttcttcccttttgtaagattttctcttttattttattgaatttcgtaacagtttcccgctttttctgatcattttcattttgatcatttcgtttttcttctttttcttcccatttttctccaaatattttgtcaaatgttttttgttccgcttttttcttttccgctccaatttcaattttaacaattaaaaatacaattgaaaagattaatagacataatttcattgctgaattgatataaataattatataaatatttctaaaaaattatttttaatatttttttcatataatttctacattttaatgtaaaatattgacatatttaatatattcattaaattataaaaattgataatttctctctctacttattggtcgcaataataaaataataatatgataaaacattttcgcgattaattaaaattccaatcctactgatcataaaaactcagatatttttatttaattttttttaaagttttcccttaagcacattgccaaaagtatctggaaagccgtgtttaaaacggatacccgtgaactttggcatttatccaaatcatttgatggcgccgggaagatcaattttaagcctccaaaaaaaataatgatttggatttctgtggtaattttaatcattttcattgttgttcctattcatttggccagtgctaccaatgaaatagctgagcagcatataaaaatacacctggttcattagaccactccttgatgttggtctgaaaacccgaaaatggaaaaatcgtgaaacgcggcacatttacttaaatccgccggcttaattgcacccttttttaagaaacggttcagctccctgtcgaccagtgtgtcatggagtatttgtttttatattctaaatatgtataaaaatcaaatcatttatttttcatatagaaaaaagtaacaatggaacgtaagttatcacttttttgatcctcatttaattcttctcttaattgcttggattttctcctttaatttgcaatgaatttgtttcattattctctgactcatgccaaattgtttcttccatttttgaattgttccataacctattccaattccattttgatcatttcttttttcttcccatttttccccaaatatttggtcaaatcttttttgctgaaatttttcttttctgattaaacttttttatttagcaattaaaaatacaattgaaaagaataataggcacaatttcattgttgacatttatttgcaaaaatttcggttttacagaaaataaaggaataataattaatatttcttaaaaatgaattttatattttcgcttataaattctttattttaattaaattattgacatgtttattactgttaaggatcgaacaatttgaatgtttttaatattgacacgattccctgtgtcataattggaaatgtttatttaaatggacccgttcagtcattcgggtcacttgccgttctctccttcatttccatttattgattgtctttcctccgtcatttatttatttgttatttatcattttatttttctgtttgtctttgcttttaataaattgtgtaagcaagagacataacaattacattcagaaaacatacgtattatacaattttgctctataaacgctttcactttttctatacaaatttctcctggtgcactatagtcaaattacaaaaaatttatttatttttttacacagtaatgaatacaattagaaaaatatgttatggtcaatactgaaaaaatacataaaataaaataaaaaagggatgaactaccactctggacttattttatgaaaaaaattctttcacaagatttttaaatttagctaaacttccgatttccatagctgttttgggtaagcaattccacgcattgattgtacgaataaaaaagttattctgagatttattactgcatcttttgttttgaagcctaaatgtttttcgttgcgattttgatgaaaattcgaatttaggctttaatttaattaaattttaacatagttataatttaaaaattgataaaaaaaatttgaaaaccagatttttgaattttgcactttttaggaatcgacaaaccaggcaaaatgacaccaaaaacttattgattgactaattagacggaaagacacagtttgacaaatctaaactactaaaaacggtcattacctttgggacactctagtatttatatatatgtaccttaaagcccggaattttgaacaaaaaaatttggaaccgaatccaatgctgcaattttcgcgtcactcattttttggttttctcctttcatttgccaatatttttcaattttttctttctccgttaatttttcatatataccaaaaattgcttcttccatttttcaattactctacgattaactccaattttcttcccaatttcttcataaatttggtgccattcttttgttgaatattttctctctttttgcttgattttctctttaatttggttgaatttttcaacaatttctctctttttctgatcattttcattttgtcatt

SEQ ID NO: 10295 - DNA, 1287 bp, Heterodera glycines
agaggggcgaatttgtagaatggaattaagctggggggaacattacaatcaacatttttctggaaagaatttggcaaaatttggcaatttgatcaaatgagggattttttgagacaatataagagattttttggcggattatttctgctttctcgccggcttgatgcatcacttgggtcgaaagagttgaccacctaaatgcgtaatcctaaaaaagcctaatgtttcacataattttttcactgcatcgaaattctgccaataaaacgatacggcttgaagccaggtcccccatctcgttaaaacggcctttgaaggcattgcgaaatcctgaaacattcggtggtaaatgttcgtacgttgaggtgctttgacaaaaacggccttcgtcttcgcgattaatttgtcggcctttttgaattcatctcgcactttctctgcaacacggcataacgcatgatttttacgggattcccattcgggactcccgtcccggaaaattttgaactcccgctcccggaattctgtgtggcaggatttggcatacattcgatcaaattttgggcgcttgagtcaggcaatcacaaagttggaaactcaaggccttaccattcaagagtcgttataaatttttacatatttttcacttattatgtgcatattttgccatttttggtgcatattttatgcggatattttacgactttatgggcattataacagattttcaataaaaaattattaattttacaaaaaaaactcaattcttaccagtgcatttttactcccgttttttgggtaaaatttccgggagcgggagcgggagttcaaaattttccgggacgggagtcccgaacggaatccctaaaaatcccgccgggcaaaaaagtgcgggagtcgggagcgggactcccgtaaactcccgcgggagtcccgattcgccggtctctactgtggattgtgtacgaataaatggtgaatcagtggtggtgagttggtcggcaggtggcccatttgagcgctgccaaatgggtgtcaatgccaatttgtaagccaacgccatcacaaatatgggaattgaatgattagcagaaagtgacgatggccccgtagaaatgagtgagtggggttgaaaaggccatgcggcacctgagcgccgccaatgactgccaatttataatgtcacaggtcgaaatttgggggattgaatagttgcaaagctgcgctaaatgagtgccactctagaagaactaaaggccaacatagacagaaaggattgagggactg

SEQ ID NO: 10296 - DNA, 1006 bp, Heterodera glycines
ctgcacacgaaatttcggctgtcattgcccctattttagtatttgcaaacgtttgactcgatgtatttattttttaaaattaaataataatttataatttcattttataaataaaattacttattttttgcttctcttccgccatcactgaacataaagcaccgaaaaagggattttctttgctaaaaaatttagatttaaaaatgaaaattttaagcaaaatcccaatttgtctttacataattggcatcagttcggtgccgtaatgcgctgcaccggcgtcatttgaacacaataaacgcaaatggttaaaaagctgatcaaagtttgtgcaaaatttgctgctactgatcatcgtggataaaaatgcttaaattatattataatttgttactttcaatttaatttaaattaaattaatttaagttaataattttaaaacaagcgaaaagttcacaaggaatgaatgaattatcatttgcttcacattgaatatttttaaatgcatctgtgagataatttcaaatttttgtgtttatcagctatcagatgaaaactgaagaaagcaacaaaataaatttttttataaattaaaaaaataaccgaaacattcattggacaaattggccaaataaatgactgataaacgaacagcgaaatttcaaataaccttttttaaatgaatttttcttcaataaatttcaaaaaatttaatggaaaactttcggatgattttataaagaaaataaataaaaaccaaattttctttaaaaaaaaaattcaacaagtgcaggaggcgcagcgtgccaccctcgcgttgcacggcagccaaataatgcgtggcgctagcggccggcagcgctcggtgatcggatatttgaaattgtgggacaaataagaaactgataaccagggaacggattttaggtgctaaaaaccgcgaaataggtacctaaatagttgctaaaaaactgccaaaaaatggaaaaacatgtcaagaaatgcg

SEQ ID NO: 10297 - DNA, 3214 bp, Heterodera glycines
  unsure (1)..(3214): unsure at all n locations
attatatatatatatatatatatatatatatatatatatatatatattatatatataagatgattctctcacaattaatcaaattgaatttataattattccagaaaaatatcgtcgccacctcatttaagagtacttttgatgtaaataatattaatcctgctgcttttcagtttcgaatccaccaacaatgtgcttggatttgaattatttgaaaaaatagaataatgcataaggaaagcacactttcataagcccaaattgttaataattcaaaaataataataaatctcgttgaatttcgagaaatccatatggtccattattaatatttttatattatttttaatattctgaaaatttccgcctacaaatttcacgccgcgtttctaattcagtgcttttttctgttaaagcaaatagcaaaaaatttccatctgatcaaacaaaccaagcagaggattttacctgctgaacgtaatcaatcattcgctaatggaaaatttaaaaaattccacagagtgtataaacctaacagtttcaaaaactttcaatttctgggagaatctgtatcttttcatatatgttatgttggccttctgttcgggcattctttttttttcttttttgaaaattttataaataattagggctggcaaaaatatgtacaaaaattggtcataaatatgtaaaaaatatgtacctaatatgtaaataaaatgttttttaatggttattttcctggaaaaaattcttcttaaagggtgaaataggcacaaaatgacataaaaatacactaaataggcttataatcacatttttgtatatttaaaaattaatttttggtatcttttttttttgaaaaaaaccaatttttaataaaataatattccatggcttaacatttcgatttatgcttggattggatgaagcaatgcttccaatgcttctttctccccattttccattccccaccgattccttccccccttcccccatcatttgacattttgcacattcattgttggaatattttgtcagaaggaagggctagcagcaagcagttgaatgaatgaataatgttgcttgcctttatgaattcaaaaaatatttatattaaatttagtttttacttgaaatttattttttatttcctcttgaatttgcccttattttgtcactcaaataaaattttcaacggggatttgttttatttgttaagaaatttaacccaaaaatattcactttattttttctattggaagtaatgacaaaaataagacaaaattgaataaaacttcacaatttgagagaaaaaatgagcaaagaaaaaagaaatgacacttaaaaaacaaaacccaagaaagcagcgctctcaactctcaagttgaaaattccatgcgttcaaatatttaattaattatcgaaaatttaataaaattcagggaatgcccaacattattttgtcccatttcccatgggaaaaattcaaatatatttttgttgctttattgtccataatatttctttttattatttacaaaaactacgatttttcatatgacaattcggcattattcaggtgacttaattgaaattattaaaaatatttttttttaaaattataaatacacattaattaataaattaggtatatttatttagctttagctatccggagcagaacattgacgcattatcatcagaatcagaagaatgctttggagaaaaggtatttaataattaaataaaatatttttcaataaataatttaaattttattagatggtttataatttgaaaatgaacgactcgcgaataattcgtggcaaaaagtttaattgctcattaacatggcttttggagcgctacaaactttcagacaaatacgcaattaaagagaaaattgaagtctgttttttaatttatttttattatatttttattaattttaatcatttttatgtcaaataccatggccatcccaaatttgtgtttgtgacagccgccaatgacttttattatccttctcttcggacagtaattgcaaatgtaaaagaaacatttggatgcaaacaaaaaataatagcttatgatttgggaacgattactaaaaacaaagaatgggtaaaaatgtttattttattaaaattaaatcgtaaattatttattttaaaattaaatattggtgcttttcagttttgctcttacatctcaaaatttaagaaagcaaacaaaagggcgcgcggaaagccatttttaagcgcacaccgttattttgaggcattgaggaaagaaattttcacgatataaaaagccaattttcatctttgtaattcattttgggtttttggaattaagatttgaaaagattgcatttttagtccaaaaataaggtaaatatgaaaatgagaaggaaaatgtgtaattaattacacagctgattattttgcataaaatgggaaaaattttgcttttcccgcgcccttttgttgttttttttcattttgagatgtaggaacaaaacagaaattacctataatttaaccaccttccatctttatgcagatgaatgaattggattcggtgtgcaatttcgaatggcgaattttcgatttcggtcaaatggtggaaggacgggttcgccaccccaaaagttacgcgtggaaaatttttgtgtgggcggtaaattttttaaatttaaactnagagtagagcgggaccgggaattttgggcttaaccgggaccgggaccttttcgggttgaaaaaccgggaatttttggctgggaaaaccgggaaaaaacccgggactggtcccggtcccggtcaaaaccgggaccatggtactcagttggactcagttgtccgtgttttggtcccggtcccgctctactctaatttaaactattaattaaatgtgtaattcaaatgattaagcatgttttattggagtatgacactgtcgtttggattgacacttcagtggttttccataaaaatgatttcaaacgattttttgaaccgatgcaaaacggcaaaattggcactgtgcaaatcccaagctgtgagtgataagaatggagcacagcattaattaaaccgtagtggggacatttgcggaccaacatttattgattgcctactttaaagaaaattgaaagaaattaacaaaataagtacagcgcgaccgataattttcagtttaaccggta

SEQ ID NO: 10298 - DNA, 1413 bp, Heterodera glycines
  unsure (1)..(1413): unsure at all n locations
ttgagggaatttttaaatttatactctatcccagaaaaatggctatctctttttatgagaaattttatacctcacaaaagcgcttgcgtatgagacggagggctgtgcacaatcgccattttatttcacagaggatttttatatttagaggttatcccagaaaaatggctatctctttttttgataaattttatacacatacaaatgctctcgagcatgatagggagggcggtgcgcaatagaccttttatttttgagggaatttttaaatttatactctatcccagaaaaatggctatctctttttttgagaaattttatacctcacaaaagcgcttgcgtatgagacggagggctgtgcacaatcgccattttatttcacagaggatttttatatttagaggttatcccagaaactctactctaatttaaactattaattaaatgtgtaattcaaatgattaagcatgttttattggagtatgacactgtcgtttggattgacacttcagtggttttccataaaaatgatttcaaacgattttttgaaccgatgcaaaacggcaaaattggcactgtgcaaatcccaagctgtgagtgaaaagaatggagcacagcattaattaaaccgtagtggggacatttgcggaccaacatttattgattgcctactttaaaaaaaattgaaaaaaattaacaaaataagtagagcggtaccgataattttcagtttaaccggtaccggtaaagatatagtgaaaatttaacgccaaatttttaccctattaacacacctaattaattttttctaatagctatattatggggttgggtcaagaaaattatcacattttacaccaaaattacttccataatcttttttcattttaattattcgaaatttttatttaaatgtatctatctttttcatttttttatttaataattcatcctgtaaattcggttcgcaaatgttgattacccaataaacgtttaattgtgaaaataaaaagcaaatttaatcaaaattttattattttatttctttagttgcattgcatgggatgaacgtttcgactcacccgggtaaaaacattttataattcaaatgaagcaaaaaaaattaacttttttaaaatttttaattgatacgacatttggttttgaaaaaaaaaattcttcattaatcttagaaaattctgaaagcgaatatattacagaattacaaaaaactcaaaaaaatatctgcaagacacataanaattccccggcactttaattcgcatttttccaggaatgtacgaatttttgcccatgtacaccaattttgagcctaacagaacatacacattgactgggatatattgacaaagcacaaaaattgaccccgcacagttcgaaacaactttgtga

SEQ ID NO: 10299 - DNA, 3754 bp, Heterodera glycines
aatggacaaaatgttgaccagaatgtttcgctctgtcggcaccggcgcatcatttgaccaatcattgctcaccgccgccaccctccgcgggaggaggcggtaactgcttgaactcgttgctgttgttgcagcgacagcaattgttggccgtgcagttgcagcaggaggacaaattgaccacaatggacaccggcggaactgtggcgctgacaaagtgccgatttgacgacgagtgcaccgtggtcatctgtgccgttttggtcgttatttttacaatggcatattttaaccccttgaatggacattgagtgttcatgtcatttttttggcttgaaagtttacagattttgacccctcaaattcagatttccggcgatcctaatagaggcaccaccgcttgtggaaaattagggtggaatccgtaaaaagcactgccaatttccaaaaattgcgctttcaatttttccaattgttctaaccaagtcaacaaaacacgggcaaatttgtgtgcgtttctctttatttgttagtggaccagccctgtgccattacggcaatattttcccgttccctcccaccgaatgtccgtcaattgatgatgagccgccaccgccgtaggcatcgtcaaaggtgtcgcacgttcgggcggacagtgtctgttaattttaaatgaaggctaatagagaacagttggagctaaagaaatctcgattttttcggtctcgagcctcggttcaagctgcgttctcgagtttttggtttcaaatagcacactaatccccggattatcatgattacatcggcctcgcctcctctgccgccgctgctggcggtggtcagtgtggtggatgcgttgtcctcagatgtttttaaaacttgaccttaacctaaaaatccttaaatttgatcatttttttgacaaaattcgcttctctcccgtccctcgcactctaatgaatgttactgatcacttggcttctcttgaacttattctttccaatcattttggcaataatcactaattatgccattaatcctgctctagctgtataggaaaatgtgggacttggacgagcggggattaatcaaactgcggggacgggagcttctttaaaaatgccgatttttgcggaggctccgtccccattattcgggggcgagtgtggggaccgtcgcaaaatcccgcggggtctctgcccacgtccgggctctaataataattaactaaatttaagcagtttaagcaacaatcagtcgtcactgattgtctctctcaatgtttagtttctcgacattcgtctcccatcctccgctgctgctgcttctgatcagcaaagacagcccattttcgggctatcaccagtgtgtgccagcgagaagcacaatttttgcaattgtaaaggtggtaattctgatcaaaaaatgccgaacaaatcacttacaaatcgctgtttttgggtcccaactcggcactgtcccatggcgcacgtcaaaaaacggccgaatgcgaactgtccgtctcgccacagaatggtatgtttcagcaacagttgaggagatcagagcagaaagcaaattcaagaacagatcagggaaattcccaaattcccaaggacattgttgacaaaatgacaaatttcatgtcaatttcaacagcaatcttgtgctatttaagggcaatcccattaatttggggttcgattgtttttcgctttcaagggctaatttttgtttcaaaattttactaaaaatattcagaaatttctatttttattttttaagtcttaaaattttagcttgcaaaacaaattaaattctattggtaacagaaaaaaagaaattttatagttttgaattaatatcctttgcctgttcctactgatcactcactcactgatcagtgaagaaattgcaaataaatttgttttcccagcttttcatctgtcgcgtgtcgccgatcgtctcgcctttttcattgtgcccaattttggcctgtgtttaatctcactgataataagggttgcacaaattacagatgtgccgctaaaagtagccttagtgcatgttattggaacatccctcctacttcctccgatctagtttggcaacattgagttcatgcttctaggtattgcaatacccacagcatttagaatttgccaagaaaggctatattagtgtaaacggataaaaatatctacaaaggttgtcaccaatccaaattgcaaaacagcgatttccacaggggcttcagctatgctatgcttcgtttgctaggttggcatttctctaatcctgtgtttaatctcactgataataagggttgcacaaattacagatgtgccgctaaaagtagccttagtaacagcataagcatgttattggaacatccctcctaccattatttcatatttctctcatatggcagaaagctacatattctagcgatcagacctttcagttgatcgggtgttttacgaaagaattttgtggtactgtagtggtgctaatatatttctatacttttgtaaattgtctatttcatcataaacaaaattggaaatattttcgaaacaaaaacatggtacagaaaggaaggttgactttctgcacacgtagatgggctgaattttggcatcgaatgcgtctacaatgcatcagtatttctatttgttacaatgacatattagaaaatgtagaaatcaactattttcagaagattgcgaggcttcctccgatctagtttggcaacattgagttcatgcttctaggtattgcaatacccacagcatttagaatttgccaagaaaggctatattagtgtaaacggataaaaatatctacaaaggttgtcaccaatccaaattgcaaaacagcgatttccacaggggcttcagctatgctatgcttcgtttgctaggttggcatttctctaatcctgtgtttaatctcactgataataagggttgcacaaattacagatgtgccgctaaaagtagccttagtaacagcataagcatgttattggaacatccctcctaccattatttcatatttctctcatatggcagaaagctacatattctagcgatcagacttttcagttgatcgggtgttttacgaaagaattttgtggtactgtagtggtgctaatatatttctatacttttgtaaattgtctatttcatcataaacaaaattggaaatattttcgaaacaaaaacatggtacagaaaggaaggttgactttctgcacacgtagatgggctgaattttggcatcgaatgcgtctacaatgcatcagtatttctatttgttacgatgacatactagaaaatgtagaaatcaactattttcagaagattgcgaggcttcctccgatctagtttggcaacattgagttcatgcttctaggtattgcaatacccacagcatttagaatttgccaagaaaggctatattagtgtaaacggataaaaatatctacaaaggttgtcaccaatccaaattgcaaaacagcgatttccacaggggcttcagctatgctatgcttcgtttgctaggttggcatttctctaatcctgtgtttaatctcactgataataagggttgcacaaattacagatgtgccgctaaaagtagccttagtaacagcataagcatgttattggaacatccctcctaccattatttcatatttctctcatatggcagaaaggtacatattctagcgatcagacttttcagttgatcg

SEQ ID NO: 10300 - DNA, 1218 bp, Heterodera glycines
ttctgtcatttcctctacgtttgtctctccttttccattacttgcatgctgcgagtgcttcgtcgcgctcggccaacaattcctgcgcgggaaaagggcactttgggaagaaaaagaattgacataataaatttggcaccaatgaactaacctctccctctacgaaatgaaaatttataaatccttcaagaaaagatgtgtaagttctcttgaaagtttgcacaattttcataaaaatatcattaaattttccaaaaatctccctagcggtgacctatcggcacagtcggggacctgcattttaccatattttgtaaaatttgaccacaaaatgccgaaaattttttatttttggtgcaaaacggctccaaatcctgttccctttacgacttccttcaatcccaccttcttagtgatgtcaatcttctgtttggcaaagtcgtcgaggtcgagaccctgcacaattttccactctttctgtgcatcgatggtgacggggaaggaaaacaccaatccctcggggatgccgtaagagccgtccgatggcacagccatggacacccaacgaccgtcggacggagtgccgaaaaaccaatcgcgcatgtggtcactgtcagaaagacggtttaaaaaatcagagagaaatgcagaagggcatttcctccataatcagtccacatcatttcgcttaccacgcggcttttgatgcggacattgcgctggacaatttgcgcttttcgatgatcacagcgccacgcttttgtacggtcttttggggagaaaatggattgaaaatgatttaaaaatcaaaaaccttgatgaattggtcctgaatccacgcggtgtctttgaccgcatcataggccaaagtttcggaaccacctgtaattttgattaggtatttgattgttgttgcttttttgctgtttagattgattgctaaaacctttggcaattttggcatgtcgaatatccgggaactgagtgctcgagtgattgccccaaatgatcacatttttcaccatcccaacggtggttccatctgcgcacttttgtgccacttgtgccatggcacgggttgtggtcaagacgagtcatggcacttagaattgaaaggaaattacaaacaaaccatgaaaggtttacctaaaattcttagccggaattttgctggccgcgtatttggcgcaattaattgcgtttgtgttggccggattt

SEQ ID NO: 10301 - DNA, 2234 bp, Heterodera glycines
gatgcggacattgcgctggacaatttgctcttttcgatgatcacagcgccacgtttttgtacggtctttcgggaagaaaatgggttgaaaatggtttaaaaattaaaaaccttgatgaattggtcctgaatccacgcggtgtctttgaccgcatcataggccaaagtctcggaaccacctgtaattttgattaggtatttgattgttgttgcttttttgctgtttagattgattgctaaaacctttggcaattttggcatgtcgaatatccgggaactgagtgctcgagtgattgccccaaatgatcacatttttcaccatcccaacggtggttccatctgcgcacttttgtgccacttgtgccatggcacggttgtggtcaagacgagtcatggcacttagaattgaaaggaaattacaaacaaaccatgaaaggtttacctaaaattcttagccggaattttgctggccgcgtatttggcgcaaattaatgcgtttgtgttggccggatttcccaccacgagcacctaaaagtttatttttaggatgaaaaatcatcggtagccaacaaatgcacactttgactgttggcttggaaaatttggccaaagcttcgccctgcgatttgaaaattcggacattggccgcgagaaggtcctttcgctccatcccttctttgcggggcatcgctccgaccagaaaagcgtagtcaatgtctttgaaggccgcctcttccgtggtcactgcctcgacgccttaaaaaaaggaaaaaatgagtcggaagaaatgggaaaagggacacccattcacaaaagcagaaagaaatgaatgaatgattagcccacgtacgtaccgaagaggttgggaagcgcacagtcaaccaattcgtaatggacgccggtgagcacttcagtaagcggagggatgtcgagaaggacgaggacaatgggcgaaaatgggaaaacaattacagccgaagataccaaaagcaacacacctgatctttgccaaaaacatcccctttggcgatttgcagaacctaaaggtcaaaaaaccgttggatagatggatttgtgagacctaattcccaataaaattttgcggttttcatttcatattaattaataattataaaattttattggaaggactcacaaaactatttacaaggataaaacaaaatatgtagatagcagttacaaaatgcaaaactgaccagagaatagccaatttgtccagccgcaccagtgaccaatacgcgaatgggttgtgaggtcattttgtagaaagtaagtgtaccttttcctaaaaatccttaatttatttaacaatataaaactaataatcgtgcaaataatatgtattattaattcttatggttgttttgttcatttcttagggttgggaggaaagggaaatgaaagaaggaaaaagtcagcagaacacaacagcaaaaggacgataagaaagtgtaatgatcaattagataattaggaaagggcagcaaaaaggctaaggagttggcaatgaggggcgggggagggaaaggtcaaatcaacgtcaaaacaggcaatcaatcaatcaaaaataaataaataaatgattaaagattagaaaatcagaaaaaatggaatcagaatcaaagagagcaagaagaggcttaaaggtacaggaatttttttcaaaaatcaaatggcgccatatgatatgctagatcaaatgttataaatagggcccggatttttatgtgctaaaaatcctgaaatatgtaataaaatatgtgctaaaaaatgctgaaatatgtgctaaaaacccccaaaaatgccaaaatatgtgctaaaatatgtgttaaaaattgaaaaaataagtgtgtttttgcataaaaattcccaaaaatctcattctttatcatttttagcccatacaacgcaaatcaaatacatttcgaagtgtttggggtaaaattgtctttttttgataaatcatttctataaattgaaagttccagcagagaacttcgaaatccaatgacgaattaatgaattcgagatttcattagtttctacaatcgaagaaaaaattttttaatttgaaaattatgttaataattaggaaaaaagtcgatttttagggggtgtatttttcaattttcttatatttttattgcaatttttctcaaaaatgccaaaatattacagaatatgtgccaaactccaaaatatgtgctaacatat

SEQ ID NO: 10302 - DNA, 1081 bp, Heterodera glycines
tgaaaacaaaaagatggggtagaataattaaattcatagcttgtctcaaagtcaacctaattaatatttcgtggtatcattcaatagctataattgttgtctctcagaatataattttcataacttcataacttaagtatataagaagagataaagcattgaacaggctatgtttgatgcaatggtaatgcatatataataataaacatttaaaattttaaagtctttaaaatgaaatttaaccaaaattaattcatatttcgattgccctaagaattatctatttatatttaaaattttagaacatttcattgagtgtcagaaaagtaatgaacaaaaaatgcagacataagaactattgccattttgtgtccataactggcctcatactcaaagctgtatatagtagaggcacaagcatcatcaagtggtcattctttatagaaacgaacataaaatgaattttgaattttcaactttttgttagaattcgggtccgggattcgaaatggtcaaaatgaatgttggattcaggttcaccgaccctgaaaacccaccataatcatgttttcacgactttttagaacaaaaagaaattttttccaaaaagggggcccaccatctaaagtattaccatttattcaaatttaggcgaagacaaaattaaataaagaagataaatgggggtagaataacgatagggaaaaagtggacagaaacaaatgagggaatgaacggatggtcaaagggatgggggtatttatggacgggcaacagagagagagaagtgggaggacagagatagaaaggaaaatataataagcgggacaaatcagtacccttcccaacatctcccccttaaaagaattttaatttttcaaaaaattttcgagtttaggggcatgttttccacaaatagcctgaattttcgactttttggggatttcgactttaggtcgaatacgtttccggggttcgaaattggtctaaatagatgttataatcgtgttcagcgcccctgaaaaccatataaatgactttctaagcaacctaagatgattaaaaaaaaatttaaatttgt

SEQ ID NO: 10303 - DNA, 2541 bp, Heterodera glycines
tagaacctattccattttttagtgcttattttatggattttttagagccaaaataaatataagccctatatttacctgtcgatttatttttaaatccttcaaaaattgtttgtcttctcccaacaagacgacagaaatgtttttaaatgatcccttaattttaaataaaaatattgaaaacgtaaattgatttaattaccattaatacttaaatgatttaattaccatcaaatatttaaatccgaattcaatgccctgctcagtgaagtctttattggaaccccaagcagaattagcaaaatcacctcttcgagtatacacacaatatttatgtgattgatcatgactaaaaatttttaattaaaatttgtttaaaataccaacccaaacaattcttttttgtattcgtcaacagttttacagagtttttgtccaatccgaaaaatttgacggatttccgttcgtcgagtttcaaaatatttaaacgattggaatgcagcccccttcaaatctaataataaataaataaattatttaaaaatgttacatcgattttcaagtatttttctttgatccttggaatggcataccttaaaacaaaatttactgttttttaatgtattcaggaaattgccaacttttgtgggttgtcataagaaaaaggtggagaaaatgccctcaagtaaaaggtttcgttttgcttttcagtcgaattctaaacgcattaaatttttaatttatttgaaatttaatttaaattaattttgaatttacaatgtattttatttggctggcatagaccgggaaaagcttttcaatctcatcatttccttccgactcatgaattgcctttgttttctcgcagttttgattctctttgaaaattggctttcgtccgaatggcttcccaatgccatacattgaggcaaaacgaaactaaagcataaaataaaatggattaaaaatatttaaatcttttaaatttgtaataaaaaatattaccaattgattgccaagtccgccacaatttccttcatatgccaagaacaaatatttggaatgcttcgggaaaagcctgtggcaaattttctacaactttttgtgcacgtacgaaaacggcctggcctcccaaaattcacgaccccccccccctcatcaagatggtcatttatactgaaatggacaggtgccggatggggaggctgtgccgttgcgctggtggacaaaaacaaaagcgctcggttggaagcgaacggactgaatgtgctgttttggagcgaaccgtgcgaaggcatcgaagtttttccattcagtggatgaggcgaaaatgaaattcaattgaacaaacgaaaaccgacggctgacaaatgagtgaaagaattaggacagaaaatgaaccaatttcaatcctccccctaaacatacctaattaaaattctaaaacaaggataaacaacaaaaatctttatggatcaaaatagtaaaacatctcaatcggattatttgtttatagagaaagaaaaataaaatcatttacctaattgtaacaaatcagtacaatttccatcacatgacttccatctcaattgacgcgtcttcttcatccgtcatttgttcgttttggccagcaacgcctccgccttcgctaccatttcctcgtacgcattcttcgccttcaccaatttctgcgcgacaactgcgccctccttcagatcgtcgatgtttttactgacactcttctaaaaggggaataattttagaaagatagcaaaatttaaatattaaaatagtgtcaatggcatggctttttgggggatcgtttgtcttttggtcgaaatgaaacccccataatttgtaagaatgtttttatgaccaaatttttaggttttatcaaaaatggagggtgggacagcgctacaattacccgtgttttgcccatttccaaaatggtcttaaagccgtacaacgaatgtgccgaattcaatttgccaaattggcaatcattaagaattggtgtcccgacgaaaaaaaatattaaaaatttgtcgggtattttttctaggcttaaaaaaatgtgctgatcacgaatctgagttcagattttgaaaatcattgatttttatctaagattttttgtcaactacttcattttttccaaaattttaagaaaattagtcggacataaaactgatacacatatgttgtagagcctaaagggagcttttgaatgagctattaaatatatggagaagtcaagttttcaattttacgatttttgaaatttaattattaatcccaaggggtcgtatgagacgggggtctggagttcgagtccgctgggctgcggtttatttgtacaaaatgaaggttcatgcataatcagagcttagaatcgagatcagagtatttttttaacccaaatcattgctaaactttaaaaaaataatttaaaaaatcgaaaaaatccagttgttgacaaaaaatcttagataaaatcaaaggatttcaaaatcagaattcagattcgtgatcagtgcattt

SEQ ID NO: 10304 - DNA, 1680 bp, Heterodera glycines
aaattcattttaaataatgattttttaatttgtataaattaaaaaacttctattcttacctttcatgttcttcatccgttagattttctttacaaactttgctctccgagtgcgaaaaactaaaaaaaaaacttattgaaataattatttaaagttctaatttacttataaaaaatcataataacatcactattgttccaagcacaaattttgtcaaaaaatcataaaattgctaataaatttcattataatgttgcgactcgctacaaaacgtagactttttttaaatatgcaaaaatagattttttaatttataaacattttgaatagcttatctttgccttttccattcttcgtccgttaaatttgccttgcaaacttttctctccgaattggaaaagctaaaaaacaaatccatttaattattaattaattgtaaaaaatgtaaccacacctgaacataggtgaattgtcctcattgcctttggcgataatgtaaaataatattaaaaaaagtgaagcaacaaaaatgtgtttgattttttcccatggaatttgggacgaaaaaatattggacattaaaatttaatatctatggaaaatactgttaattagacatgccaaaatatacagaggattttaaaaaaataaaaaatttaatgaatctcttatgttctttatttgggttggtctcgataactctcgacatatgtttttccccgactcgggtcggggagcatttttactttattttaataaatattacaattcataagcaataaccaagctaatgcaattttatttttagttattatttgcatatttggtgcaggagttgtcggccatatgatgaaaattttccctttttgtttgttacattttagggtgcttttccgttatgcacccaccgctgactgagtctcgcgtcacataaaatctacacgtgtcccatgcgtttagtggtccgtttatgtcagggatgttaataacccaatcagttagcattttaaggcgctatcggcctgcggtccgctagtgtacaaaagcactaatgaccggtccgttaatgtcccgtcagtccactaactttccagactgataataccggtccattaaagtgccataatgaatattaatgagacgcctaaaagttcatgggacgcgtattctgcacgtgaacaaaaactaccaccgagatattatttacttaatgcaaatttccgttcgcgaattcgtacttagttaattattacatcggcgtcattctggaattttttatttattcagcatgctcttgtcaaagccaactggggagagggaatgaatgaaatgaatttgtggtttaatgaggtgaacaatttgacaaattcaaacaaaattgattagcaattacgtatttggatggggaggctgtccaattaatagaacttttaaaaagcttaatttgactgaaaagagtcacaaatgctttaaacggatgctcaatccaagctcaactccacttcccaaagaacacaaattttcatattttatagaattctttgctgacaaacaaagccagtaaagcccacaataatttgaaatgtcatttattctcctcaatgagcggccggccccgcaaacatttctttctccgttggcttttcccaagacaaaacaaaggccaaatgggcgagtcat

SEQ ID NO: 10305 - DNA, 1346 bp, Heterodera glycines
  unsure (1)..(1346): unsure at all n locations
ccagaaaatttttagaaaattttgtgcaatttgttaatagattttgtatgaaaatagccaattttataaattaaaataaaagcaatttttttagttttacatacttctttgtaagaaaactatatttgaatttctaagattttcgcccttcaaaaaagaaaaaaacatcttagaattaaggaaaaatggcatctgaataaaagttaaataaattttaaatttgtccgtaggcaataccttttttgaaaaataataatgcggtaaaaaaacaaattgaaagtacgctataaactgtggccgtaagcgtaaatcatggtcaaaataacaaatattttttcctgttcagaattttataaaaagttcatatgaacattgaagaaataagcattgagtacttttcgccttttttttagtcttggaatgaataatatgcattaaaataaaagtcgctaattgcaaataaagttgatgcctattttccagagattattaaattatgatgtccaatattctttcgtccaaaatcccatgggagaaaatcaaatatttttttgctgctttgatatttatattaatattttacattatcaacaaaaacgaagaattttcatatgccggttcagctttattcaggttttttttgttttggaaccgctttaattaggctgccatcggctgggctaaaatttcaaagtgtataatatgtacgggagaaaaattgtgaaggggacagcaagggtcaggttgaaaatacaattcatgagaattcataaatataattttaaaaaaagcataaattatttctttttatccaactatattctttgaaaaaatgcttcaaattttcaaagcaaaaagatatgaaaaaagcacggcaattttgaaaaagtacaaatggcacccctgcttatatcaattaattaataatgtatgtctaaatgtttttttgaattttagactttcgcattcggagtcttgcaaagcaaatttaacggacgaagaatatgaaaggtgaaaataaatacgatgcatttgttcaaagatgaccaccattctaattaaataaattcaccacaggcttttcccgaagcattcaaaatatttgttcttggcatatgaaggaaattgtggcggacttggcaatcaattggtaatattttttattacaaatttaaaagatttaaatatttttaatccattttattttatgctttagtttcgttttgcttcaatgtatggcattgngaagccattcggacgaaagccaattttcaaagagaatcaaaactgcgagaaaacaaggcaattcatgagtncgaaggaaatcatgagatttgaaagctttt

SEQ ID NO: 10306 - DNA, 5322 bp, Heterodera glycines
  unsure (1)..(5322): unsure at all n locations
cctttttggtggcggacaacgaccagtggttcagctacgacgacgtggagagcatcagaaacaaagtgaatgaaagcccatttcgaatttcaatttgaaatgcttttgcctcattcagctcagttggattcgccaaaactctttcggcggcgctttcgtgtggactttggactttgacgatttcaacggacaatgccccggcagccaactcggtaccgtacctttatttgcaacaataatgcagaatatttgattcaaaattgaatttaaattatgttttgtccaggccgttacccgctgatccgcacaattgcccaagaattgggcggcatccaactctcacagacacccgtctcggcactttcgaatgtagaatttaatttaattaaaaataaatattatatatatttttgttgacagtcgccttcgccgtctacgggcgcagctttgccggctgtcacaatgtaatcacgcgaacagtgcaaatcaagcaaaattgaaaaaaaacacaacgacaaaactttgttattttattgggttttaattcgtttattaaataactaaaaactcaccatacaaaacaataacccattcatacctcttagtgcaactccatccaacgcccgttcagaatctctgacttcaccagaaagcaccccagacgaactccctctcaccgaggagaccatactcgccatcgacttacaaacaaaccgacaattgctacagaaaatcatcgaccgagacaatggcctgctacgagaatgttttgaccacattaagctgctaggcgacccgtttctgaagcaggcggaggaggacctcctggccgcactcccgaccttcgacgacgagcaagccgacccaaatgtcgaagaatggccagtcatcactcttctctctaaagcccagctcatcctcgacggcctccaagtctacatcgaggctcgattcgacacgacggacgccatctcttctcgcagcagcagtcgtgtttctgatcacggggccgacgacgaaaaccggatccaccgccaacggcaatccaccgacccaccgactcaggcacagccagcgaatgcacatcagccttccaattcggctagagccgatcaaaacctattcaaccagcgaaccccggcattcccgcttaatctcacatttccccgagcatcgaatcgccccacccatcgatcggaacctcaccatggccacttccgacagtcgaccagtgacgacgacgcacttcgggtcagccgaatcgaaatcccgaggttcagcggatcggcagaagaatgggtcacattttgggccgcctttgactttgccgtccactcacgccaataccccgccttccaaaagcacctcctcctcctacagtacctcgagaagggatcgccaccacgacggatggtcgaaggttacccaccgtcagacgccaattacagcacagtcgtgagcattctccgagatcgctacggcgacgtcggcaatcgacgagaccaactcaatgcccagcttctccatctcaaacccgcccggaacaacctcaaggagttgcgccagctacagcaggagatcgagcagatctgcactcaactctgcagtctcgagcccgagggggaactttcgccaattgccaatagctcactcgtcacaaacctcatcaaaagcaaactcccacccccggtactgcttgaactgatccgaatggagcgcgagagctacacctcttggacggctcgaaattggcgtgagggatttgcgacaatcgtcaccgacaaagagcaggtggacttgtgcgtccgcacattccaggacatggacatccagccccgcgaacgtcctcccgaacgggctccccctcgtccgggtggtcgttcttctcggccaacaccaccaccagcgccggagcgacgttatttggagaacactcgggcctttcctgctctcgcccaacccgtctctgccaatggcatcagttgctccctttgtgagcaggagggacaccgtccgagtgcgtgccagcgatacaccaccgtcattcaacgccggcgacgacttgaggaacaggggcgctgcctgcgttgcctccgtcaagaccacgtcactcgcgattgctctcgtcaagatcgatgttcgaaatgtcaggcgaacgaccatcacttcctcctctgcccgtcaatcgaccctccggggcgaaccaaccttcgacgagagaatcaagagcggaatggaaatgcgtcccgcaacgtcagtcgtgccacgggagccaacgccgaaccggtccgaccgagaacgactcccaccacaaccgcactgctcgtgtgcgacgagggcgaaaacattcccgaggcgttatgcgccgccgcctttgaccccctccccgtcgacagcggcagttttcccgtccccaaatcgacgagagtagctcatttgatgactcagacccttaaggcgtcatgccaagggggcccacccgacggaattcctgcttttgtcttccacgaccctggcagccagtccggctacataagccgggcaatgacagagaagctccgtccccctcgactctcagagcacctcctccgaattcacaccttcggagactcccgccctaagaccgtccgatcagcaaaattcgccattcaactgcagcgcctggacggaggctgggagaccctcgagctcaacgtaatcgacgagatcacgaccaaaatcaaggccctccaatgggacaccaccgatggacccctccccccgaatgccgtcctcaaggtcgtcgaaaaagcgccggacattttgatcggcatccgggaattttggcaattcttcattggccgttcaacgcttcactccgggcttcacctcatccaaacaattttcggcccaatggttggtggtgaagcggagtttcccgagaccccacggcacaccccgacaattgccatgctgacgtctcaccccagtaacgtcgagtcattcccctcgtcccgcacggtcaatgacttttggagtctcgaggcgattggaatcaccgacgaccccaatcagaacgacgaccaagttgccatgcagcaatttagcaataccgtccgccaattgccgtctggccgttactccgttcgcctcacttggcgggaacctcggcctcccctcccctcgaattgggccatcgcatatcgccggctcctctcaacgaccaagcgtctgcaatgctctcctgagcttctcgaccgttactccgccgaactgacacggcaaatggacgccgacattattgagctgaccgggcgagacaacgacgagcattttttgcctcaccacgccgtcatcaatccaaagaaactgcggatcgtcattgacgccagtgctcatgccaagggcaccccaagcctcaacgactgtcttcaccgcgggccagtgttgctccccgacctttgcgggattctcctccgcttccgttcagcgacaattcctgtgttggccgacgttcagggcgcctttcatgccatcgaagtcgaacccgaggacaggcgcttctgcaaaatgctttggctaaaaaatcctgcccgtcccgtctcaggcgacaatctcttgatctaccgctacaaacggctagttttcggcgcgacgtgctccccctttatccttgccgctgttctcctccaacacttcgacaagcacgagcacccattcgcccaagcgttggccgcgaatatgtacgtcgacaatctcctcatcgagtgtgagacggaagaggaggccatcgacaagtcgtccatcgccaaacaaatcctcaaagacgccgacatgaacctccgggagttcctcagccactccccaaacgtcatgggacgaatccccgaggacgaccgactcgacaaaacgccggccaaagttctgggactgacctgggacacccccagcgactgcatcaccttcagtctcccaaaagacacagacatcactgctacacggcgttcagtcttgagcatcatcgccagcactttcgaccctcttggactagtcgggccatgtcttctgcccgccaaacggctcttccaacgcctgtggggagaaggaaccgcctgggacacacccctccccgagaccgaggcggaaacttggaatcaaaccctgtccctatggcaaaaccaaacgattgtggtcccgcggcattccattctcggcgagcaaagccgcctgcaactccacgtgttttgcgacgcgtcggaacacacattcgccgccgccgtctacattcgaagcgagactgccgatggctctgaagcgaacctaatcttcgccaaaaaccgcctccggccacgaaccgcgaaccagcgcttcaccatccctcgactcgaactcctcgccattctcgtcggaattcgcgccatgcgcttcgccgagaaagagctccgacgtccgatcgacgagcggcacttatggtccgactcccaaattgccctctcatgggtgaagtccgacgaacccaaggcccaatttgaacagcgaagactcgtcgagatccgacaagggccgcccaccacttttcatttcatcagaaccgaccaaaatcccgccgacgtagccacgagaggctgcacaccggcggagctccgaactcgccacatttggtggaaagggcctgagtggctcacgagtccggaaacggaatggcccgacgagttaacgttcgcaacgccagccgactccccttccgccgatcccccgtttgaaaaatcggagaccaagaccctcatggccaaacaaagtccgctgccccctcccctcattgatccggctcgtttcggtactatgctgacccttctcggaacgaccattctcgtcctccaattcatcgggcgtcgtcgaccaaaatggctcaaaatcggcacctcgtcaatcccacggagtggccctccgacgggcgattcgttcagagcagccaggactttcctcatccgacaagaccaacgaagctcgctcgacggatacgacaaacaccccactgttttcaatgaggatggccttttgtgcctcaaaacccggctcttgcacgcgaacggtccgcccactctcgcctctcccgttcttctcgaccgccactcatctctgactcggctaattgtccaagaaatccacgccgacctcagacacgccggcgttgactggactctgactgagttccttggccgttattggatgcctcaagcacgacgaaccattcgtgtatccntccgaggttgcccgtcctgccggcgatcacagcacccccttttgcgagggccacatgccccctctgccntctatgcgcgt

SEQ ID NO: 10307 - DNA, 3788 bp, Heterodera glycines
  unsure (1)..(3788): unsure at all n locations
tcgcgggagggctctctgtggggctcgccgttcactgtgaccatcacaacgctggatgtgncacagttaccgcaacgacaacaggtgcgtggcagtggaaaaaggacaccgtattcagtacaacatatcgtaaaagagagtgctcttctgagaatcaacaacagcgatgatgcatattgtcttttttacgctttggaggcaagcagaaaataccacagcaaagagatgcccagaagaaatttctgctattatattaactgtcagaacgggcgacgactggaagacgtgttcggactgatgagcggtgcaaacattcgcaccgatttgagagaatatgacgcggttgtctatgtgccgattgtcgtggactattggaatcggaaatacgccaccgcaaatcagcgatttaaggtgttcatctttggcgctacaggcacctatcggccaaaatttcaatatgggccggacaacttcaacattgaaatcccgctctaccatcacaacgaccatttcgacggaattcgatgtggggtgggcaaagcggtgtttgggcgtgactactactgtttttcgtgcgaatgcccatatgataacgccaatgatcacacgctacaatgtaaagcaaagtgcataaactgcggtcgcataggagtggggcgaccgtgccgagcggatgacaacaattattacagagaatgtacagcatgcggcaaggatttcatgagccaagactgcttcaatcaccatttgtcgagcaatgtgtgccgacaattcaacaaatgcaaacagtgcggaattgtgtggaatatcagacaaaaccgacgaaaaggacgcagcggacacgtttgcggtgagaaattctgctacacctgtaaatgctaccataagccggagcggggctgcttcatacagcagttgaagacgcgccgccccacaaagtacagactgatcgcctttgactgtgaaacaacacagaatacacgaattgagggcagcggcgaccgccgacttcattccgtcaacttcatctcatgccacgtcgcctgcaccaagtgcataactgaaaattcgtggcgaaattctctacaagcgccatgtggcatttgcggtcggcagcgcaccgtcacattctcccaccgcgcctatgaacgcacacaaaccgatgcccaattcatcactccttgtccaatggcggcctttgctcaatggctgctcagcgaattcgatccgcgctatcccacaatgctcttcgcccatttcggtggtcgctttgacaacattatgctgtttcggcagttcttcctcaacgggttttgcccgcaaatgatccgtcgtggcaacaaattatacgaaatgaaaattgcgaggggtgaaaaaaacccggaaatcatcgtaagagacagctggaaccttatgccggtgccgctcggcgctctgcccggagcgtttggactcaatgtgcaggataaggagttcttccctcatttggcgaatgttgaggcgaattatgggcacattctgcagtcgctaccgccaaaagctgactacttatacggtggaatgacgcccgaccgacagcgcagatttgaccagtggtacgcggaacaccaccatcaacagttcgacctgtgtgaacagctcgcggcctactgcaccaacgacacgcacatactaattgaggcgttggttgcttttcgaacggagttcttggcgatcagcgatccactggagcgacatggatgcttggatgacgaggacgacgacgaggaggaggaggaagaagacaacgacaatgcattcgaagtgattggcggtggcattgacataacgtgggagccgatgaccatcgccagtgcctcaatgaggcactttcgactcaatcacctcaagcgagatcagctcgcgattgtgcccgagtgcggctacgacactacaaacacgcaaagccttgtagcgctcaaattcatggattggtacgccaaaaagaacggggtgagcattcagacggcacactcgcccggcggagagaaaaaaattggccagtacactgtggacggatacatcgcggcgaccgacaccgtgattgaggtcaacggctgccactggcacgctcacgaccacccgcgtcaccgttttcagccccaaacagtgatggcgaatgggaaaacggcgcagcggatacgggaggacgatgcgagacggatggccttcatcacatcccaggtgcaacaagtgctcgtattttgggagtgtgaaatcaacgcggagaagcgcgacaacgacgaaatgaagcgcacctttgcgcagtacaaggacagcggccctatccgtttgaaggactgctaccatggaggacgtgtgggtccacaacgactacactacgaggtgccggaggggtggaggatgaaatattacgacgttcgttcgctctacccccacacgaatgctgtgacagcataccccgtgggtcacccaacacgagtgaacatcattggtgaggcagagcaggcggttgactggcgacgcgccgaccaagtgccggtccgaggcattctcaaagtgttcgttgtgccgccccatcacattgatgtgcctgttctgcccgtgaaatttgatcagcggcttcttttcccgctgtgccgtacgtgcgctctgcaacacccgcatggagcggtcaatgaggactacgaatgcacgcatcgcgaagatgatgagcgggggtgggtgtccactgtgacgtcaatcgagttggaggaggcgcttcgcaacgggtatcggtgtacggcctattatcgctccgttgagtgggacgacacgcagtggagcgaccgcgtttttcgaggctacgttgcagaattcatggccatgaaaacgcatgccagcggcttcccggacgaaattggccaaaccgaggaagatcagcagcaattcatagaggaatgtgaggaaaaattcggaatccgaatcgagcgggaaaagatggtgcacaacaaggccaagcggaccatcgcaaaactgtgcaacaactccctgtgggggcgcttctctttacgcaatgggttgtccaaaacgattgtgaccgactcgcccgcggaactgcgcgctctgcttgacaacccagcggtggaggtcagctccattgaccaactcaccgacgaatgcgttctggtcacctatgcggccggaaacgaatgggtggaggaacacgagtgctcaaacattgtgctctctctttggacaacatcggtggcgcgcctacacttgttgcggctaatgcagaaggttgttcgcgcaccaaactctgtgctcatctacaccgacacggacagtgtgtgtttcgcccatcgtgaggcggacgggtgccctctggagacgggaccccacctaggcgacctttcggatgaatggccggaccacgaactcgtggaatttgtttctggtgggtgcaaacagtacgccctgcggatgcggcaccgccaaagcggggaggagaaaacggtgctcaaagtacggggcataacactgagcgccgatgcctgtcagcttctccactttaacacgttcaaaaggagtgtcctacgctattcaatgtgccattcaaatgatggtgatgatgatgatgatgacatttgttcaattttgattgagtaccccaatttcctgaggcccaacattaaggacgggacggttatttctgtccggctatcgaaacgttaccgccctattgtaactaagggggttgtcgggatgaatgcaattgtacatgattttggttttataaagacata

SEQ ID NO: 10308 - DNA, 3425 bp, Heterodera glycines
  unsure (1)..(3425): unsure at all n locations
cttcctcatcatccacaattgctctttccgattgctctcgctctttcatttaggctttttttttgctaatccaagtctctgtctctctcctttccttctctcccactctttttgtttgttcccttcgctctctctctttctctctctctcttcgctctctcttcgctctctctctttctctctctctcttcgctctctctctattcctcttcctcttccccttttcctcctttccttctctctctctctctctctctttctctctctcttcgctctctctctttctctctctctcttcgctctctctctattcctcttcctcttccccttttcctcctttccttctctctctctctctctttctctctctctcttcgctctctctctttctctctctctcttcgctctctctctattcctcttccccttttcctcctttccttctctctctctctctctctctctctaaatatctctttcttctttttctctctcttttcctctccatttctttcgctctcttttctttttattttatttaacacgtgaataaaatgtgaagccatttcaaagcaaaagctatgtgtattccttcagagtgagaaatcaaataaatttgtcttttcattttccataatttttatttttttttattttgcttttgctgaattccaattcattttctttttcctcttcccccccccctctttttttctttccttccccttcccttttttctccaactttttcggggttttcttccaatttttcttcgtcatcgtttctcttttctctgccattttcttccttcgctcttttcccatttgttttttcacttttaccttttacctttgcccattctgtccccccaatgggaaatttcccaatcggaaacatttatttgtttctctgttcgtcaatctctgacaaatccaatcgccccctcctttttgtctcagctcgtcctttgctttaccccccccccccattttgtccctctctttttgtttgccctttaaatactccttttcatagtgctttttgacattcatatttttgcataaattttggcttaatcgcctgattctttttttatttttgccttttcttttattttttgcacttcatacaattgaaaatggctggcaaattcatcggcggaagaatgccttttcgtcaatcacttttggctccttcctttctcagtaagacttcctcttccgctgatggctctcatttatccgttcgctttctttcagcagtttctcccctttggccttttcccttccgtcccaattccgcttcttcccatgcgcgtgtcttcgattccgaattcccttcttctcattctccgaaattgcgctgtgttttgtcggctaataataagacaaattcgcgggcccggcgttaccaccacccgcggcctcagctggtcatcttcgacaaggacggcactctgatctgttttcattctctgtgggtcccgtgggtgcgaagctttgccgaaaagtgagacccgggcaaagtgaacggcacgacaaaacgaaccttttttcagagttgaggaggcgggcatcgatggcattgccccgaaggtgttccatgctctcggcttttgtccggttctcaaaaaggtcgtcttccttctcattgttagccacactcataaattttcgcctaattaggtaaagcgtggtcttctcgctgagggaacgatgcgccaaattcgggaccgagttgtccacctattggttcaaaacggtctcgaaaggcgcgagtcactgaacgtcgtggaaaaggccatccacggaacttcggaaggtccattcgcagaaagaacggtgcgtcaattgcacgacttggaaggactgtttgcaaggctgaaggagcttggcatcaaagtgatttggcaacattcgcaccgaatgtgactgtttgttcacccacagattgccatttgcacagcggacagtcgggcgggaacgacgcgagttttgaagactctaaaagtcgaacaattcgtggatttgatcgtttgtggtgacgacaaaggatcagtgccgaaaccccagccggacaatgctctgttcatctgccgtcaattgggagtggaccctaaggtcgaatgccctttgatggcttatcgttaatgttgcttctcctcttcagaatgccatggtaatcggcgacactcctgccgatttgggaatgggacggtctgccaaactcggctcaatcgttggtgttctgtcggggattggagaacacaaagaactgaacgaagctgaccatttggtgagccataacacatcctttcgtctgattctttcgctgtttaggttgaacatgttgaagaacttcttcctctgattggctgagatttccacgttgtcgtgggactgcgcataacccaaagacggattgaatcaatcctttgttctgtcaatacgtcgtgcttttccctcccctcctattaatttgccattgtatttatatatatatatattttaattttttgatatagatttcattaaattattaaatcaatttttaaaattaatttggcatttgtattatatatgtatatatttttattttattgtaggtcaaccaaaccttgaggatgacaatttggacaacttttggagcatccattccccgtcaaccgatgaacaattgtacgacatgccgtcgccggaaaaacgcaatttttacacccatttttggcgcagcattgcccaacgcatgccgagctatcgcggcggaaacggccgcatctcgtcactggccgaggcatttttgggcgtggatttaagcatggaaaattgagaatcatccgacgaataattaagcgctaactttatggaatttaatcccaaagaatttgactcgagaaaagcccaaaaaaatttataaattaaataaagaagttatttttttttaatttactatttatttgaaaaaaaatccaattactcagcgctccgcaaaaattgacgtggacaaacgcacaccatggattgacagaatggatgccatcagaaccggttgagaaaatgtaagatggaaattggatgaaaattaaaaaaaacaattcgatcattgatcatttaatctgtccggcgactgactgtccattatgattaatttcatgtttcttataaaccaaacttagcatcttataaattttttttcaaaaataacataaattggcatcgtttggttgccggcccctaatttagttgttcaatatttattattttttaatttaataactgaggttagaacgccacgccgaaacaaaaatttttgcgcttttcagggaatttcccgaattcgataaattctatttccgctaatgaaatatgtaatcagaaatattaaagaatgaaatttataataattacttgagaaaantgggttat

SEQ ID NO: 10309 - DNA, 2443 bp, Heterodera glycines
tagggatgccaattttatgtaaatacatatttttttcctggcttctccttgctctaaatagcaggaaaaacactttcttttttgtgtttgcgaacaaaaaccgggacttttatttgcatatttttacatatttcgggattttcttacatatttgtacatattttggatttttttcatatatattttcatttttttacatattttgaagatttataaagaaaaaataagtttgaaaatgttgcctaaaaataccaaaaaaagtaatttttatgtcattttgtggctatttcatactttacggggattttctttcccaaaaaataccattaaaaaatttttatttacatattttgggtttttttgtacatattttgggatttttcttacatatttatgtacatatttggaccactttttgtacatattttttgcagccctattaatcagtatttattttaaaaattaatcatgcatggatcagcaaatttaaattttcccaaaaaaaaaaaaagcttttttcgaaagtcagcctataaaattgtcatgaattttttcatttttattgttttttctaatacttttttttgcttttaaatttaattattattctacaattagtagagatcgacattttgaaaaaagcctgtacctgtacctgtatttccaaattggcctgtacctgtatttcctgtacaaaagtacaggaaaatacaggtacaggaaaaatacaggcttctcgaggcctggatccaggcctgtacctgtatttttttatttttttgataaaaaccttttttattaaaaaattaacacaaaaatactaaattatttattatatattaaacaataaatattgtaatatatttaaacttttttcgtatatattttcatttttttaaatattttgagaatttatgaaaatgtaccaataaaaaataccaaaattaatttttaaaatactaaaagatgattaccgtaaatccgctatttgaaggcacaggccttctattgttcaacccctccaaaaaggggcctttaattggaggggggccttcaaatagcggatgtacggtataagcctaattaggttacattttgtgcctatcttaccctctacgaaaaattttttttccaaaaaacaacaatttaaatattttatttacatacatatttgtacataattttgacatcccttataatgactttttttggttttttaaaggcgcgctttttaaaaaacaattttttgggtaactaggggagggggcggtggtccggcggtgcaggtaggcgccgccgggaaaaaatttgtaattttaaatgcaatttgttaacaagattttgtccaaaaaagacaaaattttgcgattttccaccaatttttttataaggattttagaagccatcggataatttgtagattttacaaaaaagaattttgaacaaaaagtttttgctcataagaaaatacaattttatttaaaacatgcgccaaattgaaatttgaagggcattcgaatgataccaagatcgttagatttggttgaaaataaaaaaagttacagcccaatgggctggcgccaaaacgaccaagtcctctttgaaccagaacatttcgccaaaatattaataaatttttcaaatttgacacatttcactgataaaaatgatattttttttgaatttttccatcctttttaagacatttcgccaaaaataatgattaaaattaatacaggaaatacaggttttttaggcctgtaaatttaatttgaaatttatgctaatcatataaaagcattttgtcatagacgcagaagtatccgtatgtttctattctctcttctatgtctttaaatatcttcccataactctctcttattaattagttttctctaatctccttaattaaaaatgatttgtatgaccggtactggatttcagcactctcttaataacgcatatgcaaattttttttgttacgacccagcaccttttgaatatttcaatcaatccaggaaggaatcacacattatttgattagctcctaattaaaattcaaacaaataattaaccacaaattaatattcaaatttttctttctaaaaattatccttaccaagttgcagcttctgctgttgttgctgctgtgttcgtccacgaattgccggtgatgctggttgatgtgcagcaacaccagccttcttcatgctccacattttttctcgttccaacatacgatttcttcggtccacttttgccttttcggtcgcttctttgatcattttttccctttccattcgtaccaatttttgccgaggtccttgaatttgcttgtgcagttttaagaattcgtccatttccaagtccatggtgcccttggatttttgtcggatcaacatttggctttgttttacattggccaaaattgggtcctcaaagt

SEQ ID NO: 10310 - DNA, 5227 bp, Heterodera glycines
aaaaatccaggtccaggcctggatccagggctcgaggagcctggatttttcctggacccggattttcctggatttttgtctaggaaatccaggtccaacatggaatcgaggtccaggtccaggcttttttcaaaataccgagctctactagttagtcatgtacatttagcagaggggggctctttttgctttatattttttggtttctaattaaaatttttgaaaaaatatttctcccatcaggtccgtgccgaggacggttcggcgctggccgagtattggtcttgtccgttcgcggaatgctccgccaaatcggcacacaatgtgaacacagtgtttgcggagattgtgcgcgagattaattatgtgcaaagtgccaaggcgaagcagaggcacggctgttgttcagtgatctgattgatttgtcatcatttgcacccgccccaaaaaacacttggccagaaacacaaattaataataaaatattttattgtaaaaataaactttatttgtccaaaatggtccaaaaaattatggaaaggggaaaatattttattcctacccgatccttgggcagataaaagtagggaatcggggaggaaaatccacgacaaaatttattgggggttaaagaaatttatagtgtcggggagcaacacccactcacgttggggagtaaatttccataaaaagtcgaaaaattatcaatttcccgaggaggaagccctagttatagctataaattttgaaatttatttttattgtgcacagtaaattcgtaaggttataaatatcatcggtcgtaataaaaagaaaatgcccctttttggcccaaaatggaaaagcattgattgacaaattttgcgaacaaaaaaaaataataaatttatttttcgctttttatgccataaaattgattcgtttgttggcataaaatggatttgctaataatgaatgaatgctgccgcataagtaaagcagcataagatttaaatttatcttttagaaaaattccaaatattcaaacttttcataattttaacttacaataaataatggtttccattcgtcctttgtttcctgtgaaattcgtcttttttcaaagatatcatttgaaattggaatttggcccattaaaaatatatattttatgggaaatttaaaattatgcattctattaatgcattctattaatgcatttttttgcatttatttctcttattttttaaattattggcatcattttggtgaaatctcataaaaatagcaacaaaaaattcaaaattttcctgtcggtgccttttgcctccgaaaataagaaaatattcgaaaaatttgttggcagaaatataaatctaacctttattattctagtaattaataaatgtttggatgtgccttttgaattcaaaatttaaaatcaatctcggacaatggcatcaatggcctaagaatataaaaaatccagtgaatgaatggtattttttttaaatttaaggaaatgcgcaaatcgatccaattgcccattctaatcagtatgatcagtgtgtttgattttgtgattggaatggacgaattgaagcagccattgctgaaaaaagatgccactgatcagcagtcccaattcgaactgttcgtcgaagatggcacaacggaggaggaggacatggaaaaagcaatgaaaactggtaaaacattcttttggcgcgaaatggtgacaaattggcattgtaaaaatgggaaattgaaaaagcccgaagaaattggattcaaaaaatcttataaagaattgattgaattttgtgaacattggaaaatgatgacaaccgcagcgaatgcatttgtgaaaagttgggagaggtgcagaaatggacagaaaaatagacaaaaaattgacacatcaagttcaaggagttcgcggaaaaccagtaaattcggtgagagtgttaaggaatgaattaattttttaaaattaaaaaaaaattgtatttcaaagaaaatccattggaatgcctttgtctgaagccacattttcgtgtcggcgatcgcgaactccaaatgagctcagcaatgggagcaattaaagcagtttatcgtgacttgttcaaatggggcgatgggaaaagcatggaaattgaggtaaaataaatgtcaaaaaaattaaaaaatgtattttaaaaatttagtttaaattagcgaatgagaatccatggaaagtgatccaatttttagttgataattcaaatattgaagaaattaaagcatcattaacggaattggagaaatcaaccgctgttggcacgaaaaaatttgatgcttttatggcaaaaaattttccaaaaattaatttaaatgtcagatcgcgagacattttttcaagcaagttttttttcaataattttgcttcatattgattccataatttaaaaaaatatattcaatttaagttccctcgagagtctcggtctcgagtcgagaaaagtctgggagtttttgggtgtcacgctcggtctcaagtctcggtttaaaaaaatattcaatttaagttccctcgagagtctcggtctcgagtcgagaaaagtctgggagtttttgggtgtcacgctcggtctcaagtctcggtttaaaaaaatattcaatttaagtacccccgagagtcttggtctcggttcgataaatacttgggagtttttgggtgttatgcttggtaccaagtctagggttcagctctaggtttcgtctcgagactcgtgaaattttaattctcgagtattacttttgttttatgttgacctgctcgggtcaataatctcggaggaaaatatcagtgggtaggaggattgtgccaaactatagagtttttttttatgaaacggtttcaacataaattgaaaaatattttcatttcaaaatatttcttaggcgtaatttgtgctgcccattaatgacgaaaacagtgtgaaaagtgatgaagaagaacaaaaatgtgatcaatttgttgaatcatgtttcaaattaattgatcaattggctaattccgatatattgacaagaaaagaattgcaaaaagatgcttttaaaacgtacattgaactgtgggagatcagcaaagagcttgggctgggcaagtttacaccattgattcatttcataattagtagaaggaaaattaattgcatataaaaaaattggaaatcggtaaaaactgaattaaattcaattttaaatcgagaaattttgttacatatttgtcaccctgtatttgaaggaaaatgttttttaattcgataacatatataccaaacagaaattgttgaaaatattagggctatataattgttcaggggtggagcgcgcacagaaaaatcccgcggccgcgcaccgcgcatttaaattgccgcggccgcgaaccgcggatcgcgcaaaaaaaaaaccgcgtccgcgcaccgcggatcgcacatcaaattgccgcggatcgcgcatttataaaaacatagttcaaaaatttcaatttaatcaataatcaaaatggtaaaggatgagattatgatgaagaaaaataagcttttctagattttcatgcgataggttttttcgaagatcattaagaataaatcctgcgctgctgaaaaggcgttccgactcaacacttcccggtggcgcacttgagaattgtcagatttctcaattttttccttctttttacgtaaagcttcatccctttgcttgtaatgttcaggatgcttagattttaaatggcgttccaaatcagatgttcgttttctaggccctctgtcaactttataattgcatgccttgcatttggcataagaagaattgtcaattttgtcaaactaaaaccaaatagagtctttttcatgagtcatttggttttaaattacagaagaaaattgtctagaaaagttaatgaatatttctcatttttggaggaattagtgagaatccaatttctaaatctcttgctttttacataaacaaaaatttacttttaaataaatttagttataaaacaatcgctttaaaaaaatttatttttaaaaattttagtcaaaaattaccgcggagtcccaaattccgcgcatcgcgcaaaaaaaaaaccgcggccgcgaccgcggatcgcgcaaaaaaaaacgccgcgaatcgcggatcgcacatcgcggcgcgcccccatccctggtacaaattaaaaattttgtgaaaaactgacgatttttgtaaaaagaaaaaagagaaaacaaaacctaagtgatgtaaaataatttaaaaaattttaaaaaccttttcacagatattacaaaaatatgcgaagctgacagagaatttgccgaaaattacgccaacgcttcaatgttttatcagccttagtatttgtttaaaacgagagtcgtcagaaccaaggacattctgatggcacggatcgatggccatctgttgccataccgtaccattgagaaaatggtaggcaattggcacaaccaattcaaagagttgcttgaagaggaatggcacaatgccaatgccgaagagaatgccaatgccaataatgacgaggaacaggaaaagttggagcagcagttgcccaacccatgtgaggaggcaaagctcagagtgaagaagttgtgactggttgatgaattgctataatgaaaaacttcggcaaatttttaaattcgggctgccatcgaaaattttcaaaaacatggactgacttattaaagaaagattttgggagcagaaaaagggataatttttaaaagcaattcaaaaccaatttagcagacctaagcttaatttgtgtggattttagggaaagaaatacgcatcttttggtggcggcggagttgaagctgccgcgaaaatttaaaatttttgtgaaaattattaaaatgattttggctctaatgaaaatttttggttttttttgatgattaaggatgataggttcaaattaattattaaagttaatcaggaatcactttaaatgcgtaggataaaaagcgatttaaaactttttcatgacgtaattttggacaatattaacattaagaaaaatgaatcatacacattgcctcgtcctaatttaagaaatgataatgctattaaatcaatttttgctaaaccaatgttcgatacaactcatttttttgtgcgaatgtctcgcctctataggcttctccctttttgaacttgaaactacgttaatgtc

SEQ ID NO: 10311 - DNA, 981 bp, Heterodera glycines
taattggcagcgtcacgctttttgcatataaattatgtataaaaggacgaagcttagaaataatgggaaatggcagcccttgttttattggaaatgtacattattttgtttagtttaccatatacatattatttttaatttgtttgtttgttctgcattaaattttttggaaattttacttttcttttttgtgctttgtctcttttttgcattatttttcaatcagtgatctgatcagtgatcactgtggtgcaacaattaactctttttttaatctgcatcggaagttatacagttatgaatctcttctccatgttcgtccattcattcgtctattgtagccttatcgttagggctcgaaattatatagattaacatattttttctgtgcatatgctataaagaaaggggttcaaaaatagcatttctacgtaaaattttttgatttggtgaaggtttttagtccatataaatccatattttgggggtcttagggaataaatccatatttcggccattttttggaaattttcaaagaaaaatgcaaaaaaagtgaaaaatacacccttaaaaatcgactttttaaaatttttaaaaaatacaccctccaaaaagagaatttttcgaaactggcaaattttcatatattttgtttcgcttccgaaaattttcgctcgcaacaggatgggattattatccaaaacttttagatgtctttggtttgcattatgaagctaaaatttgataaaaagttggcactttttaaggtaaatccattttggcagtttttgtgtgtttttaagtctacctatttaagcaaatattaaattgaaacacattttttgtattttagggtttaaaatttaatttttgtcagtttttagtccattttttggtccatatttggccgatttttgagctttttagtccatatttcgggtattttttgtccatgttttatgtccatttttgacgtttttt

SEQ ID NO: 10312 - DNA, 2383 bp, Heterodera glycines
  unsure (1)..(2383): unsure at all n locations
ttttaaataaaatanaagcaaaaatanatattagcgcgagcagtttttaatgggccaaatacaaaggaattattgtaaagttttactatcatagatggttttaaacaaacaattaagcgtaaaatgttttttatgtatgcagattttctcacttctctaaaaacaaagctttaattaaaagcaatttccttttgtgttctttatgtttgttataatattttatgtagcaaataattaatgcaattaagcgcaaaaatatttattcgattattaactttttttaaaatgcatatttgtttttccatttcaaaatctttgacagaaagcataaaaaccaaaaaaaaagaagattaattaaattcatttaattgatatttgtaagaactacgacttaattttggtgtaaaatttaactaagagtcaaaaaggggcttatttttgcctttcagtttggaaaagtttatcttcggcatttcgtccatcagtcggcttgccaatccgccgtcccaactcggcacttttctcatccctttgcttacaccgtccaattcactactttttccgtgctttgtcgggccctgatggaaagaactgagttggccgcttgattgtcctatcaatgagtcgtaacttgcacttttgccgattggcctttgccgaattggcgaaatttgctgttttgactttgagaaatttggcaaagcgtacgaaaatgccgacgatgggaaggcggaaggtgccaactgatgcttagcagctgcaagagaagcagcagtgccgactgtaaaatgccattgtccctttttgaattttaaaaatggcacttttccccactaactttttggcattttgtctccctccaccgtttctccattatttttcgacattttactcagttgcgacttgccaatgttctttttgtgcatattcactggtgccgcttcgctgctgctgaacctcggctttctcaactcgtgccgcctcagtaacattttggtcacttggtgcgctgtcaattctgagctttgttcggccgattactttccgttttgacggtaaataccgtaatcattgtgactgtttcgagcattcggcgcgtttgggaacatcgcccgtccgtttagcgtttgttcgttggcattttttgtggccaaattagtgacggatgagcagagcaaaaaggcaaagtttaggaagaaaaaatgtgcgaagttaaaagccattttataaatcataaatttttatgaatcgtaaaagtaaaatatattttttcgattatgctaaatgacaaaatcatatgctaataaagcatcgattgccaaacgatggcattggcattggcatcatgggaaggccatttccaagcaaagtgccttattgacggaagctattcattttttagaaacacatgtaaaatgatgaattaataatgaaatgttggtgattttaatatcaaatggcattggaatgatgtcattgaattagccaaaatttaaaaaatattattcacacaaatttatgcgtagaaaatgaacagaaaaaacgctaatttagaataaataggcaactaaaaaggaaagtgtgtttgattccgaaagtcaattaaattcccaaacaaaaatgccgtctttcgttctttggtcggcacaattcactgattcatcgtccgccggttggagtgccggtgttttcccatccgtttctgttgacaacatcggcgagccaattggcatcattccactgactctttgcccaatcactaaaataaaggacaattaaattcaaaagaaatattttaatttttaaactttttaaaaataataactcaaattaataataattatttaatttaaaatgtattttgcatttttgaatatgccatttttattaaatttatgctcttacagtgtcgagtcaatgggatggtcccatcctccgacgtatccgccggcgtgccccaaaacgtccctctttcgccgttctccgctcggcttctgccccggatttggcttactttcgccagagggcgcttttcccttttcattagccgccgattgtttgccattcaataaaagctgaatgaattttgaattgtttaattttacaattaaaaatcataaccaaaagtcccattggccccgcggcgtttggaggggcggcgccttttgcctccgtcggtccgtccattttaatgccaattataagcacggccaaaacggaggaggccaaaaagagagcagacaaattggaagagctgaacatttcttctaatggacaattggcggtaattaattgttttttttaattaaataattccaatggtttttttggtgccattctttgactatttatacgcattttggcaccacaaacattgcacttt

SEQ ID NO: 10313 - DNA, 2841 bp, Heterodera glycines
  unsure (1)..(2841): unsure at all n locations
gaaagaaggcatttttgttggggaatttaattgactttcgggatcaaacacacttccttttttagttcctatttatttctaaattagcgttttttctgttcattttctacgcataaatttgtgtgaataatattttttaaattttggctaattcaatgacttggcaatcgatgctttattagcatatgattttgtcatttagcataatcgaaaaaatatattttacttttacgattcataaaaatttatgatttataaaatggcttttaacttcgcacattttttcttcctaaactttgcctttttgctctgctcatccgtcactaatttggccacaaaaaatgccaacgaacaaacgccaaacggacgggcgatgttcccaaacgcgccgaatgctcgaaacattcacaatgattacggtatttaccgtcaaaacggaaagtaatcggccgaacaaagctcagaattgacagcgcaccaagtgaccaaaatgttactgaggcggcacgagttgagaaagccgaggttcagcagcagcgaagcggcaccagtgaatatgcacaaaaagaacattggcaagtcgcaactgagtaaaatgtcgaaaaataatggagaaacggtggagggagacaaaatgccaaaaagttagtggggaaaagtgccatttttaaaattcaaaaagggactatggcattttacagtcggcactgctgcttcttttgcagttttcttcctaaactttgcctttttgctctgctcatccgtcactaatttggccacaaaaaatgccaacgaacaaacgccaaacggacggacgatgttcccaaacgcgccgaatgctcgaaacagtcacaatgattacggtaattacggtatttacagtatttaccgtcaaacggaaagtgattggccgaacaatgctcatttaaacatcccgatttttttaaattgttcgtatttttggtagcaatagaaatgggcgggatgtaaaaatgggaccgagatcttgtctcgatttaaaaaaatatgaagattcataggtcgacggttccgttaggcaacgccggagaaaaaaaccggaaaatgaaatttttaattaattttgcaccaaaatgtaaagtttaatttaatttaatttaattttatcgagcaaaccaaaggcacattagtgctcttatatggtgccaaaaacaaacaaataaaaatgatcaaataaaaaatacaaaatgaataccgtaataaaaatgaataaaaataaatcaaatgttaaaaattcacaggtgattaaaatatagtgtatatgtggcacagaaatttcctactcagaactaattgcttttagtaaacccctgaattcctttgccttattaatttgcaccgctaaaactggaaggttattccagtttcttactatcctatgaaaaaaattattttgtgttttggccgtgtggcgctttactcgtaaaagtaaaggcctcctgggcctttctgagaaaaagaaattttgttcagcctctaggctggtgaaccctttaataattttaaaagctgttgtcaaatcattaatttttcttctttcttctaatttatgtaaacccgcgattttaagtctttccacatattttttgtacacaagtccacattttcgaaaaacttttattgtgaaaaatttttgtacccgctcaattttgtctatatctttttttaaattagggttccaaacttcggtagcgtattctaattgaggtcgtacaaaagttttataagctgctgttagagtctttatttccctgcttttcaacactctcaaaatctgaaagcttctaagatatgcgtttcgtataattttgcttatgtgttctgaaaaattaagtttcgagtcaattataatgcccaagtcacgaacattatccgactcagaaatcttttttgagttaataaaatattcttttttcatattatttttccctaaatataaaacaaaacatttttcagttgaaatttctaacccatttatttttgaccatttttccaaagcctcaattgctttatccaactgatttgaatggtcatcgttttcatgtgtataatataatttaacatcatcggcatacatttttatatcaaccgatgccgcttcatttgtaataaaggacggcagatcatttataaaaattaaaaagagtaatggccctaagacacttccctggggcactcctgaaaatattctgaaactttctgacaattcttcgccaattttaaccttaaaactccgattttttaaaaagttagttaaaaaattatgaatttttccttcaattccaatctttttgattttttgaagtaataaatcaattggaacagaatcaaacgccttgacaaaatcaatatagattatgtcaatttgttgattcttttgtatagaattatatatatcgtccatcatttttaatatttgggttgtagtcgatctattttttaaaaacccaaattgttctttatcaaagaatcttgtactgttcagaaattctaaaattttgctactcaaaattcgttcaaaaactctacagacagtgctggttaatgaaaccggcctgtaatttaatggatcagttttttcgccttttttgaaaattggtaccaccaatgatgttcgccatatttccggaatttgaccgtaatccaaaattagcctaaatatatctgctaatatttttgtaattggttctgcacaattttttaataaaatgtaaggaacattatccggtgaagtggaattacgccggggaagtcttctaaagatattccaaattattcccgcccattcaanttaaatgtcag

SEQ ID NO: 10314 - DNA, 2895 bp, Heterodera glycines
ggagaaccgagaggaaggcaaaaagagtgcaaaccgcgttggaatgaggtgcagcccgacgactcaatcgtcccttccaactggagccctgtaattatttctacaaaaaaaaagaatatttatattaaaattaataaatgcatcaatgcttcgtctgaacaattaatataagcaacacatcggataatcatggagcaagcattttggtatatttaaaaccgatttttaaaacaaaattttcaaaaaatgttagaatttctgattagcggttcgaaatgcgtcaaatcgagttcgtatccatccatgatcgcggccccgaaaacccctggaaacacttggtcattcgacgcattggcactgtcgtcagatgaaaatccgggcaaaatgcttaactgaaaccaataatatgaagggatggacattcgttgagcattgacggggccaattggcgcattcgacggaaagttgcggccgtcaaaatccaacacaatagtcgtgtccttgaacattggccaaatgttgagcacaatgaattccgaaattcgcacattttcagtgcgaatgaacaatgttgttgaacatgaggcgaagaaacggtaaaaacggcggacaaaagtgagcacattttggtcgaagtagctgaagatcagttaaatgtaatgcttaaaatcatctataaatttaatttttcactagataacaatgcttccgaatccgatgactttgttcggcaacggattttgtgggatcggcagcgattcccaattggaataattgacaattttcatttcttttgccccatttagaatttttattttgcccaatgtccatttgcgcgttttgaaatgttcgtcaacgaaatagtcaaatcggtggcttatcatcgcaatcagggatggacgaaatttcgtttcgttttcgtttcgtcctacattttcggcacttttttagtttcgttttcgttttcgtctaccaaagttttttcgtttcgttttcggttttcaaaattttgtttttcgtttcgtgtttcgttttcggtttttaaattttggattttcgtttcgtgtttcgttttcgtcagagcaaaattggacgaaaaagacgaaaatatttacacccttaagaatgacttttttggtaagaaaaaataagatatttcttgaagtattgtattaaatctgccaggaaattgtatgtaaagtttgaaatgttgataattttttctagagagcggcgacattcggcaaaaatacggatcaggatcagaactacggactaggcatccatacggactacagacttacggactaaaaacccttactccgtatagtacgtatgctggaaaaatacggacccgtatacggatcagggttttttgaaaagttttttaatcaataaaaaccatatttttttactaaaatactaatatagattcgttctaaattttactacgaattcaaatgaaatttacaaattggaaattaaatagaatttcataaaaaattgatcgctctttgtgtccggacgaaaggaagtgcgatatctttatttctcatttttctgcaattaattcgatctttgctgccccgcccctcttaatgtattcctcgcccattcacttcattcattcatatctctaataatgcaacaataaaaatttatatatttttgcctctgcaaaatatttgggaaaattcttgaataagaattttaaggcttttgaataacatcaaattctaggcccatgatttcagttgaaaacccttggggagagggaaattgctgctgacgttgtgccaacaccatcagggaagtcccatccctgaaaccctgatcaatcagcccatccgaatgatcagtccttaaaaatctaaggggaaaacatcattgatcaccattccatcggctgatcagtccctaatataaatgggacaaaatttctttaaggtatttcaatttcggctgtttagccactaatcatttcattttgggttttaatcattcatcatggctgttgagccctttcctcccaatttgcttccttttcgttactgcacacaaatacattgtcagttctgacaaccacatttttcatttattcgaaagcgtcattgtatgaagggcccgttttcgaaattaaactattgaaactgaggaaatgaaaaagcacacactctcgcttattaattataaagaatttttcatatggattttaaagtatcaaggataacttaaaataaaacaaacaaattattttcctcgtttaaaaattaaaaaaaaaataaaacttaaatatataaatttaatctcatttaaatgggttatcattcgtataagcgggtaatcacaaaataaagaattaacaaattcacaaatataaatacttaaaaagaaaacaaaaaaactcacgttaaactctgcgccaataacaatttgaatgttttaaactctaaataccaccaagtcaaagaacacagcgttcaacagcgcgagtaaagtcacccttcttaaaatattatttaccataaaaaagaaaagtaaagaaaatataaatttatattaatattccgatgataaaaaacatttttataatttgaattaattaattatatgaaacacgtaataaaatacaataattaaattcattgttttagtcaatttgcaaaaagtaaactaaataatttaagtaaaatttgatgaatgataaaaaaataataatttaagcgaaatgtataaatatcgatcaccattagaattttaaaaaatggaaaaaagtctaaaggtatatattaaataaatttaaataacaataaacttttttatcgaatatttataaaaacacgtgagaaatggtactcatggacttcataatctaagaatatggctaaaaacatg

SEQ ID NO: 10315 - DNA, 2319 bp, Heterodera glycines
  unsure (1)..(2319): unsure at all n locations
aacaatttcggagccgttgaacgagctacgccgatcagagaccaaatggcattggggacaacaacagcaaaaatcattcgaacagatcaaaattatgctgtcgtcgaacgagctgttgcccattttgatcccaaaaagccactttatctggcaacagacgcatctgactatggagttggagcgatccttttccacaaagatggaaacacaggaaagtttggcgtgatcgcatacgcctcaagaacattgagcccagccgaaagaaattatgcgcagatcgaaaaagaaggacgcgcagtaatcttcggcgtggagaaattcaaccagtacttgtacggtagaaaattcattctacagacggatcacgagcctttaaaaaggatttttggaccaaaaggtgaattgcccgtggttacggcacgacgacttcatcgttggagtttgaagctcatgaattatgagttcgaaatcgaatattgttcgacaaaaaatttcggttacgccgatggattgtcgcggttgcctagtccagaaattgatcaggtctgtaaggaaagtctcgagctgaacaaaatctagcaggagagccaaaacgctttgccgatcactgcgaaggacattgcgaaagaaattggcaatgatccggtcttcgcaaaagtaaaaggttttgtgctcaatggatggccaacaaggatagaagacgagaaaatcgcccattttttctggtaaaagacgaattggagctgaataacggatgcctaatgttgggatgtcggacagtgattccgagcaaattccgtgagaatcttttgaaattgatccacgagacgcatccaggaatcgtccgaatgaaggcattggccaggcaaaaagtttggtggccgggcatcgacaaagacattgaaagcatgaaaaagaagtgcaaaatttgtcaaacgaatgcgccggaaatgaggaaagaattgtgtctgacaacgggccgcaattcgcgtcaaaggagtttgaagaattctgctccaaacgcggaattgaacgaacgctgacggcaccataccacccgcagagtaatggggaagccgagcgttttgtccaaacattcaagaaaggaatgttgttggttaaaaaagaaaccaactgggacaatgaattggccatgaaccaattcttactcaaataccgagtaactcctcattctgcaacaggacgatctcctgcaaaaatgatgttcggcagaaagctgcgaacactgctcgacctcgtgcgcccgtccgaatcgaccaaaattgaaggaggagaagagaaggcaaaagaaaatgctgaaaagcatggccaaaaatatttggctcgcgccaaaaagaactttgatcgacggacgtggaaacgatcgtttaaaactggacaaagaatctttgccaggaattacagagacggttcgaagtggatggcaggccaaatcatgagccaaataagcccatcactgtttcttgtccgaacagcccgtgtggtctggaagcggcacttagatcagctgaaatcggacgagacgaagcctgatctggagagcaacaccgacgtggactcaacatcgtccataggtgatcagacggaggatgaaaaggacggaggacagcagacggacgtggaagaagagccgaacgatccgccaaatttgcacgatccgccattgagaagatcggtgcgcgaacgaaggccacgacagatcttcgaccccagcgcgtgatcgctgacttcagctggtggggaggagatgttgtgttcgttaattatttgaattaacgccaaaagatgctcgtttatcgatcatccttttgacccttcgtgttgtccatttaaaccccccttttcccccattccgtgcatttctccctcattcatttgttgtttccatttaattgtgacccgctccctcccttcgctatttattatatttatttgtgtggaataaatcaatattattccattgactgttgaacggacacaacacctttcgtctttgcgctcaaaatttccaactttttctcttgtctccaatcgcctgtgcacaattcaagagtggtgaaaaaatcgttgattttgtcccttccttcagtgccaaaaagagtaggaatttctctaaggacatttgcgtactgatttgaaagtgtgactttgtgaagttcaaggataatatcaggaattccctcggtgtatggcatcactcttgccatgttttgttgaaaattttggccctgcacttgttggtgaaccanaattttggtattgtccatccattttgtctcatatttggttcgggaattg

SEQ ID NO: 10316 - DNA, 1947 bp, Heterodera glycines
  unsure (1)..(1947): unsure at all n locations
acattcggccgcttcgcggcctcaggacgggcgcttcgcgccccgttgtaatntttgttgagaacattcggccgcttcgcggcatcaggacgggcggttcgcgcccgttttttaatttttttggagatattcggccgcttcgcggcctcaggacgggcgctcccacccctaagaatccccaataacactgggattctgaggtcttaaccatgtctaaagtaaaatctgattacatattcgtgatcagcggcccaaataacccctaaaatcatatttttggaagatttttggtgaaaaaaattttccactcaaaaatcatggtcacacccctgtggtcccaaattccaaaatcacttttatttctataacttttttcaaaaaagtgataaaaagctaaaataaaatttataaaatagagcaaaaaattgcggattttttgagtatattatttttataaaatactttttcataaccgagttcttaatttttttctgaaaaatcgaatttttccagaaattctggaataacttttttattttggaagatagaaattccaaatgaatctcataaaattctcctaattttttgctatttttcaaactacattccactaaatttgatcaaaaacgaagagagttatgaattttcgaaatttgactggattttccggggctcaaatttagacgatttttcaaaaatttgtaaccaccttccaaaaagtctgaaaccaaaaataaagtatatattcgtcttcagcaccataaattaggccataaaaatgcattttggctaatttaggagcaaaaaaatttttcatgaaatgcaaaaccatggggtcccccctttggttttgagtttcaaaatcacaattaattttataactttttttaaatttaagataaaaacatgagataaagcacattagattgggcttaaagttctctacaaaaaagctcttagacgattttttgataaaatcaactcctgacgagttattgcgccagaactgaaattgaggcctagcaaccaaaaattttctatttccaaaaaaaattttaaaaatttttctgaaattgacaccaatcgatagagcatgaaaaacggttgcttgaaagtggtctccgttttccccggaaaaatctgtaaaaaatcataaaattcaaaaacctcaaaagtgacgagggggcctagctcgaaaatttctgaaaatttcagaaatacaaaaacatggttggatagagctcgtcgagctgtacaaaaaagccgcttacaccgacctcctccctcaaaaccccgacgagttattccgccggcgctgaaatggccaaaaaagtaagcaatttttccacgactgtacacggaatacagtaggccgtagagaaaaatgattggaagcgaagttgtagggcacacttcaacttaaaatcctcccagcaagcattttttgatcaaagcaaaagaaaaaaatttcgtaacagtgagactgaaacgaaaagccgtttcagcgccgccggcgctcagttggccaccggaccggaatgcccatagttttcctggatgcgccgtcaaaagttgcccccaaggtcaaaatctcgaacccctcccgccagcggttcccgagatttttgttttagcaatgaaactcgatgttgctttagttatatataaatgacgggggcggcgtaggccgttgggttttggatgaagagaaaatggacatgctcatttgttattttaaacagacaaacattaattgcattagtgtgaagttttaaagcgctatcgcgctatgggacgcggcttcgccgcgtcgctagaaagtgatgtaatttagcaattcatcgcagcctcaggacgggcgctcgcgcccgtttttttaattttttgagggtaattctgccgcttcgcggtctcaggaagggaaattcgcgcccgttttttattttt

SEQ ID NO: 10317 - DNA, 1248 bp, Heterodera glycines
aattttaagctatcgattatttatacataaatacaaaatttgaatctatttctttgtaattgattattaacttaattgattcaattttatgtggctctgctgtgcaatgaattggcgtgccaattagcaacgctaattagttgaattgttggcgtttgaaataattgaccactagcgctgatggtattgttgccagcagaagataaattgccgagtccaacaagagaggaaaatttcttcaattcaactagcaaatgcctcgcgatactgtgaactaaaaaaagacatcaagacggtcgcttcgcgcccgtttttaatgttattaagaacattcggccgcttcgcggctcagacgggcgcttcgcgcccgttttttaaatttagttggggccagacgggcgcttcacgcccgtttttcaaattttgttgggcttgggcgggcgcttcgcgaccgttttttaaatttgtttgggccagacgggcgcttcgcgcccgttttttaaatttgtttgggccagacgggcgcttcgcgcccgttttttaaattttgttggggacagacgggcgcttcacgcccgtttttcaaattttgttgggctaggacggactcttcgcgaccgttttttaaatttgtttgagccagacgggcgcttcgcgcccgtttttcaaattttgttgggctcggacggacgcttcgcgatcgttttttaaatttgtttgggccagacgggcgcttcgcgcccgttttttaggggtacaacagtgattagaagaggtgcaacagtgattcattaaattaaaatgaaaatattttttaacaaatttaattaaaaaaatacatgaaattctatcaattaaaaaataattaatttaaacttataaaatttatttatcaaaaaaaattaaatataattttttatttattaactcaacaaaatattttaaattaattaaaatcattgaaaataacgtaaaaagtcatagaaaaataatttacaccgtccggatccgaacctgccccctcccccctcaaaatgatgcctcagaatccccaatcacacagggattctgaggtcttgacgatgtcaaaagtaaaatctgatcacgtattcgtgatcagcgtcataaaatagccctaatgacatgtttttggaagatttttgtcaaaaaaattttttcactcaaaaatcctggtcacacccctgtggtcccaaattccaaaatcacttttatttctataactttttt

SEQ ID NO: 10318 - DNA, 5031 bp, Heterodera glycines
ataatggtacggtaatagcggtattgccaatttttttggaggaattgccctaacttttaacagtcctataaaatatttatatttttacatacggttatgaataccatcataagggatgtcttcgggacattgccacagaacgtcttgagattttggtattattatttttggtgtcttaaccgggtacggtgtgaaataattaacctagaattaaaatttggaagagattttaagttatattaccgatggatataatgagactatgtcggctatatttatttcactgttttcagaaatctttgaatataaacaaaacgcttgcgttcgcccacccgcaaaagcatcccgggggtcgattggtcctaaatatttgctaaattgctttttgttttgattaccccacccttatcgggaatagaatcgaaatatttcttcatttctatgtcataattttcattatcacgtggattgagctttcgtaggacctcacattcctaagaaatattaatcaaaaaatcgttaatttgtactgacccatatttcctccacccgtattccaaaattattgcatatttttctaagtttaaacattcggttttttgtccttacaaaattttcttccatagttttaccattgggcccaatttgaaaaggtttgaaacattttttacatccttaatatacatatttaccaaaaattttgatataacaaaccgtgaaaagcacatccctaaaattatcattcttttccataaaatatatttattaacctggaattcgattatggttttgaatttcccacaaataaaatcaactttgaactcttaattttaaaattattttgtgattttaattactaagacctcctatattaatctcccccccgttagctgcgtgtctccctttaacacaatgtttatgcatataatattcaaagtattttattgcaatcatgctttgggtgttatgtttttcaaaccctccctcagggaccatagctaggtgtttttcctttaaaaatttagccctgtaaatttttatcgccgctcctgcgattgtcgtactgtccttaatatggcataaatgataactgaaaatgtaaattaccttaaaaacatcataaccgttaggggtttccgagtcttttgttatttcaataaaaatttttcgcatactcagtatcgattttaataaaatttcagtatcctgtccgcaataaatttgtaattgttcctctaaattaaattttttcaaaagttcgcttattttatagtacctaacaaaaaggggatttttttgtttttttggtaccattctttgaatctttcaaattcgtcatctttcatgctttcagggcaataatcttccataggtggaagggtcgggagtaattttcctaaaataaattatagaagaattataattaaaaaatttaccataatttctttctgaattgtatttatgaggaaaaaacaatttaggtgtacagtctaaaccgaacgtttttggaaggtgtgacaatttattttgagccattagccaaaaatctctaaaatagatttgcccaatttttatttggtaaattttcaagtctgaaattattaattctggtgtgtgtcccaactccgttaaaccccttaatataaaatgggtatcgtatcgacctttaaaaatctttttatattagatacattaaaatatattaccggcaaaatgagcataacagtaggtctcatagtttttaagtgatagaacccatttcaaaaattcaaaaactggatttactctgtttacagtacaccaagtgtggtgccgaattccacctggcccacaaatgtcacaattttctattttgccttcacaatcgctacatgtaaacctggctgacaaaaaaacaactttatgttcatagaattctgttttttggttatcaaccagattatcagcctgtaaatattctatatcaaaaaattataatattttatatatcataccgaacactcaatatcgtaggatataattctatattttggtaaactttttggtattataatttttttaatgtaacaacattccgttttggggtgtcttattttacaaactctgcagaattttgatcctaaaaatcgaaataacaaattattagattgtgtgttaataccgcatatatgcatatcccttatgcaataatcgttatcacattgtatacaccgtctatagtatttgcaggccaatttaaaatgattttgatagcaaaaatcattgaaaaaatatctattgcatattaagcattcttttggctgtattttttcgtttttacatggaaattttgtacctgaattttttgtaaattttattttcctttttttttcattaccccatccgccacatcgttgacattttattacacaattaacagaatgtttaattttttcacgaaatgtctgctcgcaatatatacaataatagtgtttaatattaaaaaattgtttaacgctttttaaacctaaaattttttaaaaacgattttttatattaatttaccgtcccagtgcccattttcgagaaaaatacaaattatatatttttttggtccttgtcctttaaatatgggttttaaaccattttcctaaaatacttgattgttatttctcaaattttcttttttacctttgaaaatgctgcgactaaaaaatttccgggaaattctcgatcaaaaaaatcttgaacaattgaaagatcttctaccccataggacgttttgtttggatcaatttttgtgttttgaattaattcatcgacgtaatttttttgccttttctggttattatagatttttcggaattgtgcatatgatatccgaaattgctcttctgccccaattatttgataaaatttactcaatattatactataaaaaagacaataattatctgtattttggacagataatctcccgttctcttttggcgggaaaaaattaaacacatttaaattataacctaaaaaaattttttttaatctatgattttttatttaccggatcccgtgggggctgagtaggttgtgattattattgtaatttcctcgtttaacaggtcgatttcggcaaaactttgttgtatgtggtaaaaagactcgaggacgacgtctggattattttgcaccatatctctgggtggtattattaatgggtcattcaaagcttcacaataaaggtcatacgatattttttcaattttaaaatttttttcatttttttctatagcttttttggttaggtattgaattatttttttgaaatttttttttgagttttcttcagtatttttgaatatgaacctagtcgtgttttctctcagaccgaattttttattttctcttattgtgttggatatttcggtgtaaaaatttgattctgggatatccttacgttttgcaaaataattttttttattcctcacttgccttttttcttttgggatttttaaaaaggctttgttttccatcgtatcttgaatttacaaaaaattaaatgatcatataacaaagtaatattggatcaaaaacaaaattaatcagagaatagactacttatttttataactttatatacataaccggggatgttattacgaaagtctgaaatggcgggctgagcttaaaagagggtgaaaaatgatgacaaaaaggcgacacgtaattaggtgggaataggattgtcgaagggggtctgttgtgtcggcgcccaaaacgtctccaggaaaaatgcgtttacagctcaatggtgacaaaatgcagccaaaaagtaattaaatagcatcctacccataaatccaccattttggtggaatatttgcacatgagttttttaatgttccctaccccaaaccaccgccccgtccattatcgctaatcttacctaaactttattttatatgccaaaaatatttaacagtaaaagatcaattttccgaagagatctgtgattttcccaaaaaaaaatcctcaaaatcatgctccaacacccggcggcggcggctgtggtgggtcgtggtcccagttctgaaatctgtgcgccgcaggttcatcttcctctgggacgacctcgagaagttgacgacgacgcctcaggcgcgggtccctcagtgccactaaaaatgaaaaaaatgagtgttttttaaacattttttcgcaccgccaggggttggcggacgcacaggccaacgaccgttacgctgctgcgggtgggcgcgatgcgcttcaaaaacacctctcaatggcctgtagttcacttcacccatgagtgggcgcggtgctccctgtggcgccatcggtggcattccgaccgcaaaatgctggtgctcccccggcgccattcccacaacaagtggtgggggtgcggctgggggcatcccaacggcaaaatgctgtggcgctccaggaccaattccggcgacaaaatgctggggcgcaaccggcgccatgccaaccgcaaaaagcgggggcgcgcccgccccccatgccggccacaaaatgcggaggagctccaggcccaattctggcgacaaaatgcgggggcactccagggcccatgccagccccaaaaggaggttgtactccagggcccatgccggcgacgaaaggtgggggcactccagggcctatgccggcgacgaaaggtgggggcactccagggcccatgccggccacaaaaggtgggggcgctcccggccttatgtatttagcccaataatagtcgaaaatcttagccaaaattctgaactctccaaatttaattaagcccgttaataatttaaaacatttttaaacgattacccggcatcgggtggtcggcgtgcaccaattcctcatccggcggctcaattttgacatcgggtgattcagcaactacgttttggccgataaaatcacggcgccaggcactaaaaataaataaataaattgaaaattgttggatttcttacttaaaagcctctaaaatttcggggtcatagggtacagcccctt

SEQ ID NO: 10319 - DNA, 312 bp, Heterodera glycines
gggggtataggttcgcgaatgaccgttgaaaaataaacgatatagaaaacgcccttgaaaagtgccagtgaagtgagcttggggaaggggggtgacaaaaatcgttttgccaccaaaaattatggaatagactttgcagaaaatgtttgggttagaaaaagtttttaaaatttgacattaagtgaaaaacatttgcattaattttctcggtttaaatagcaggcgaaaatggggcgtgacttatggtgtcaagcacaattgtcatgcgacacgcctatttcgaaatgttagtcatgtgaccgatattcgcaa

SEQ ID NO: 10320 - DNA, 5476 bp, Heterodera glycines
  unsure (1)..(5476): unsure at all n locations
tttagattagaagcttttttaaaaaaactcaatgtgtaaaataatttnntagaagagacngctgacgaaaaaaacattatgcatgatggaaaaagtgggcgccgcaactggacaatgtacgatacggtaaatgatcaaattaataattaatattntaatttttaattatttcttaattggtccagcattctctctacggctggtcagaaatggtcgccacacaaaaagcgttgcgcgtctcaactggcaaacgcggctcactcacttctcgttcaacatttccagtatgcactggaaaataattaaacacattaatataggatatattttgcagatatgtctttttgctaatttcttatttgtaaaacgcacgaaaaacaatttttttaaatttcaaatgctagcttttttgttcttgcattttgaaattttggtcactaatgcccggtctggattttctgaaagtttcttaatataacgtataaaatgaaaatacccctaaaaattttgcaaaaatacttttttaaatgtgaccttgaaaaaaatatatatttttttaaacacacccgttaaaaactggaaatttttcacaaaaattcacctcctaaattttttctctcaatttagaattttatgaaattgatttaatttcttccgtagttttttttatcatcattgccattttcagaaaatatttgaattaacaaacagcaaatattttaatttctaagttcaaagctagcgcaaattttaacaaagatttttggaaatatattacaaatttctatattataaatatgcttttaaattaacaataaagataaattaattcctcaattttcagtcatctggccattacggtggccattggcttggtgacaaccaatcccgatggcctgatctccggctgtcaataatcggggtcatggagttcaacatgtttggcatcccacaagttggcgccgatgtttgcgggttcatcggagactcaaatgaagtgagaaaaataggataaagcttatgttatatatattttttaatgattttaattaaacaaatttttattaaggaactttgtcttcgatggcaacagcttggagctttccattcttattaccggtcaaaataattaaatttaacaataataataatttaaataatctattttattgttcccattttagcaatcacaatgatgttaattcaaaagttagccaagatccggcacagtggaaatccgtggcaacagcaacacgcggttatttgaaaatggggttgctccccgtccttcagggagagaaaattcggggatcggggcggacattccccgtcaaaaaatgccgggtatggcttgagaaatttcaaaaataccggagagcaacgctttttcgggaaggaaattttcataaaaaaatacgaattttatcgacgacattcgcaatcctccgaatcgggtcggggagcattcctaatttggggaaataatgtttaacatttaattcttttaataattgtttagttgcgaacttattccgatatcgtcatcttccttatttgtataggtaaaaaaagaaaaatatatataaaaatattttataaaatatttttaaaataaatactaaaaaggtaaaatctaagaatagaactaacttaaaaatattaataaagtttctcatcatatatttgccattttgaatgtaatttataatttgtcaatattctttatacagtctccatttccgcgcttcactgtacggtggtacggtaattcgaccactgttctttgaattcccatcggacaccaacacacacactttgaatttccaattcatgtggggcccagcaatggtcattgtgcctgtcgtgaatccggtgggatttatttttatttttattaattaaatttttttattcgagttggcatcgcctgtcaatagtaaaattaaaaggcccaaatttgaacccattttacataatgcattttatttaaagcttttttgcaatttaaatgcgataaaattaaaagaaaaatgataaatgaatgaaaaaatgagtcaaaagatgaacttattcaatatttagcttatgcaatcactaaaaaaatcaaaattattaaaaaatatatttcattttctgccaatattctaaaatgatttatttttatttcaagtaaattattattttttattatcacagtacatgaaaaatttgtattcaatttttttttgaatttaattagaaatttatattcttctggtttccaaataaattcgtatttatttgtaaaaaaatattttttttaaattaaattttttcttttatatatttttaaaattatatttaaattatttatttcttttttttccttttttaatggcttttaattaaaaattactctaaaaatttcatttttaagaatgttgattctgtccatggttatttgcctgtcaacgaaacttggtattcgatgagtgaagcacatgagtacagtgcgcgcattatgccaggattttcaacattcaaagcgccaagagacacgccgttgccaacctttttgaggggttggatatataaaaaaataatttatttttaaatgataaaatattttaaaatttttaggcggtcatattattccaagacaagagcccgatttgaccaccactgcttcacgcaaaaagccattccaacttctgatcgggttaagtaagtataaattcttccgataggtttaaacttctgaatgcactttggacatccaaatttttacatttttggtatcttccgatagctataagtattctcttatagaatataaaatttaaaattcaacaaatataaaaaattttatagttaaatttaaaaaaaaaattccttacgattttccgacattttcggcacccattcaaagcgccaattgcggcgcagacatttgaggcgtcctcctaattactgagcagaattaattggcctttaaattaaccgccttttattttcctttcaaaaaaaaggtgtcttttttcaacatttattattcgtgttataatttttttaaactattctattagataattctttgagatattgaaagtggcaagaatatgtaattttgtcgacagtcgctatggaaaaaaagaaataaaaaattaattaaattcagaatttaaataagaaatgaaaattggcatttcattccagagccacttgcttgcccgtgcaaattggtcgccgctggggaaatgttttgggatgacggcgaaacaattgtggacgatttcggcaaccattcgtactatcgttttgagtttagcaccaccgcaacgcacaattggacaacaattgttgtgaatcggacgcacaattcaagcgaagtaatttattaaaacgtgccaaattttgtggctttttcggttttattcttataggtgatttgggccaaattagtcactacagccaaaatttgtcacctctggctttaaatttttatttgttatttgtcaagtaaaattttaaaaatccaaggacccattgccaagcttggaccaaattgtcattcttggccacaattttacgcccaatttggacacggcaacattgaacggcatcccaatcaaactgtcggctgactttgtgccggaaaaaggtgctctccgagtggaaagtgccagactcatccgtctggacgatgccaacacggctgtatggacactcagctggcagaatggacacaaagatgatgatggcggacatgctgaaggcagtggtgccaaccgtgaattgtcatttatgatcgctatttatttggccgccacattcaccacggcattggcattaattggtcactggcagtaatggcatttctgatttagcagattaatacttctaagatttttttttattattatttatatgaaattgttttttattatcatttatgcaaaaaacggacgaagaaaataaatttttaaaaatattttatcctattaacctttcccgaaatttatttgtgtaaattttttgaaattcaaaatccgtctcctgcaatttttaatgcgggattgtagggtttgtccgacaaaaatttgaattccatcctgtaacttgatccgctaattttaattttcctgtctctagtctccgtttatgagccgaaaaatttatatgtttttaaataattgaaaattattagaagaaatataatgtctttagatttcccggaaatatgtatttgtttctttgccattgattacggctgatgtagaataacattataaaagagcattataatgttattttttagttgacataaattttaaattacttttttcaaagaagtgaaattttgagctttgtttcacaaattttctcaggaattttttggtaaaattataaaattttcttcaaatttgtttataaaaatgggtaatatttgacaaaataaaacaaaagaaaacacaattaaaatgaattttgctcggccataaatcgtagatgacggagccgtaatttattataatttttaaatttaaatttttgaatttttcctattccaagggctagcaaagagacacaagtacagaatattgccggttctgatcgaatcaatggtgaaaaagaaatgaatgaacaattaatacaaatagagagatacttaacctaattaatgcaagcataatcattttatatttaaagataaaaatttttcatttaagaagcacatttttagctttataaaaataaagacaataatgttagcttttaaaatcaacgtaaaaagccataatccgtgcttcctacctaaaaaaatccgtgcccggctccgggcgtgacccaaaattggcaaaacaaatttccagagactcaagacttgattaggagaaatgagttgattatttttgggggctgaaataccgatgaattggcctcgtcgataatgaaaatgccttcttattcggtttctaattaattgctgtggggcttaaatatcgatgatctggcacgtcgattataaaatatgtgaaaaatgccagggaattggattgacatatgcgtaggaggcccactttggcacaaaaaaaaggataatgaaggggaaaaattggagtaagtgaatgaatatgtcaatggaaaaggcaaaataattgcttcctatttaaaaaaatttttgtcataaaaagagcatcaagaaaaactaaattatagattttattctttattttggataaatttcggaatcaaaatccctttttccgttgtatattttttattgcattatttaggacaattttttaaattaattttattaatcataaatttctactttattcaacactttagagaatatgaaaattgaaaatgctttgccacaaattctttagattttgtgcatcgttcttcggaaacggcacctcccaaaaatgcaattgaagaacagtatactgtagaataaaaaaacatttgaattccgaccaaactgtga

SEQ ID NO: 10321 - DNA, 1909 bp, Heterodera glycines
  unsure (1)..(1909): unsure at all n locations
tattatataaataccttttttcagcctatccctttgcctactattcgcttgccaacacatttttgggccgttttttcgcgctccaacaaaaccgggaagatgatttggtgggtgaaacgggcaagaattaaacaaaatgctaaatttttaatcattaaatacccccaataattcattaaagacgcttgcgttgaacgcgtttgcttccgctttgaaaatgccgaaaatgatgctgcaaaatgccgccgttgcctcggatttaaatgaagacaaaaatgacacaacaaaagcaaaacagcagcaagtgccacgcccgttcatcagcccggacctgcacttgaattacggcatcgcactttactacgcgtgggtatttttttcttggaatttatttataaaaaactaattatttgcaacaaaaaaaaaagatttctcgggggtgggaacgaagtgcatccttcaaattcactaaaaaattttgcgtctgttaggcatcgccggcaatttttttttttaatttttcaaacagaaggtttaaaaaaaagtcgatagaaaattttcagacttttttcacgcttaaaaaaaaattgtaatataagttaaaaaatcaaaaaacgtggttggttgggtgggggcgggggacgttcgaaactcgtcccattttttggcaaaaattttccgataccctttaaaaatgctgtatggtacatgtttcagtcaattttatgcaaaagcgttggcccagtttcgacgtgcgctggccattgagccccattttggacaggccaaacaccaattggacagtgcccgccaatttctgttcgccctgcgtgacggactgcacaaaaagggtaaaaattgtgaaaaatttaaaatttctcattcgaatttcccaagggacagactctgaaatttttatccccccccccccccaattttacaaaatttctaatttcggcgctataaaatttttttgcagttttattcaaaaaattttagcctaaaatgattaatttattaggaaatttttgtgtcatttttgaaaaagaattgtactcaaaaaaaaaatactttccaaaaaaaaaattattattttttattatttcacatgccattgaatgcgccaaattaattataattaattatgcctgacatttttttaaatgtggtacaattaagggaacatcgcaaagcgtcgcctgcgcactctcctcgacacattccctttaaaagcggcgactctgatggcggagcaacactttgtgatgcgtatgaagccggcacgggttgggttttcatagatttttttcaaaaaaaaaaattcgtaaaattgccagaccttggccatctgttcaacgcttgacgatttgattgccacctcttccaccgccaattacattggtctttcactgtctgcggttgcttccgccgcgcccgccattgtggcatcggtgaccgtccgttgtgtaggcgttgtgagcaatgaggaaaaaattccgaggcaaataaaaatttgtaaaattttgcgaaaaaatttgtatgaaatttgacattttttggcatggcatgggaaaatgtacaaaaggcacaaaccaaaaaaaaacttttaaataatgtataaacataaattcgtgtttttttggaattttcgatttttaatgaaaaaattgcctaaacttttttaggtactttccttttttgggtggcatgaaaaaaaaaatcggcaaaaatgcgcgaaaattcacaaaagcgagtacaacaattattgttttgggacgacagaaatgtgacaattgtttccataaaatcttgttaaatggatcagtttgagaatatattcattgaatgaatgcctttttgttgcttttttttaaattttggtatttgcccccanaaaaaatggaaaata

SEQ ID NO: 10322 - DNA, 3164 bp, Heterodera glycines
  unsure (1)..(3164): unsure at all n locations
tttttattttaaaaaataaataaaattatttaaatagtaatgtaagtaagtaaacaaattttatttccccaggatttgggattggacgacgacgacaggaagatgaaggagtgcagcagaagcaaagatggaggaggagcaggagttgacaaaccagcagttgttgttgttgtttctgttgacggagacgacgtcgaagcgaaaagtgctgctgctgttgccaataaaaccgcggaaaatcaccaaaagaacgacgacgatgccgagcagtgtctgttgatgatccgtgtcatcaatccatcggtgaacaaattaataattaaaataaaaatggaaataatatatatatatatatatatatattgtctaaaatttttttgtgtttgtttccattggtttgtgagtgtctctcccaaacatggagaagttcaacccccccccccccgaaaaatttttttaaataagaaaaaccataaataatttagggtttacatactagaaaaaattttaattttttttttgattttgtttttattgcaatttaaataaataaataatttgaatttgttaaaatgtttgaaatacccagtttaacattataatataacaataaatttaatccaaatatttaaaaatgaatttttgttggagcgaatgggattaatgggcgccaccgctaattgactcccccgccccatctgatttaagcgccaactgctgaagaatgggaagccgctgagttcgttggactgcgcttttgcggcaatgtcaatcgaaacgcagcaaatgcaaatgggcagtcgcgcgagggccgaataaaatttcagaaaaaagaaaaatggcacaaaaataaatggcacaattcgacgaatttgacaaaaatttaattttcacttgctttaaactaaggggagaaggacaccatcaccaccaatttatcattattattatttctcgctttacatttttatttttatttgttttaaatgctttttatttaagagagcgtataaatattaatgaacatttaaaattccgtttgtttatttatttctttaattcattttttaatattaaacaaaaaaaaagtggaaatgaaattttttgtgcttctttaagtcaggctctctctctcccctgaaaaattaaaaattgagaatttcaaaagaaaaagaatttcaaaaaaaataaaagaaagcaaagcctaaaattaaaaaaaattgtcaaaaaaataaaagaaagcaaagccaaaatttaaaaaaaaattttaatttttttttattttaaaaagtaaattttgtataaaatcattaatttattccttatttaaaaaaagtacattttatataaaaatgatcaatttactcccagatcttttcttttgttttctccagacaaacacttttttccaccctcatttcccgcctaacaaattgctaaattccttcctgctgatgaacccaagaagcttggaagcgatggattaatgggtcacgtttcatttcatttcttcgtctccccccccccccgcgcggaaatcgaaaaatgtttaattttcggattaaaattttatttattttttctttttttttaatttgtctgcccccccccccctttccgtgcccttcatttttttccgtccccattttcccaccgtttcatctgctgatcggtgccatggcaaaaaactttgctggggcccaccaattttatttgctttgcggacggcattagcgtttcgctttgggtttcaatttcaggggcctgggaatggaaaagaattttttattttttggttttttgtttttcttgcaaaaagttttggactctgtgccgttgggaaaaatcgaattttcttaccaaaaacttggcattttcaagcattgaatttaaaaattgccctcctctgttctttgccatgcaatttaaagaactttttaaattttcaacccaaaacttggcatttttctctgccatggattttaaaattgccctcctctcttctttgccatggaatttaaaagggccacaaatttgataatccgatttaaaactataaaatgcgaagtttgtgctttgtaccctccgtgcgtgttctgctgttcaaatttgtttgattttattaattacaataattcagctttaaataaggctctccaaacttttttgtttatttaaaataattagtggcttcattttaagaattttcccataaaaagttttattttcaaaaaaaaaattacagcgatgtttctttaatccaaaaatgaccaattttgcgcggttttgagtcaaatgtttaggtgccgttaggcacagtcgggaaaatttaaaaaagattaaataaggaaactctgccctgaaatttaacaataatatctgctcgagaccgaaaatttctcgagccgagaccccataaatccgagacttatctcgaggacgagattctcgagcagtacagcacaaatccctggctccgttcatgtcacttgcggcgcttccccaatagttaagcgagcgctttttcaatttttatccccaaaatgatttgcggggtgccgttttttgtcgaccatttgtctcatttttttgataagtcatttcggtcgaccatttgtctgatttttttttgggattggctgtttctgtcgtcctttctttttcattttattgttgcgtaacacatatattttggcggggtccggacaatttgtcagtggacaatccaccaatagacaatacgtcagtgaaggacaaaccgtcagtaatggacaatccgtcagtggacaattcgtttcgtcagcaaattttattttattttgagcaatgatcaaaaattttgcgattgcgattgttccattattcctaagctttgggcttaggcttaggcttaggctttcctgggccaggactaggcttaaacttaattttgtaatttattaggcacccgataatcttgagatcattattttacactaatgttattattgcaaataaactgacatcaaaaacaaaaggaaactattacatacattctcaattacnattccaacaaattttaattcntcaaattnctcattaaagaattttattccatttanaaaaaaaacatttcgccagggggggggtaattaaaatagccacatgattttattgaatattaa

SEQ ID NO: 10323 - DNA, 1271 bp, Heterodera glycines
gtcagcaaatttttattttattttgagcaatgattcaaaaatttttgcggatgcggattgttccaatagggcctaagctttgggctttaggcttaggcttaaggctttcccgggcccaaggactaggcttaggcttaattttgtaatttattaggcgccggagggtcttgagatcattattttacactggtgttattattgcaaataaactgacatcattaacaaaaggaaactgttacatacattgtcaattgcgattccaacaaattttaattcgtcaaattactcattttttaattttattccatttggaattgaaacttttcataaatataaaaaaattaaaatagccaatgattttgttgaatattaagtaaatttttttattgaaatgcaaaaaatctaaacgcttttgataaaaaatcgtaggaaaaaggtagatttttggtttttgcactttttgtcaccatgatttcggcacacgatttttcggcattttgtcgctttttccgtcggcattttgtccccattttttctgtgcgtgccattctttcgtttcgtttgccattgtttgattttatttgaacaaatttttcttttttcatctcgcgtcatttcaatttgtgcgctaaaattcattgtccacaacaccaccactaataaattgtcccaacaaatttgtgcccccggggggtgcgggagggcgtcaccgatgggcgggcacaaacattggagagcccagcgcaccgtcaccgcttctcccattacgccgcacaaatttcaattgctttgtgctgcttgtacaagcattttgtgtttggtttgggcatggcatttctttcctgctccgctggctttggcatgtgccaaatttgtgaatgaaattcaacgcgcaccgccgccggtgctttttgcattaaaagcgccgcccctggggggccaactgcagtattttgtgctttgatgaagccgctgcctcaaaaatttgtccccttcggggcattgttaatatagcacacgcacaaagtcagcacaccatttttgcgttttataattattagctgtaattataattattattaaggttggaaattattgatttaattgggctaaggcacagtcttttccattttccccccaaaaatttagtccatggaagttagggcttacaaaactagcaaaaaaataaatcatttaataatcaaaataagaaaacaatatttgaacaattttttggagcaaaatttgggccagcaattaatttatgaaaa

SEQ ID NO: 10324 - DNA, 2580 bp, Heterodera glycines
attttctcagttccaccgaccaacgtgtccgttgttcgctcattctttcgtcaagtgcttccactagcaacaatcacgcaagaatcgccttacctatttcgactgtacagtgacaatttgtggacagatttatcacggatctacctttatctcgaactgtcaattgaaaaaccgggagcaaacgataaatgggttacgatagatgatgcggatactggtgtctctgccattcaaggaatagggcaaacatttgtccagcaactaaaagttacggttggcaacacggaagtgtacgatagcggaaatctgtacccattcaaagcgtatatcaccaatgagttgagctttccaataaatgccaagaaaaattttcttggttcaacagggtattattacaccgtaaaccaagatgagtcaacagacgaggggttcaaagaacgttgtaagatcttaagggtggaaaaaatgcgcaattcctctcccgtctcgactttgatttgggaaaccaggagctttatctcttaaacaatttggatttgctgttcacaatttacaaagccaaagatgtctttctcttgcaaactttaaaagccaacgattcaaccaaatatcgtttgacagttcacgatgtcaagatttatgccaaaatggttgaggtacaaccttcactaaacatgagcctttacaaatagttggaaattcagcatttcacggcgactacaaactgagtccattcatgtttgagccgtttgatttgcgtgaaatttcggtacatgccggtggggtggtctacccagctgttccttataaactaaatttttcaaaggatcactttgtcagtgcctttgttgacatgtatgaggcactcggaatggccaattcagaacgttcatttgacatttcaatgacccagttcaagaaaggatggaccttttttctgatcccattgacatccacgcttgacgacagctgtggatttgagctgttgagaagcggtacgacaaacgtacgagcaacattcaattcaccaattcccttggtggcgtggagatgattgtcttgggtgaattcgaccaaatgattatggttgattataatcggcacattgtgaccgactcaaagcttggataaaatataaataaataaaaatgaaaaatattattatataatgttaaaatgaataacaccaatacaacaaaacccaacatacaaattttgaattccccagaagagcctaatgaaactcttttacatgtactacttttttcgcattatcttcttgcatttccggtgtttttgcttatttggttcgttttaattcggtggcttaaaagtcacggtcacttaacgcccagcgaggcagagacagtaatgcatgagatgaaaaatatcccccgacacccaccaatatttttcgcaacaaaatgatgcaagattagagaaaactgacagtgaactctctctctctctcttcagtatgaccaaatcgataatgagtcatgctggcggaggattctcaaagcgactcattttttttcatctttcattttacaaaaatgcctccaaatgaaaattctgaccgtccctttcaacaacccgacaatgttcaaccaaatcaacaaccgcatcaacaacaaccagatgaagacaccgagttgcgtgcacaaattgaagacgcggaggaggatttgctcttgaattggtggcgtgaagacccaacaattgtaagctttttttttcaatttagcatagttttttttaatttcatcacatttttcagattcgttttctttttggacacagacgcgcccctgcaatcgaagctgcgcttcgtcaacgcgctgaacgtgaggccgagatcttgcgccaatatgccgagaatcagcaatgagaagtgaccgatcaaaataaatgtcgtatgtttttccatttttttattatggttataaatttttattaaaaatattttgcaaagtgcggagctgagggaggggtgctgggggggggggggtcttcaaataaaaaaaaaatccgcgtcggagcacaaggtcaaaaggataaaacttgcgcaccccttgtccgattgacttcaaattttataggccttcattccactatccccataagctgaacggcaaaagaatttcgcctcaggcaccattttaagcggagttttcccgacgccccgccccctcgcgcacccccgagactcgcgcagcaaaactcgcgcaccccttgtccgattgacttcaaattttataggccttcattccaccaccccctaagctgaacggcgaaagaatttcgcctcaggcaccattttaagcggagttttcccgacgccccgccccctcgcgcacccccgagactcgcgcagcaaaactcgcgcaccctttgtccgattcacttcaaattttgcaggccatcattccaccacccccataagctgaacggccaaagaatttcgtctctagcaccattttaggcggagttttcccgacgccccaccccctcgcgcatgcgcagcaaaactcgcgcaccccttgtccgattgacttcaaattttacgggccgtcaatc

SEQ ID NO: 10325 - DNA, 2257 bp, Heterodera glycines
  unsure (1)..(2257): unsure at all n locations
atcaatcgacccaatggatgaggagcacatactcatcacctatctccacaaaaaggactgggtggatgagcatgcctgctcnaacattggtgaggcacacncacatttcctgctaattgatgcttcagtcatttctctgtggacaacatctgctgcgcgcctcgtgctgctcaaagccatgcagaaggtggtcagatcgccgggatctgagctgttgtacacgggtaatgcaacaatgcacaaaaaaaccgatgatgaaatcaaattattttagacactgacagcctcattctggtccacccggaggagcggtgcccactgaaaactggcacccacctgggtcagttcacggacgagtacccagaccacgacattgtggaattttgcagtggtggggcaaaacaagtaaagttaccatctgtgcaaattgtttttttaatttttccgcgctttagtacggcctgtgtctgcgacgcaagggcgcggaggcgggagcccaaatggaccatgtgctcaaagtgcgcggactgacgctgaattatgatgtgatcaacaaccaagggatgcgctatgagaacttcaaagaggaggtggtccggtacgcgacaagtggtgaatacgagccgataatagtcacgtacccaaatttccttcgacctaacatcagggagggaggccgagtcgtttccatgcctatgcaaaagtgctatcgtccgtttgtgggaaagggcataataggcgctgatttcaatgtgctgaattttggacacacaccgtaatttattgtacattgtctctctctctctctctctctctctcacacacacacacgactattcttttgtacctcttgtgtacattttataccattttattcgtttttaataaaaattaatgcataattaaagaattgaagataaagttttaaaataattaagcattagaagaagtcaattttaggtagaaaaatgcacaattaagcaagcgaagatgcaatctatattgaaaatgaggaatggaaaatacattaaaatatgtgggtagaaaattgcacagtttcaccagtaggatgatgatggtgcagcatcttgactgcactcattacgcccaatgtccatgtcatcgtcctccagtattaggcgcagtgatgtgtggtgcgacgatgagtttgaagcggattgtttgtcattgttgtcaatttcggtgaaaagattgcccaaccaattgttgttgtcgatgtccatgttgtcatcaatcagctcaagcagctccatagggtagtgtcggtcctcccctcccccggaaaagcgttcaacaatgcacggtacataagggaggtgaagctttattctgtggcgggcgtaaaaatgcgccgccacattgatgttgaacgggttgcgcaagtggccataagcgggaagaaacgctgcgccttgtgccgaaatcccagcaatgaagaaggttttggtcagcccgttacggtcattgtaggtggtgcgcactttgcgcccaataaggtgtttcagcacaagcgcccggtcctcggggtggttgagccggtctcgcaacaatttgacagggcatttgagcagctggccgcaaaatacgcttacgagaaccattgcaggagaaaatgaaagtcagatgtggatgggtttcacttttatatccggaaaagggatgccacgcctactccaaactttgccgaggaggcacacccactcccaaccaacatatttcatctggccaaaactcaaattcatttcaccaattttttccaaaatgaagagacgcgttgctactcttactgctacttctgctgagcaacacctaataatcaatcccgagccaaaaccacagaatgagaccctgaaaaatgttgagccgaaggacgagtaggcaaccaagaaacgcaaagtggaggaccgagagttgtggaagttggcaaagggcaaatttttgctggcgacctacttgtgtcccggtaaccaacaacaaaaattattacatttttttaattgattaattttgagatgattggaatcgactgttcaacaatcaacagaaggtgaaacgtgtggagggcgatcgtgtttgcttcagctttgaactgtgtgaggagtgcgcattggtcaattgccgcgcaacggacctgctggctccgatgaaaaaaagacccaaaaatgacttttgaatttccaattgattcgcatttatgtccctaattcagttgaattgttcccatatttgggattat

SEQ ID NO: 10326 - DNA, 4145 bp, Heterodera glycines
caaatttaaaagattctgaggattttccccaaaagcctcataaatcctcaaagtttctcaaaaagccaaaaaatcctcaaatcctcattttccaaaaaaatcctcattgacctatcaaaaagccacaaaatgaggataaatcctcagatctggcaaccctggccaaaagtcactcaacgaatgccctttcagtgcctactttttcactcccccccccccccattagtcacctctctttcaactttttgatgtccgtcctgcaggtgacgttctgccgcatcagatcggtcttctccgtcttcagtctgaccacgtccaccaccaattcctccaatctctgtctttccgcttcgtgttcttctttttcgtcgtcgtctgtccaattaatcgaatggttaattaattaatccaattctccaatttgtctcacttttctttgctattctctcgcgcttttggagtgcccctgcggcatttttcccattttttgcgtcccctgcgccgttgttgagacatcgtcggccaaccgatggtgcgccgttcggttggatgtcggccgatgacatgctctccatgccggtgtccgagtcgtgcccccctccggcgcctcctctgagtgcgtcgtccgcttcgtttagcacctcctccacctctatctccacatcgtccaagtcgtcatcatcctcggcatcgcttcctccgtgccaatgcctcaggtgctgaatgctcgaccgaaacggaatgacagtgcccggaggcaattggtggtgggcggcgtaaggggaagagggcgtggagcggtggtgatggttgtgctggtcgatgcagccgaacgacgcttccaacatggcggaagtgctgctgaatgtggatgatgatggacggaaaccatccaaaataacttttatactgcaaattcccgcatttccctcttagttaaaagcccccattaagcgatagtaattaggacggagttattaaagccacttatacaatgggttgtacacataataaggttcccgtaatcagaattgattcgtccagtactgctccttcccccctcgtcttctcacttcctttccgctgctgtctttgccatttttcccgcatttgaacgccatctcaaaagatgatgatgctggtgataattatgtgatggcatttgggacggatgagcaactgcggatggtctgtcaaaatgatgtccggatgaagaggaagtggaggcggaagaggacaggcgacagtcctccatcggtgccaccaaagacataattcgacctgctggggaatgagtgatcggctgatcagtctgatcaatggcaaattggccaaccccctctctctctggtcaatgctcttctctgctgttgcattgcgtcggccattggcggcgtgccaaactgagaggaggagccggacgagctgctggtggagcacaacgtaccggacagacgacagccaagcggcaccttttcattgaaagtattggcacatggcatcggagtgccatttgaggacacgtcttgtgacaccgatcgtgacctttgaatattgaaaaggtcaaagaataggaacaagcattcattagccaattagctaaatcagtctactgttccatcaaaaagtcatgaggatttgttgaattgttttggggtgatcatattaatgggactaattaacggcctaattgatgtccattatggtcaggtggtgctgcctgcccctcacctcgcactgaatactttcttcaccgaatggaacagtcccattgggttcgttcctccgttcaccgatccattcatcagttgctgctgttggctgtgctggtgatggttttgcccgttgttttgccattggtggtggtgcttctcctgttgctgctgtttcgtcgcgctgtccaccgaatccaaaaatgccatgccgtaaaattgggcccgctctttcaaatttgagtacagtccatccagcagcgatgcccgagtgcgttcctgaacaaacttttgattaattttcagaaaatgaaaattgccataataccgccaatttggcaaatttttccgccttataagccgcgttttccgcattgatcagtttggtgagcaaaaagtcgcgcagttggcacttccaaattatggaagagcgcggaagcgtcgggccaaagaacggcacgtcgtctcgcgctgtcatcgacacgcggtaacgcgtgcggtcagtgcccggctcaatgggatgaaccaccaaataggcgtggagaaagctttagaaaaaaagaaaataattaaattaggcactgaatgttgcccttttttgtacttgctcgcgatcatgtccggacagaagggtgtgttctgctcttggaaaacaatggccacgatgtcgttgccaatgtgccgcttgcgctgcaattgttgcgcgtcgccaatggtaaacggcaaaagggtggacacatggaacctgaagaagccggggaagagctaattgggctaatgggatgtccgaattaaagggacaattaagtttttggttgaaatacacaataaaatggatttattggcttcctctcactctcctatttttaatactaattatttgttaattgaaactgacatgatctccttctggcgaaactgtgtgtacaccgactgaaaaaggaaattaagcaaacggtaccgtatgcccgccccactctgccccaccgtacctcggtgcccgtctgtccatgaacggtgtccagtccgccacgataaccgtcaaaatgacgcaactgaactcggtggccgatgatggagagaaattcgtcgaaggctgcgcagttggaggagtcgttgctgaacagctcctcctcggtggtctgcccaaacttttggtaaattgcacctgtgaaaggggggcaactaattgatcagtgattctattttgagtgttaaataaacggactgaccaaatttgtaagtgttgcttatcacgtgctcgtcgaattggaggatcagctcacttccccccggaaaagcgatgggatagaaacgttcggccgtcaattcttcgcataacaatttggccattcgacatgcgctgggacggtcggccaatgccgaggctgggacaacctcatggaccttacaaattaggaattgatatacacgcgcaaatgaattgaacaacgggcggggaactcatttttggcttattagccaattggccaaggcattggccgttccctctgaaaataaaccaacgcactgtgccgtgacgagttcgcagaatgatgcggaagtgattttggcaggaaattgtctccgtgcgaacactcagcaccagcggaccaatcagcgggtcattcccataaaagttgtggtgttcctatgggaacattcatttatttatttatttgcttctcgggagtattgacactctcccaaatatttaaaattaatggccattacgaactcggcattgcccactgttaattaatcctctccccccaatggactgactcttcctaagaaatggcgtcggtagcacagtgccgtgtcgtccgtctccaacttcgtcctgtcacagcttccccccgtcccattctttggcacttcgtcttcctcctcatcctcctccgctttgtcccttcccttattacgtccgtcttccgcttctgcgactcgatggtacgaaatgactccgtccatccaaaagccgccctgagggggcagcacaatttgggggaaagggccgttgcccgaagcaatgatctgaagggggggggaataggtggaattgaaactaataagaatggaacaaatcaaatttattaaaggaattattagcataattccattttcggaaataatctgccaaatttaccttgccattcattctttcttttcatttttggcttaatctttcaacctgttttattgagtctcgggaaaagcctcgactcgtcgccaattcccttctcgcacaaaacgcagtggcggaaggagtcgacgcttcgccgacagatggcctctgtaagaaaggattattctaatttgatcaacatcaaccaagtgataggctaatctaacggtctgatcactctttttaaagccgccaaatattcactgaaaagtcaaattgacaataatcaattacaaatacatcaa

SEQ ID NO: 10327 - DNA, 1845 bp, Heterodera glycines
  unsure (1)..(1845): unsure at all n locations
atgaagagggcaaaggaaacactgacatccaactgatcggcatanatgccaacattcgcatttaaaccactattcccacccaactccttctgatttgatgctccttcttcccttccaacgaattccactcactttttcttccgtcgatgcccccaattgatcacatttgtaccggtgataactgtcgttgtttttcgtccctttcggcgccatccatgacaatcgcaagtattttgactgccattcaacaaattccgcctttgaactgcttgatctcgccggtgactcaggtcgggtcagctgctgctgctgttggttccgttgtttcggttccgtttcgctcgtgccgattccgactccattcgcctcgtcatccgtttgcttttggcgacggttgcgtcttaacagtcggccgagaagggatttcatcctcggtggacgctgttggtcaatcggtaatgaagaggttgggtgtaaagtgtgttcattaaggggcgatgagtccgcccactgcgctaatgaggctaataatgacgacgacgatgatgatgatgatgatgaccaaggaagtggggcccgtcccccctcggcctgttgtccttctttgttcttcctccgctgggcttctggcgaatgacttttatctccggcattcttccggaagaatgaccttcgtcgtgctgttgttggttctgttgctgtaattgttgctgctgcgtccgcatttccgctggtgctggccgtgctggtcaatttgcgcaaaataggcttaattgacaggacggagtgtctccgtcgctttttgctctcctccctttttgccgcgtttgtctctgccaaatggtcctccgtgtcactcatcggcattctccgaccaatttggttgattagtcgctgctgctgctgatcgccagtgccaatcgtcaaaatgcaattcacacattttcgccccatctggtggcacttccaacatttttgctgttttagcacttcgttttgcgcttccctcccttctctgtctcccatttttcttccatttgtggtccttccgtcttccccatgtgccttttcgtgctgtcgcttccgttcgatggccccagggcatccgttgccggtcgctccccccgttgccccccaacagtttgtgccgctcgtccgccgtcccctcggcctcagtctgaccgcttgcactcgttcttcgaattcctcccacgagcacaactgctgacaattcggcacatttcgctgttcttccctttggtgccgtttctctccttctcctttctcacatttttctgctgttgcctttgtctctgttgtcgcttcgtttgattgaatgttctcccaatttgtcttttttgtctcttttcccccatttataatttttgtctcttcttttgccattcgatggtatggcacggcaacgcgccgtcgaagaatggacggaaggggagggacggcagtggtgggacacgacggaggcaaagcgcattggcatggcacatgcgaaagtggcaccgttttggcaacaaccgaacgtcgctgttgcggagggcactgttcgccaatttcggcctcccatctctttgtctcctcagaaaacattgtgagaggtcgcacagaaagtcgttgcgacggaaccaatcgaacaccgcccaaatcggagggcaattcggaaatgcgacggagtcggaccaattcgacggagacggccatagggggagggaaggagaagaaaaagcctgcccagcttaaagaggacggctttttgaaggtgtaaggcgtgatttgttgaacgaataaaaaagaacagtgaaatgtgaacggagaaaaaagggaaaagaa

SEQ ID NO: 10328 - DNA, 1025 bp, Heterodera glycines
ttgggggggagagacggacagagcagagaaatcccatggaattggggggagagacggacagagcagagaaatcccatggaattggggggagagacggacagagcagagaaatgccatggaattggggggagagacggacagagcagagaaatgccatggaattggggggagagacggacagagcagagaaatgccatggaattggggggagagacggacagagcagagaaatgccatggaattggggggagagacggacagagcagagaaatgccatggaattggggggagagacggacagagcagagaaatgccatggaattggggggagagacggacagagcagagaaatgccatggaattggggggagagacggacagagcagagaaatgccatggaattggggggagagacggacagagcagagaaatgccatggaattggggggagagacggacagagcagagaaatgccatggaattggggggagagacggacagagcagagaaatgccatggaattggggggagagacggacagagcagagaaatgccatggaattggggggagagacggacagagcagagaaatgccatggaattggggggagagacggacagagcagagaaatgccatggaattggggggagagacggacagagcagagaaatgccatggaattggggggagagacggacagagcagagaaatgccatggaattggggggagagacggacagagcagagaaatgccatggaattggggggagagacggacagagcagagaaatgccatggaattggggggagagacggacagagcagagaaatgccatggaattggggggagagacggacagagcagagaaatgccatggaattggggggagagacggacagagcagagaaatgccatggaattgggggggagagacggacagagcagagaaatgccatggaattggggggagagacggacagagcagagaaatgccctgggatttgggggggagagacggacaga

SEQ ID NO: 10329 - DNA, 1779 bp, Heterodera glycines
cgccggactctcttccctcacacattctcaaaaagttttttggaaaaagtgcaaaaaaaaaaatcaaaaagtttttttacgaaaatttcaagattaaatttttgaaaaaattttcagcgattttttctaaatgttttcgaaaaactattaattcctataaaaaattgaaaatccgtttcaaaattttttcaactttttttttacaagtacaaattaaaataatttattttggtgtgattaaatctattatttcaactgaccgatgttttttcaagttttcaaaaaatgcttaaattggttttaaaatacattcttattataaattagatatttttagacgttcccaagcaattaattgattttttcaagcatttgtttgttttttaaaacaaattttaaaaaatccaggtccatgcctggatccaggtctcgaggagcctggatttttcctggacctggattttcctagatttttgtccaggaaatccaggtccaggtccaacatggaatccaggtccaggcttttttcaaaatgtcgatctctaaaaataattaatgattcctaattacgaacaatactattaaaatgagaatgtctgggctaaaaatgagtttttcgcgcatttctcagcgaaacaaagcagcaaaaatgttaaatattgtaactaaaatgcaatcccttctgtaagcatagctatttggccttataaattaattttcattgatattttcattcctcccatccttgagtctgccgggacctgagaagccgggaccgggaccgggacctcgattttttttcgggaccgggaccgggaccgcaagaaaaaccgggaaccgggaccaaccgggaaattttaaaaattcaaaaaaattttaaaaatttaaaaaaaaattcaaattttaatttatatcaagtgaaaataatacaaaattatttggttttttatttaataaattaaattaatgaaaattttcaaacaaattttcttcaattatttcaaacaattaataattttggactaaatgatcgagtattattagaaattcaggtttgcttttcacataactttttttcggcgcgctttttccaaaaaactttttgggaagaaaagggtccggcggtgccgataggcgccgccgggggaaattttaaaaatttgggtgcaatttgttaacagattttcaacaaaaaaaggttggtttttgcgattattaagctcaattggtaggattttcatttaaaaattttttttctaaaaatttccttcaagccatcattcttggatttgagatcactatgaggaatgaatgcactgtctaacttggtttaattaatttttttgttcacatcttcttagaaatttttgccaaatagacctaacacacaaatataagaagaaaacaaaattgggaagtgtagatgaatttttttgtaaatttacacgccctctaaaattggctcaaatttgctggaaggaaattgctagatcaacttttatgccaggggtcggtctgtcctatttgtcagttgtcctgatttggagggtccaaatctgataaaatgaaaatgtcccgatttgtaagatttgtcctgatttggaggtggtgaccaaaatttgttctgacttcttaaactaactcattatttttaaattttatggcaaaatgtcacttttatcaagaaaatataagatttgaggcaaaattggtcattgttggacaaaaatctgttaaaatcgcattaaaaattacaaaattttttcccggcggcgccta

SEQ ID NO: 10330 - DNA, 2503 bp, Heterodera glycines
  unsure (1)..(2503): unsure at all n locations
taagccgccaatgtcgactaaaacggttcaaaaacgccattttngacataaaatgactttaaaatntaggctaaggacagcggggcgtacacgtgcaacatcaaaaatgacggtggagaggcgaattggagccgacactgaacattgagggtcagtttaacagcattttattaaatgacaattaagcatcgcaatgtgtgtttgtgaattgagtgacgttttgaagatgattattttttgattaaattttgacgacgcagcgtccgacgacggcgacgaagacactgaagaagcggtcccatccgttgattcgggtttatagtgtttcaaatttttatcccatattgttttcgtttttaggtctaactcgccgcattggatttgttcgccatgtcatcgcgtttttcgaggactttttggtcgaagaaatatgcctttacggattttgaattttttaaaaataatttcttatttcatatttttaacattttcaaactttacattttattagtttcggcgacgcttaacggatcggccgattcttcaccaccaatccaaatgtggatcttccttccctttctttctcactttcatcggttgataatgcttttttaactgtttctactctgtaaaaagccgctttctgaaaatcttatttttggtgtcaaaatcttcgttttagcctcgtttgtccttattttgaaaaaaaacttggcagccctgtctgtactacttacacaactgggtcttattttctaaaataaattctgcatcatcattagagaccggattttgaggcatatgctttttttgctaacttgctatggcctaatacgcacgaaaaacgagtttttaacttggtttgaagcttctagcttgaacttttttgtgccttttttgcgattttggtgccttatgcccgccacataattttggtgcctttttcatgcctttttcaggatttttggaacaaaaatagataactttttgcaatttttcttttacaatttccaaaaaatatttttcccagcggcgcctatcggcaccgccggacgccaaaaaatttgtcattttttcggagctaaaaattcttttttttcgctccggttaagcaaaaaaaaaaaaggtctgttggaaaattttttgctacaaaaatgttgatttttgctgccaatttttcgtgccttttttgacgcttttgttcattttttatgccttttttcacatttttcgtgcctatttgagaaatttgcgtgcctaaaagtccggtctctgatcatcatatttgagtgttttcttcgttaatttaacactaatgaattatctcgctttatcttcttcttttgctggtggtggcggagacaatggccttaagcgcaatttgaattatttaaaaaatgaaatcccttatttaattgcttacccgatgcaattggttccactataaagccaaaagtacacatagttccaattttcatctttcttctgctgctgaaccgccgcggcctccccaattttgcatcgtttcattatccaaatgttgtccaattcatttgctttggccaatgtcagcttttcttgcgttcgttcgttcaccaattcaaacggcacaatagtcattgtcggcacatgaacagaaaaatgaatttcgtagctgacggaagaaatggtggtggcacgcataaattcctaaacaattccaaaaatcagcgatttgccgaaaatgtggggccgcacctccttgaaagtgttgaccaaatggaggctcacttgttcattaatatcaatgaaacggaatcgcttgggttggccatcttttctcggagagtgcaaccatttgttcaacgcttggccagcagttgcatttggcccatcaaaatcatcaccaattgcatcgggcagcaatagaacggaatcgattgaactcaactgattgagatcagtgagaattgtgggcgaagtgcgacgacgcaaattgtccaaatgatcagcatcgataaagtccaagtggcgaatgtttgatgcaaaaattggccatatttcacgaacaaaaacgtcccaaatcggctgccggtcatccgccatatctgagtaaagcatccccatacgcaacttggtgccacttttgtcgaaaattttgtgatttgaacgaagaaaagcgatgacggagtgatcaatgtaactgtgaaaatggaatgaatgaatgcttttattgcgatagcactgatttttaattactcaactcgaaggcgcttaaaacgaattttgctgggcaacggacggtcgggcaatggaaatggcatagaattggcagcgtcgataaacaccgataattctggtgccgcctccgccgcagtaacactgttcttgcgacaaatttcgattcgtctccaaattgtcaattcgggttggcagtcgaaatgtttgtccaccaacgcattgaaacgtggcgaaagaagcgccaatttgaggccaagttgagcatggtcaaaacaggggaaaa

SEQ ID NO: 10331 - DNA, 2641 bp, Heterodera glycines
  unsure (1)..(2641): unsure at all n locations
tgtatttaattaaattgctaatttanttggaatgaaatattataaattatagtaaatgcatttaaattattttattatatgcaattcttcatttgattgtttttttaaggatatgtctgactatttcaacttttaaaaaatattttttttaattagtaaatatctaacacaaattttgattttgttattcctctttttcattttgattaaataatttatatttaaacttaagctaataaaaataattgcaaattacataataagtgcaaccttttgtttttttattcgcctgttaattagttttctactttaattgagtatgtttctatacttttttataatatagatttaagttaaattgttttatttatcatatttttatttcacttaaattaggttctaattatgacttttcttattatattagtgaaattattttaataaaactttaataaaattaaagataaaattattttattattttaataactatttaaagttgccaaaatttatttttctttaattttaagttgccttctcctaaatatttatctaatagcttttttaaattaaaagtagaggttcctagatactttaatttaaaaaaaaagtttatttttttttgctgaaaattttatttcgttaattgatgctttattaaattattgttttatataattattattgttattttatttgatcagttcaataaaaaaatgtcagtattaaatttaaattttatttttaatattttatatttatttaaaattataatttttcatttaaactacaaaaatgggtttgtctcataaagagcattagaaattcatttcattgtattcgggccttgtttttgtcatctttaaaaaaatttttcattagttaatttatttttacattaattcgaataattcgttgttttttttataaactaaaagtatcatttggatattaatcggcagggattttgttttttgattgtctgctgaataagagcactaatatcagcttaataattatttgttcataaaattatattatattgaataaattatttaatgctttttttgcgcgcgctttttccaaaaaataaaaatttttttggcggggggggggggggggggtccggcggcgcccgcagggaaaatttttgtaagttataatacgatttgttaacagattttgtccaaaaatgaccatttttgttgatttttcacaaaaaaaaacaacaaaaatcagcaaattttctcaaaaatcacaaatcattatcaaaaaaaaaaatcacatagacttcttgaaatcagcaaaatgatgataaatcaacacattacgagcccagataataattgatttaattgaacacaattgtttcacaaaaattttaatataaattcttattttgtcccgaatcacggcccagcagaagcatctggttaggattcgggtttcgggtcgagaaaaatgtcggaattcgagtttcgggattcgggtggcaactctggtttggtgccaatgaattttccatttaattaaatttttctttatatcttattcaaacaatattttatctttttatcagattatttttcattttaaattttcttgatttttgttatatgtttttatttttatgtacatcaattttacgatattaccaattttggttagttttaaatattttaaaaagttgttttaaatttagagaatttcacaaaatcaaaaaaaaaatagaagatgatatttaaaatacatatcctcttaaataaaatctattataaaaggtatttacatgcgaaacaatgatcacattttcatatttattttcaaagtaacttcaaaaatataataattatgtttaataatttaattattttttcagtataaatttatttattttatatttactattttttgtttgtttgataatattttgcttccatttttattcataattttgttactttgaatatttatttattgcattttattttattttatacaaaatattatttttcattgcattgcttatttgtaattgtttaataattttattattttttctcttcttttaattaattcatggctgaacttccttttccgttgtcaaagggatgaattcgccatttaggaagaacaattgataatgatttctttcattacaccgtttttattttatttctgttaatagtacagttttttaaatatattgtgcttatgataaaattaccaaaactaggatttttttagcgcatttaatttttttcatgttttatatttttcttaaattttaatcattttttaattaaaattttattttttgctttttctgttctttttctcgtgttttctttcctcgcaactacttgcaataatcggtctatattaggtaaattaattttatgaattattcagggtaatttatgaaatttgcataatttgcttattaaaattattttaaccctaacaaaacatatttttttcaaagtaaaaacattcagattaataattaacaattatacttttttctacgttcggttcatacctgttttaattatatttatttttttaaataattatgtttttgttgggaacttaatcatttttaattttttattcataatcattaaaaacttttttgatt

SEQ ID NO: 10332 - DNA, 1294 bp, Heterodera glycines
  unsure (1)..(1294): unsure at all n locations
tcaattataagaattttttatttttcctacacggatttttagataatatatagcaaattttaattnaggaaaataaatttgactttatcaaagtgatttaatctcgaatgattttaactaagattagcaaatttttttaagttttattatttcgataaaaaccaaacttagggacctggattaggaacaaacaaagctgtctcttggttgttatctatctatttagttttatattatgatgtgccttgactcccggccccgactttttgtcccccgacccaccgacattaattcggggaatttgggactacgagtgttgtacaaagggaggaaaggttgaaaatttttaaaattagaacaattttcttaataaaattattaatcgcaaaaattggtattttttagggaaaatctgttaagaaattgcaaattttcaaaaaaaaaaattctggcggctcctaacagcagcgcacgcaacccatccctccttctgttccccaaaagttttttttgaaatagagcgccgcaaaaaatggtggtcaagttcgaatttaaacgggttcgcaaaaatttctgttaaacccgctcccccttatcatgtatttttaaatcagggcttccatcgaaagtttttcaaaatatgtgcaccaaggccgaaaaataagattttggggtcaaaaatcttttttatcctctaataaaaataaattccggattatgggcttagaaatgatataggacagatattgattgataatatttatgcaaaaaattagctttataaattaaaaacgacaggatttgttactcaagccaatattttatttttttatgtgcattataaaaaatttatcaaatcatttttatttcagtagccgagttttaatttttgtaaattttacattttttttttataaatcgcccttatccaagttgaattattggttctctagtaagaaaaggtttatttttttctcgcaaaatgtcaaaatgataatgattaaaaaagataatttgtttgatacaatttaaaaatttattttatgattttaataatttatttcttgtttttttttcgttttaaacaatattgtttaatttattattttttcatttctttatggaaattaataatattatttccttgttctacatcttcaattctttgtgtgggatgccgaaatttaaattcctttgtattttcatttattttaatgctttttaaagaaataaaagtattaaaattgaacatagaaggtatttatgttcgtcataatacttaataaaattgtaa

SEQ ID NO: 10333 - DNA, 1865 bp, Heterodera glycines
taaatttagtaaacaaaaaaaataaaacgaacatcaaacaaaagttagcaaaaaatctactcgaaaaaatgcaaaccttttttcagcaaagaaaaactatcaaacattttttagtataaaaaatggttttttaaaattatttatttatattatacattaattaaaatttatttatttttagttgaatttgaacccgaggtctaaaaagacgaatttattaaacaactgagccaccaattaagtgaaaagacagccttaatttactagaaatttaaagtaaataaaaataaaaacttaataaaccatataaataaccatttaaataaattaattaaattgtttagtataggaaattaataatttgatggaaacagttggacttacaagtacccgaacatatggattcagtcagcatgaaaaaaaaactaaatttatacaaagtaagtaaaggaaaattcataaataaagaaataaattaataaaattaaaattgtacaacgaaccataaaaagcttaaaagcgactgaattatttaaatattaaaataaaataaaaaatacatgaggccaacaacttccttgacaaagcatatggtacacaatcagcagaagataacaagaatgaaattaaaatcatcaatgaatttaaatacccaaaacacacaatccataaataagaaatgatattaaaaaataataataatatacaaaatcgtggaatttaatcaaaaaaaaaataatttaataaaatgattattaataaaaatgaggtaatttgaaaaatctaaaaagcgcataaactgaagttaatggaaaaattttacaattttgtctttttattttaagagaattaaattaaataaaatttttgatttattagaatctatttatgacctaatggaatttgttttagtttcgaaccccgagactcgagaccgagacccaaaaccccgagaccgagaccaaaaaaacccgagacccgagacttttttcaaaaattttttcttacacacttaaaaattgaaaaaatcaattttttgaggttttttctcaaaaatttttgcttttttcattatttaatctaccatacatttttccttttcatatgattgacttttttacaccattttttgtggtgctctttttcaaaagaatttttcgggaacaggggtccggcggtgccgataggcgccgccgggaaaatttcttttaattttactgcaatttgttaacggattttgtccaaaaatgaccagattttgcgactttgagctactttttttaaataaaagtaagggtaaaattttaaatttttagtgcatttgagaatcccatgtagaacaagagcctatagaacaataaaagttggtacttgtctgttatctgtgtccagattttcaaattttttttttgaaaataaattttttttccgaaaattggcccaaatttgctgtaaatgaaaaattcttttttagaagattctttttttggcgattaattattttgagcatgtattagagaaaagcggattctaataattaataaaataaaatatattcaaattttattttcggactaaagaagaatttttataatattaaggcagttttatttaaaaaaaccaattttttgtaaatataaatcattataaatgatgacaattataaaaagattaattcaataattaccaaataaaaactgcacaaatgtttttattatgcatagattaccaaaattaataaagtaattagtcaaattgactattagagaaaattttgaaaaatatatcttagaaagcttaatatgaataactaattaattaatacagatatttcccttattaaataatgcattgaaaagtacaat

SEQ ID NO: 10334 - DNA, 6029 bp, Heterodera glycines
  unsure (1)..(6029): unsure at all n locations
aaaaagcgaacaatcacaagaaaaaacaatcagaatgttgaagaagtcgaccaagccacggacaaataaatcaaaaataggcaaacagaagcaaagcaccaacacagacacactaaaaacccatacagaaatccaaactctccgccacagcgcaactcgaggctccatgaaagttcgtaaaatgcgagaagagaaacaaatgttaggcgtgttgtgtcccctgcgaacgcagaggacaatttcgagtaaaagttctggtgggagacgatttcgactcattttgttgcggtggaaaaggggtcaattttttagacaatgtaagaagtgaggacgtcgttgacgaggaggtaactgtaaacagactgtttatttcctttttatttattttttccccgggagagcctatccacgtccatttttagttgtaaaatattatgactcgaaactcactaaaatcatttagggggcgaatgcgaaagcaaatagaaatactctcaaaattatcctgtttagctgaaataccaatttatgattaaatttatttatgcgagtggaaaatgttgggtccggggaacagttttacaaattgagtaattgaacagagaccatggacggcaaaaaaaaacgaaaaaatttaccaaaaataattgaaacaaaatgccaatacattcaaatgaaaaacaaagtctttatgtttgatcaaattcttagtcagaggtcatagcttccaatccacttcaaataaaactagatagttttttagagatataaaataataaattgacttaaatcatttattaatgtttaaaattgtttattattttaaaattccaaaagattcgatgcctaaattttttttgagaatttttctttgttttaataaattgacaatcttttaaatttttttctttgctttttgtgtcaatgtagtcattcctcctcctgttcactgattctgtccagcatctcacaccccactcgagacattttgttcatcccatcttttcaatatcatctttttattatgtctctccaattttaacaaattttgacaaacaaactgaagaaactgtacagggaaagaaacggtcaatgtgacaaatacagagtgaacggcacataacgtaatgatatgataatattataaagctagctcataaatgtggaaaatggacaaaatgagacggatgagtatcaatcaccacctgataatgaaattagggggttggcttcgtcaaactgttattggcggattgtcaaagtaatcccgtgaagtccattcgtcagtgtcagaatggtcatctccgtcgatctaagaaaatgcgggcatcaaaaagccctaattgtcccgctgtttagtttgaaccgaaaggccctttagaacttaccgcctgcaactcttttgccgtgaagattctgggcagaatgatctgtcggaagaagatgaacagcatcagaacacttaaaaccggattaaaaaatgaaaaaaaacaaaaagcaaagagtgcctacaagggaaaagccagcgcagtctttttgaagtatttgacctgcaaaataaacacacgagcattcattttcgcttttcctggacaaacacttgccgtgtacacaatgaacacacaaatgagttgaatccacgtgtagaggtgcatcctccaaatgctcatctaattgatcatttgtccggtttgatcacactttgatcgacccgacccactaacctgttcagtgtacggtgtgacggggaagtacttctcggggatgaagaacagaacgacccgttggattagctgcacgccgcacaaattcatgactcccaagtaaaggaacacgccgaagagtgaagcgagcggaaggcgcaggtaactgccgccgaaggcgatcagtccgatcagcagggcaactccgatggtggtgatccgttgctcgatgacacagtcaacttctgacaatgatcaacgggggaagggaggggttggagaagaatttggcggaaagtgaatttattaaactgaaattattgaattgtgtcacctgggcgtgccccgggagccgtctttttcatcactgtcaaagatgaacagtgagccaatgactgaacagcggctgcgcacatccacggcaaaccgaacaccttcaaatacaagggaaacatacacaaaaatggacaagggaaaggagtacaggtcgaaacaattacatacggagcagagaaaggcgcaaatgcccatcagaacgaggtcccaatgcatcccaccgccctttttacagccgcgctccttgcgactgaggagaagcctaaaaagcggagaaaggggaacagtttcggtttcaggttaaacacacaaaaaaggcactcactcagtgatttcggtctccacaaacaaaaggatgaacaccaacagagcggcgataaacgacacgacaatgccatgccaatcggaaaagggcaaagtcggcgtgacgataagtccgtggcctcgccctgaaaaagcatttaataccgaaatcgaaaaatataattgtgagttgaacccacttgttgggtttgtaaagttgatgtggtcaggcatgtccagcctttgcaggtacgggtcggggacgagccaatggactgaatgaatgggcgaaatggtgaagaattgtgagggggggagaccgaccgatgagagtgacgacgctaatggaaatgagcacgccaaagtcgccgatggcccttctcagctattaaatacatttgtattttatcaaataatgtctctgccttttgctcacgtgtctgcccaagtagaaactctcgcgcagtttcttcagcagcagtgccaaaatgaacgtggagaacacgatgatggcggtgagcagtgccgtgttcggctccgcctccccgcaggggaaacggtggacgcccattgggtcttttatctcggcgagtgcgttgaccaatcgtctgctcgagtcggcgtccgccgttcgattccgtgttgaattgccaatgccttcaacatcaaacggaagcgaaagcaatggaacggtgtttggctgctgctcggccgactgattgtgcacgtgacgacgacagttcacgtggatcttctcgtagaaactgtaatcctccaccggattctctttgaacgtctgaacggaggagtacaaacaataaattaagtaaattaaaatgaaaaatccatttttctgcaaataataacgtacgtgccaaatgaaatgcagactttccgcaatgaaaatggccgagatcaaaccggcgaaaatgtcctcggtgaatcgcgtcacaaacaccaacagccgcgagccgtccaccgcagcgatgcaaatggcgatgagcataatgaagagaccggcgtagaagcgaatggtgaggaagtccaactgcagagtttcgcaaaactgtgggacaaaaacggagagtgaattaagggatgaattgaaaatgtataacattctattaggaaatttcgacaaaaaatctcaaaatttcccacggcggcacctatcggcaccgcccggacccaatattcctataaaattttcaaaatttgacccaaaaattgtttaaaatggcaaaaaaatccctaaaccattttttgatagaatattttaaaaacggttaaaagcttttggaccgttcatatcaaaatcacttggggggaaaacactcactgtgtaaagactgccttcgaaaatgagcacgggcccagtggcactcactttgaaagcaaaaggaatgagttacacaaggcatatttattgggccaattcacccactgatcatcaacggctgtgccgagaaaaggccccaaatgatgccgcaaatgcactgggcaaacagcgcctcgatggtgccgatgtgctcgttggtgtatttgcccatcagtccgccgaaggaaatggccggcacgaaacaggcgaagaacatgaaaacgacgctaaacaatggaaggaggaaccggtcagatccaagccatcgagtaaatggtggtcaattttcaaaactcccctcgtgagacattggaaattggcggcgtcacgaatgtcggacctgaaaacggaggagtatgccattacttatgagtcagttatccaaaattggccctaagttcttaattatgtcacactaatcgagtcaattactccaaatgggcccataattataattatgccttactaattgagccaagtagcccaaatgagccaaccattccctttccaaaatttgttttcccaactgaccaataaaaaggaagtcggttaacaaagtcagcttggagtcctttgaacagcggaaagcgtcgcttccgtttcgtccgttgcgcacttttcgtcccttcttttgtccaattttgttgcgtctgtttctgttcctcgccccctccctctttttgccattgtttttgctgttcctcttggccattgtcctcattttcgtccccatttgctgctaaatgcccttgttgtttctgctgattgttgttgttgttttggtaatgccgacttcccccgtcttcggccgtcgttttcaaattgcctccgtccgtttcgacttcgccgtcgtatcgatgccattcagcgtcaattgctgggaggtggggacccttctcccaactgcgacgaaaggtccttttctttctctctcttctgacattcgatttatcactccgatggaggaagagaaaattattggggatcaatttgcaaatcccttcacaattgacggggattaaaatgagtcaccgttcaattgaaaattaaacattttgcttacatttccttaaagttccaacatttcagttaagcggaacatcgcgccaagcggcaatgagtgccgcctcagtgcatgagcacagattcggggaggagacgcgtgacgacaaaagcggggaatactgcaaatgttgcacaatgtgtggatacgaaatgcgatacgaaaaaatgtgaaaaatgaccccgaaacttattcgcacttcggcgctatatgaaaagtggtctttttgaaaattttttcacttttttggtcaaaattttttgtttaaaaatcgtgaatatactttttattcaccataattgtgctattaatacttaatattcatcattatgtgtaaaaaaataaattttggtcaaaattttttcttcgggattcgaaataaagccaaaagaatgttagattcgtgcttagcacctcggattacccctaaaaatacttttctcaaatttaaaaaaaaaaaaatttgtttcgggaccaatagaagtcccaattctttactcgctttagccataaattgcaaatggttcataaacatgaaaagcaacaaacatccaaacattcaaaactcaattaagcaaagctcaaacattgtcttccctgagcaaattaaaaaaaaacacaaaacggaatgtcaaaagtcatctccttctccctcgccaattcgcgatggtcactttctttcatttgctggtcgctcgcccaataatgccgatagcgacgaactcggccgtgctttccgtctctttgctcttcttactctcactgctggtgcactcgccctggcctaattgcaaaaaccattggaggcattcttcggaaaacaataaacggagaaagctggcctacccgacacaatgcctttgcgcaaaacaagcgcacgaccgataatgttacggggaccaaaaagtgacaaggcactggacgaatcggaaacattggcaattccgagaatcactggaatcccaggcttaaggacaccagcaggttggacagcgggaatgtgctaaatagcaaggcagtatgaattcaattccaacatcaacacactttgaatggccagggagcgttttaatgagcgatgggatgttttgactacttttttggattcgggaggggggggggggggacttagaccctcaaccccttcctgggctacccttgaacttatggaaggagccaaaaaactgatgcccactgaccagagntcgtggcggattgagacccggacgacggacgaaagaccttc

SEQ ID NO: 10335 - DNA, 2400 bp, Heterodera glycines
agaattgattttcccattggttccccccaatcttcatagatcccaaatgcttaagttggcttagtcacctgaactctccgctggtcgccactgtccatttttggtcgttgttttcctcttcgcattttttatcagaagaaatgtcgtcgcatgcgatttgagtgaagcgatcgggcaaaagccgaccattgcctgagggccattggagaatgtattaaaggaaggagaagagtccattgccacctttgccattgaaacagcccggacttagcgaaaggtcgtcgatggcaattgagccgaaagagtcggccaatttggcaaaactcagtttgagcgaatattcgccactctgtcagcaaagggaaagtaaaaaatacgtgtgggagtaacggcacaaaacccttttgaactgttttgtttaatcttacgacaatcgctggcgttatgcccaccgccgcccggcgccattcgcacggctcccggccgaagtcctccttggaaggggcccacaacggcttggccatctcttgcggagagttgcgacgggaaaggaacacttggaaagggctgtagccggtgtggcaatagaaaaagcgcaactgtgaaaagcggataaaggttcgataggtaacaaactgcacccaaacagtcgaccaaatggaccaaccaaatgggtcaattaaccaaatgactcaattaatcactaggccaattaaccaaatgggccagtaattaccgcgcatttggcgtcatgggaaaggcgtgggaacggcggagagatggcggaggagtaaacgatgtcgtgttgtccgctgtgttgatggtgctcgtagctggagaagaacagaaaacggccggttcggtagtgccgcccctcgtaaaagtattcgcccgggggaatgccggcgcgacgttggcgcgcgtcggacacagagaccaaatgccgcgcggcggaggaagatccgttcatctgcggggcgccgcccgcttggccactgaaaatgcgccaatgggcgcagccgccggcccagcggctgtcctcaaaatcgcatttggcgccctccggcacttcggcttccaattaaaaatttaaaaagtgagtcagtcgaacacgcctttcttacagcagtgatggacgtcctcccgttcatcttcgccctcctcgcaatccgtgtgcatgtcgcaaatttggtcctcgttcagacaccgttcgccctcgcccccctccgcccttcggcatgccaattcgctctctgcgcatttgcccgcaccgtcggcgccttgccaaatttgctctgagcaaaaggtcaactttgaacccactacttgtcactgataggtgttaaccttggcagttgaccaactccaagtcatccaccgaacattcgactcgcaattccgcctcaattgggtcctccgaatttgaattttgcccatcggaaagttgcgggggatggcactcgactcgaattcgtgtgggaaacccaaaagtgccaatgccgacccgggcgtgggaccacctaaagaatcactgccacacatagcagggattgccccgttcccttacggttcgcccgaggcggcgttcacctcaaaccgcgcccgaagggttggccgtgtccaatcgtcgtcctcctcctgcggtgagtcggggtgaagcgaacgtagagaaagctgttcagtgaccaccaacagctcggcgccgcgttggcccagcagacggtagcggaaaagcaattcgcactgcgttttgacaattatttaatgggggggggtaattaaggagtgattaaatcacttggggggcggtgcgaccaaaaaaggggctgactaacatggcgattggctcctccgcattttgttttgccgaagcggccacaatttgtcgagttgcgtagtgatctaagagagaaaagagacgggatgatcagaggaaaagccgaaggatcggaaggaaaagccgaaaggacggcacccactcgacgcactccctcccccactgagcacaacgtaaaagttgtcgctgagcgaaccgtgccgaaatgactgtgccgtgccgttgttgtcagtttgaggagaggcaccgagggactggtgcgaatgggtcggactaagttcagccgaattggcaaaggtccaatagggacagtccccggcagattcaaaggaacaaagcggggaagacactaagcaattaaggggttaattgacgaatcaattaattaattggctgattattacgacaatcatttatttcttctttttggaaagcattcactcaattaataaattgtgctctttctcaccttcgccatgctccaattgaccattgcttgcaaatggcaacaaaaaaagaaaagcgacgatcgcaacaaaaagggccattcgcccttggcaaaa

SEQ ID NO: 10336 - DNA, 2998 bp, Heterodera glycines
  unsure (1)..(2998): unsure at all n locations
tgttgtncatccatcggtaagagatacgttgtaattttccaatggaacttaattttatgcatttatccaaaggaaaagggacacactttttgtcagtgaagcgcagaaaggaaaagttgaagcaaagaaaataaattaatgggcgacaagtgattttgggcggagcaaagagagagagagcattaaagctgaaaagaaccgacgggcggacgacagacacactgaccaattggaagtgtgccattttaaaagccaaagacgaaaaaacggagggacaaaagacgcccaaaatcaccaaattgctgaaaaataacaactgaatatgatcatcacacgatcagagaataaatcagagagagaaatttgaatgcgagtgaaagtgaagtggaaaagaaggaacattcgcttgtgggacagaaccaacaaccaaagaaacaacaaaacagtgacatcactctcaacaaatgcgagggactcttccggtcgatcattgctcgaactgtgccaatctctcctccaattctgctattttcgtgtccttttcccgctccaattcttcggcaatgcgagacactttctccaactgatcattctaagtttgaaagtcgagcaaagatcaaagggtcaatgggcgaaggggccactgaccagcgagtcgagagtgcgcttgtaactctgattctccttagtcaatcggtccaactgttcggagttagcaatttgatcggccgtgttggcaatttcgcttttcggccctccgttcattagcgaatgttgcgccgtttgcgccttctgctgaatgtattttatttgcaccatttcactttgtgctttgctcaccgtgaggtcgtccatcagtttttccttctcattttgcatgtcctggttctttttcttttgctcttccaaacttttggtcagctcggcaaccgaattctgatggaaataccataattaaatttgatataaataataaaagttcagagcctttaccttaagtccgtcgacctctgaggcgcatttcgcttcgtttttcaattgactaaaatataaaaattaccgtttttgactcataattttagaatggaatttcaattagtggacggccaattgggcaatgaagtgataataaattttttaaatgaattaattcgcagtccaaatgatcccaaatccaaggcattgtgccgttgtcccaaatgaatgtttctgcctgatttcctcgcccatcttttggttccgtgcgttcagttccacacattttgcgctgtcattgctctgctgttttgccaaattgccataagccaccaatgctttctccaactcttggctcaactctccgacttgcttctgcgcgttcaccatcactttcatgtgatggtccttttcccgctgaatgggttaattgtctgtcattttacgatactaattgttcgtaaattacgtttaattcgttttgcaatgtctgaattctgtcgtcgtacgcagacttggataccatcgcgtccttaagctgattctgcgagttggacacgtccgacatcatttggtccaccatgttttttgccatttggcactctttatcctgcgcctttcgttgctccctttccttctaaatattattattatttaattaccccttaattaaccctctccgcctaattttctgttaattacaaacgttcagttccgcttgaagcgctttcaaagtgccttcaaaattaatgtgcgctttgcgcagtgcttcctccgtttcctgcttcgttttcattgcttccgcagtcactgcgtccgtataatttttgtgtttggcgcactcttctcgcgctttgatcaattcgtggtttatcattccgagtttttgtgtaaattgatggtcagtttgggcgaatttggcgttggtctgttcaagcatttccacgagctttttgttttcttctttcagctaaattatggacaaagttaaaaatattttggaaataagggcaaaaaatatttcgatattttattgtaaatttccatttcaacctgaacggtctccaccaatttttgccgtacagtctgttcgaaaatcaaatggcggtcattttgttccttcttttccttcataattttgtccgtttcaaagcgcaaagtttccatttcggccgtcgcatttttcaaattcttttcgaattcgtttttctctgttttgagttcctaaaagttgaaattaatacttttttcctattacggtagggtctaaccttaatctcagtgcgaaatttgttctcctaaaatagtaaattgtacttaaaagggtaatccgctgacaatgaacaaccttggccttcacatcgtttgacatttcctgcaaataattgatgtattccggttccaactccccaatttctttgagacgttccatagcctgcggcatcgaaatgtctttgagtgaggctaaaatgaaacaaaaccgataggcgaataaattaattaattggcgtttttcgtcaaattgaagtgcccaccgctctttttgctctttttcgccgttggctgtgtttcgactgccctttcttccgtcacttcttcgaagtcgttttgcctcttttcctcttcgtttcccaatggtccatttggaatttccttttcctccgctccttccgaattcgtctcggctttaggactctttgacttcattttctgtttgtgcttgtcgcttttccgtttttgcttcgaattcccttcctcctctgttttcttctcttcagagtcaaccatttcgctctttcccacttcagcagatggcatttcggactgactaacgtttactaaaacaaatccaaaatgaattattgttgtaaaactgtaattatgtcttaaatccagcaataactgccgaatcatccgaaaggaaggttttctatatggaattttaggaatataagaaaaaggatcggtcttttcatttcagttttttgcatgtgttcaaaagcactttttgataaccaaaaaa

SEQ ID NO: 10337 - DNA, 3597 bp, Heterodera glycines
catctgtgactgaattgcgcagcagcagcaagcagcaaaaagacaacaaaacgattaaaacataaaattttcgcgaaatttctggaaaattaggccagcagaggggggggggttataaaaagagagcaatcaaatttattttctcttgaacgcaaaatttttcaaaaaccgggaacggaccccctacccacaaattttttgaaaaccaggaacataccccctacccacaaattttttgaaaaccaggaacagaccccctacccacaaattttttgaaaaccaggaacagaccccctacccacaaattttttgaaaaccaggaacagaccccctacccacaaattttttgaaaaccaggaacagaccccctacccaaaaaaaatttctatccgaacttttcgaaaaatgggaacggactccctactgcccaaataaaatcttgatctgaaatttttgaaaacccagcacagaaccctctgccccaaaaaacccttcaaattctgctttcttcttcaaccaattttcgcactcctacccctacacttttgctaattttcccattcccacagaccgcgccggcccaattgaaaccaacatcagaaaactgatgatgatgaacagttttctgtgacaaatgagaacaatcatcatcagcagaggattataattgtgtgggagagagaatggaaatgaattgagaaagagcgaacaaataaataaattaataaaacagagggagcgacggacgcatttatttatttgcatatgcaaaattttcgcgcttttacaaatcaaagcaaaaagcacagattggaatcagcgggggacggacgggtcggggcgaacacacaaaaaatttatgatgatgatgagctggaaaatatgaatgcaaaatgtgatgatatatatgtagatgcgcgacaaaacgattgaccggccgaccggcggacggacgaaagggcagcgaacggaagaaatgggagaaaaatgaacaaaaatgtggaggggcaaggaagaaggatgaatgcccagaggtggacgcaaaaaaattttttgtttttggcatttgaatttttgtaacatttttttaaattttcaatttcctccaatttggtttccccgtgggaaattaaaaaaaattttttttttgacccttaaagatcgggaaaaaaaagctgttaataaaattttctcgagaatatatttaaaaaaaaaataattgaatttgagcctttctgttcgagttcagcagctcatgggaattggtcaaaattgatgaaaaatcgggcaactagggggttattgatcagaaacgtgttcaaaaaaacgcattgattgaatagggcctagcgattgatgaccttgggccctgcagatgcgactggtggtgggtggtgactcatattttcgcttttttttttggtcgtcaccatcaccaaacaaaactaacattttttgcattagtaacagtttaccctagataaacctcacttgaaccccattttcctagctaacaaaatttcttggggcccaaacgtgggggcttaaaaaaatctcgacctcaatttataaagttcaattcgccgagatttttgcgcctaaattccaataataaaaaccaattttgtattaaaaagtgattgaatggcccactcccactcactcattaattaataggtatattaaactggcttctttctgcgttcgttgcggggcgctggaattttcgcagaaaattttgtgacagatattttaacgacttatatatgagtggacaagaaatgagtgtgaatgcaatctgtaataaatctcctcgttccacccccccacttcaaccttaaataaagcctatttatgtacatagtatcaaattttggtgcaaaaattttttggctcaccgcccccaaaaatggaggtgtgcgcggcgggtcatatgatgacagcagcaggcatagtaaaaatggtgatgtaattaatttattagaattttttttaaacagacagaaagaaatctgcaggctgtgccatgacaacttttaaaaattgatcgttactggcattttaggagaggccgccgatccggggaacatagcctaactccagtgcacagactgaattattattttttttttgttagaattcggattcatatcccccaaatttttgaattttctaatgaatgggtcacactaatgattagcagcatcccgaaaagccaagcagaaggaggatgggaaaagggtgggtaaagtgtccaatccaatccgtaattattagggatgcaactttagtgatttaactatatttttttgctcgattgttttgaagaaaggagctcaaaaaatgcatttctgcgttgaaatttttcgatttggatctcactatcgatcactagaaatcactattttcacgcttcgtcactaaaatagtgaaaattcactattttggcgttttgttactattttttaactatttcgacatttttcagagattttattagcaaaaatgcaataaaatcaaaaaatacacccctaagaatcgatctaaaaaaatttcaaaaaaataaacccctaagaatcgaccaaaaaatttttttttaaatattggaaaattttttcaaaaattctcccccaaaattttttttcttgacaaaatttttgatttaaaaaatgtcaatatttgctaagagaattttataaaggaaatgtagctcatttgcaactgcaaccaatgaataaaaattatttttgcttaatttttagctgaaaattaggtcactatttgtcactattttggactttttgtcactattttggcatttttactcactattttagttaactatttcgggatttttcgtcactaaaagtcgcatccctagtaattatggtctgctaataaaagtaagctatcacagagaggtgatcaaaaattgtgttgcaggactaattaagacactcctcataacccggtccaaaaagttggctcattagagactgaaccggccgctccgcctctttcgtgcaatttgatccgctaacattaagagaacatttacacaccaacataacaatgatgcgcacttacatcatacagtcagtctcactcattagtaagtaattaatgaattaatgggttggcactgtcccaaaactcaaagtccgccgttttcgtcgcccccccccccgggcatatgactgagacacaaaaaaaaagtgaaccgccgccgtggcgacaattttcatttatgggctgctagtggtcgcggcgcaacaaaatttttattaaaactgtgcgcaccgccgcgcggttggcaaaatatgcatgcacaaaaactcattattcgttgaaatgattacacacgcatttatatagttatgtgtgttaattaccctaattaacaaaatttgtcgttcagagttggtttcaacgacgcgcgcgcgcctttgacggccaccggtggcgggaagggatggaaaatgtgaaaaattgagcaaaaaaaaaaaaaagtttttttttcattcgggtaaaaagtacgcctaaagaatgtggcgggagggggcggccgagcaacgaaagcggcgcgccgccttttat

SEQ ID NO: 10338 - DNA, 1668 bp, Heterodera glycines
atcgattaataacggaagagatgagtgagtcatcattttttcaaagattaatggttatcgatgttaaaattctatgaataaacaatatagtaaatatatatatatatatatgtatttaatgcatgggaaaatgggtttcaattcgcatcaacgctaattagtggtaattaaattggattagtgctgctggcttctgctgctgctggtgttagaagttgtcgccccgccgcacatctccggcggggagcagtcatgagatcggacaaaaaaatgggggggggggtgagaaatgggccagaaagttggctgttgaatgttttttaaacatttcgataggtgtgttgtttctttcattaaatttaaatgtgtggtttggaatgtttttcggaaattttaccgccatttttaggtaggatttgcaaaatttggagtgataagaaatgggcaaaatgttaggcctcggatgggaattgaacgcccgccctttccgtattttaaacgcccaattaaaaaaaaattttccttgcaaaattttttttaatttaaaaatttaaagaactttttacgtggaaaatggttcagtgtttcactctctgatcagcttgtgacatgaattttaattgctaatatggacgagatcgacccagaaaaggcaatggaagaaattttttttcaaaatctctaattaccctattaaattaattatgcatgaattagaagaagatatcacaagcatttgcaatgttattaatgaagttgtaaatagttttttaggccttaagatggcttagaataaactctcgagccaaaaggttgaacaaaaaataatgaataaaaaaaggaaaattttccgccgaaattcatcgcaacttccaataatgcttccagtgccagaatttcctcattaaaatgattctcatggagttcggcggcaaggctcttctgacaattttaatttaattgagaatataaggatgtgagtgagtgagtgaataattcggtaatcccacaaattccccaagggtttatctgctggcaatgcttaatgagcaagaaaagcagcctcgagaacacagcatacatataggccagaggcagccaaattaagggccaaatggggaggagaaagaagaattggaagaatttgacggcattggcacaaattggggggggggcgtgggtggacggagtagaagaagccgatgataaaactgacaatgaatttgtaaggcaataaaaacttttgaaattaaaaaaatttggcatgaaaaagacaagaaataccggagcaggttgcaaccgaaaaaattagcaaaaaatttctaacttagaagcaaaaaaaaaaaaaaactttcatatgaaaatgttaagaagaaaaatttaaaaaatttttgagcgattttttcaaagtttttcaagaattatttcagaaatttttcaaatttttttcttgaaattttcttgtgaaaaagattttttttgttttgttttttatctaagtttttgaagtgcaccaaatatacatacaaagaaaaacaataaataaacaaacataaatttcaatttcaaaaaaaagagaaaagaaatttgagaatgcagctgaaagcaaccggctggcagcagcagcagatgtgtgagaaaatgatggaatttggtggaggggggggg

SEQ ID NO: 10339 - DNA, 2402 bp, Heterodera glycines
gcccacgttttggcgcgaagccaaaaattaaaaaaggtaaaaatttgatcaaaaattttacaaaaaaaagtgaaaaacttttaccttccaatgggtttttcaaattttcaaaaaattcacaaccccctagaattttttttcaaacttcccgattttgactgtgttttatgggtgtagattagagatcaacatgtaccaggatccagccctgtatttttcctggatccaggtacaggccatttttcggcaacctggatttttcctgtacatttattttcctgtacttatgtacagacaaaaaataggtacaggccattttttgaaacaggtacaactacggttttttcaaaatgttgatctctagtgtagatcaacattaaggagtgatatgatcaacttgctgtgaacattttgttggtcaacatgaaaaattgacttagcaagaattttttttaatttttctcttcgctatgcttcaaaaaatgtcaaaacattttgaatatttttaaactcttaaattttttcagttgaaatttcaaaagttagtgatacatatggcgagacgacctctttgaagctgttgacccatccgagattcagtggacccacataattgttgcgatgtaatcgcttcggttgaccatctttgctcggcgtgtgtaaccatttggtcaacgcttgggcagcagttggattcagcacatcaaaatcggcaattccggtacttatacagtttgacccacataaaaaaaattttttgtttctaatgataaaaacgtgtttctaggggttttcggggctgctgatcacgaatatgaactctattggacgaatttccgaacccctaacccgaaattcgaactttttttcgaaaaaatttttttgtttttaatccgtttaaaatgtgtcaaaatgcgtgctccatgattctccggtgagctgctcgttcaacacatactcaaaaaataaataaaatttaacaaatttctaaaattcaacaaaatgccaaaatatgaagtgtaaaattggcgcgacaatcagttttcgcatggatacaaaagatacttttaacgaatctggctacgctagaaactgtgcttgaatctgaattttgtagtttaagtcttactttagctacgaattattttctatcatgaaccagctggacaattttactaccaaaaaactttatgaaaaattagcattggatgataatgaattcaatgactggcttatgcagttgggcctattgcatggcaggcgtatatgtccggaatgtagaactgtaatgggacgtcgccagcctaacagaaacagaaaatatggagcgtggaaatgcaaaaatacacaatgtcatcgcccggaaataggctttcttgttggcacattttttgccggctctcatcttgacattaagcaggtgtttacattgtcatatttctgggcgcaggaaatggggactcaggaacaaatgatgcgcgaaataaatatcggaggtttttaataaaaatagggtttcatgaagttcaaaaataaatagggccgcaaacgattgttgattggcgtaatttttttcgggacatatgcaccgaatttttcattaaccaccgtgaacgcatcggtggccaaggtttttttgtcgttgtcgtcgtcgtcatcgttatacatatagtagtttgtcttctcgtaggcatcgtcgttgaaattgacgagacgctcgcagtgaaacgcaaatatgagcgtggcagactcgttgtcaacgacgtttggatttaggcattttccaactccaattactttcctcccactttttgttcactttccgtcgtcttttccgttttgccatttgatctgatcagccaattgacaatatttcacagaacccaattcactttttgatcagagatggcgggctgatcagatgacgggtgaatagttttaaaaatttcataaaaattcttaaaattttcagcttcatctgcggcgactgttgccttttggtgttcggttttcttgcgccttctcagctcggcatcgaaattgcatttgatcagccgccgctttgaccacatcgtcgatgaacatttcaaaatatgcaaaaatggaattgaacaacaaattgctaattcaataggacatttgaagaaaatggcaccaaccaaatgcaaattgccaattccgcaaaatccgttgcccaacaaattcatcggattcggtggcgttcagatcatgtaaaaaacgattagtttttttatgccatcacattttctgcttttcagtcacatcgatcaaaatgccatccgcatttatccgccgttttcgtagttttttcgccgtttgttcaacagatttgtaccttatcacgggcaatgatcgtattttggaatttatctgcacttcgt

SEQ ID NO: 10340 - DNA, 1467 bp, Heterodera glycines
  unsure (1)..(1467): unsure at all n locations
tccaaacaaattgcgacgaccgatgaaaattgctaaaatcaagcatttaatttctgcatttgattttaattttattaattagtagtttcnaattgatataaaatgtatgttttaatcgaatgaagaaatcaacaaaagcatttgagaaaacgagagcatcaaatcagcttcctattggcgagatcgatcatttctcaaattataattatttttcattgctttgatccgcttcttcttcattttcttccgctggcggcgataatggcctaaaattaattaatttgacaatcaaaaattgctgttgcttctcacccaatgcaactagttacacgcaacaactcaaaccggatattgttcaaattggcacccgaataattggcatgccacagctcaaaactgatatagataaattggcacccaaattttcgcggattttccacttaactggcgccgtctccccaattgggtaccgttgcaacagccaattaaccaaattgtattctttgctctgtttcaatgtcagcttctcatttgtcacttcgttcaccaattcaaatggttcaattggcattggttccacacgaagataaaattgaatatggtaactgacagaagtggtggcacgacggaatgtctaaagaaaattggtaaaataaaacgaaaatatggcggtccacctctttgaagtcgttgacccattcgggattccgtggatcaaaataattatagcgatacaattgcttcggttggccattttttgtcggagtgtgcaaccatttggacaacgcttggccagcagttgcattgggtccatcgtcagcaattccttcgcgtaacagagcaccagaatcaattgaaatcaattgatcaagatcagtgagaattgtctgtgaaatgcgacgacgcaaattgtccaaagcatcggcattatgaaagctcaaatgccgaatgtttgttgcaaaaagtggccaaatttcgcgggtaaaaacatcccaaattcgctgatcatcctcagttttgtttgaccatatagacaattccaatttgatgccacttctgtcccaaattggcttgttggaacggagaaatgtgagcacagaatggtcaatgtagctgataaagtgaaaaaatgaagattggttttctgtatagtttttgatttacctaatccaaaggctcttaaagcgaattttggtgggcagcggacggtccggcaatggaaattccacccttttgccatcgatccattcagacagtttcgcttttggtcctttgtccttgcgaattgcgattgctttccaaattgtcaattcgctttttccatcaaaatgcgtgtcaaccaaaacatcgaaacggtcggaaagcaatgccattttgagtccaagttgagcatggtcaaaagatggcagaatgtccatccaaacatccgcacaaatccaacttaaacatgaaaaaaattgggtaaaa

SEQ ID NO: 10341 - DNA, 500 bp, Heterodera glycines
actatttcctccctccgtttcccctctccgttcattatttccccgccccccgcccctccttccgcccgatgcattttcatttctctcctctcccttccttccttccttccccaccctctcttcctctctcttctgactctcgactaaacgtaatcctcttcctccgccttcactcctcccgtcatcgccattctcgaccacttactttccgccctcgggcggcgaaggtggcggcggaggcgaagcaacacaaacccctcctcccgctattcttcctcctcctcctcttccttggtgtgtgtgtgctttgccgtcgcgcctccttgcatattattttgctttcacttcatcgcatccatcccttccccatgctcttcggtctatgaaaattcatccccccgggggagagggggaagacgctcgtgtcggcctctcctttatctcctcaagctaactggggacgacatgacagcaacaacagcagcagaggcggggggggg

SEQ ID NO: 10342 - DNA, 2343 bp, Heterodera glycines
aagtccgggcgctcattttgccacaaaatttacgcctaaaaaataattcaacaaaaatttctgtcaaaattttattttaaaattatttaaattaattaattattttattaaattcccattttaattgcttgcctcctttaatcattgataaacttgtcaggtttgtggtgacatccatggccaattttatgacctcatgaaactgttcgaggtcggcggttcgccttcgtctacaaaatatttggtaaatttattttgtgccaattaatttggctggcattttgccattaatttaatttttgaaaatagcaatgttccattcaatttttggcattttgcccgtgccattatgtgttggtacatattcagattccatggattatcatcggcgaaattctatgataaacagctttctttttactaattcccgatcccgaattttaaagaatctaaaccctttaaaaatcccctcagggtgccaaaaccaaaatttgtgccaaattcagcaatttaatggcattttttcagttcctcggcgactacgtggacaggggctacttctccattgaatgtgtgctttatctgtgggccctcaaaatttgccatcccgccacgctgtttttgctgcgcgggaaccacgagtgccgacacctgacggaatatttcacattcaagcaagaatgtatgtttggatggcatggcatggcacaccgctaaacttgacgagactctcgagcagggaaagccctgaccttttggggtcccgaattcagaacacacagactctcgagtagagcttttcaatcttagcatccatgacaatctcctgagtctcgaccggagagagccgagcccggcacttttgagtatcgaattcggaacaaaatctagaatctcggcccaagcgatcgattgagtacccaagcaaaagcgacaatctcgggcggagataggcttggcctttttaagttcaaattgttggggtgttgccctgctggttctcgtccgagaatatttgaataataagcatatcaaaaatcccgtctttgccaactgatgagtgccaaccggattattttttgggatttttagaaccgggattttgttaatgcttgtatactctgtacgtggatcataaaatgggaatatttttccccattgatcacaacaatcagcacacactgattttgccccgggcaaattggcccccattatcacccactaattagtgggataatagtcaacaattaacaactaattgctgtttcctcccgcgcccatccaggcaaaatcaaatattccgagcgtgtgtacgacgcgtgcatggaatcgtttgacgcactgccacttgccgcgctaatgaaccaacagtttttgtgtgtccacggcggactgtcgcccgaaattcaaacgctggacgacatcaaaaaggcgagcagcagcagggcaggaggagggcaacacaaaatttttttttcgggattcttgagaggatttttcaggggcttttacaggatttgaaatccaatttttaagagtttgaacaattccgggagcccttacaaaagacttggcatccgaatcctgcgaaattagacgagagtcaattctcgacccggccctccgctccctaaggcatattcatggatagggctggattcttaaaaaaaaagaatattccgtcgaaacaaaaatttcattttaagcattttggaaaaatgatttttgcacattttagcacattttttggcacttttgggcggcatttttaatatatttttaaacaccataaacgacggacgtttgcattgcataaactagagtgccacgggaccgggaatttgggcaaaaccgggaccgggacttgccgggacctgagaagcggggaccgggacctcgatttttcttcgggaccgggaaccgggaccaaccgggaaattttaaaaattcaaaaaaatttttaaaaatttaattttaatttatttcaattgaaaataatacaaaattaaatgtttactttgtttttttattgaataaactccaaaagttaaagctaaattaaagcaatgaaaattcaaatcaaattttcttcagccatttcaaacaattaatcatcatttctggactaaatgatcgtatattattagaaattcagatttgcttttaacagcactttttttcgacgcgctttttccaaaaacctttggggaagaaagaggtccggcggtgccgttaggcgccgccgggggaaattttgaaaatttgagtgtgtaatttgttaacagatttttaacaaaaaaggctggtttttgggattactaggctcaatttgtacggattttc

SEQ ID NO: 10343 - DNA, 3801 bp, Heterodera glycines
gaattttttcaaaaaccgggaccgggacttgccgggacctgagaagccgggaccgggacctcgattttttttcgggaccgggaccgggaaccgggaccaccgggaatttttaaaaattcaaaaaaattcaaaaattttttaaaaaattcaaattttattttttttttcaagtgaaaataatacaaaattaattttttattttgttttttatttaataaaatcaaaaagttaaagctgaattaaattaatgaaaatttttaaacaaattttattcaatcatttcaaacaattaattattttggactaaatgatcgaatattattaagaaattcagatttgcttttcacatcacttttttcggcgcacttttttccgaaaaacttttggggaagaaagaggtccggcagtgccggtaggcgccgccgggtgaaattttgaaaatttaagtgtgatttattaacagattttcaacaaaaaaggctggttttggggattaataggctcaacaatgtgtggattttcatttaaaaatgataaaatatgtgtcaatttaaaaaaaaactatgaggaatcatattttctctacaggaaacccacgagtgtataaaaagaaaattcaaaataatttaacttctgtagagggatcgaaccagggcaaagacgaagggaaagtcaaggagactagccactaggccatttgcatacctggcagtgttatttttaaagaatatattcattattttttttatttttttcctttgactctaatttcatcactaatttttcactcagactcccgttctcaccagtgcttgtttttcccggttcccggttgccctaccgggaccgggacctgagcttttcaaaatccgggaccggggcctcggatggccgggaattcccttcccttcccggcccggtcccgttcccgcttcactctagcataaagttttggacatttaccacactcaaatgttttcgcgctgaaatggccgcgctaaatttaaaaaaaatgccattttagctggacagattcaaagagccgcccgcatttgggcccatgtgcgatttgctgtggtccgacccgctggaggactttggcaacgagcgcaactcggaatcattttcgcacaactccgtccgcggatgctcctacttttacaggtggtttaaatggcactaattaaccaattaaaattggttaattgtttttcggtcattaatgttaattaattaattagtattttttttcttgaagattattgttattattatctgaggcaatttgtcactctaaatacatcaaatctggcatttgcatattatcacgcaatttggcgtccctttgcgccaaattaggtcttcttaattgggcaattagcgtgtgttattcattgagtaattagcgtgtcaaattaacttccttaagaaaaagcgaaggtctttcaaaattttaaaagttcaacaagattagcaatctaaaaattgaaaaagcatcaaaaatttttaatttattttccctatttttaattttcgcgcatttatttttaattaaattttattttatttttgccgcttaaaatttcacttttctaattatgcctctgattttgttcagttatgctgcctgctgtgattttctacaacacaacaatcttttgtccatcattcgagcgcacgaagcgcaagacgcaggtcgaaaaatttgaaaaaatttttgaaaaatttcaaaaaattttccaaccctctaattaccccctgaaggctatcgaatgtatcggaaatcgcaggccaccggcttcccgtcactgatcacaattttcagtgctcccaactatttggacgtgtacaacaacaaaggtgcgtttctttgggggttggccaggcgcgccattgaaaattaaaaaatttttttttgaaatatttccttgaaaatttttcaaattgacatgtcttttttaatttttttctttttttcgcgtctctctctgatcgcttttattattttgatcattccaaacactgatcaaattgtgccaatatttgtcatttttgattaattatgcaccaatctcgagcattccattcaccagtcatttatttttattttttggaattccgagcatttattagttttattttttggcatttctcgcgcatcaatttacccaaacattgttttcggcatttctctagcattcacaatattttagttccatttttggcattctcacacacacaaatttctatttttcggcatttctcgtgcatttgttgttcgaaatttctcgcgcattaatttctagattacattgcttttggcatttctttattagtttcaatttttggcatttctcgcgcatcaatttgcccaaacattgttttcggcatttctcgccattaaatgtgatttttttgtgatttcattttttttcaaattttagctgcaattttaaaatatgaaaacaatgtgatgaacattcgccagttcaactgttctccccacccgtattggttgcccaatttcatggacgtgttcacctggtcattgccatttgtcggcgaaaaaggtgaccaaattaatggaataaatttcgattaattaataaaaacagatcaattcataatttcattaattaacaaaaacagacaaaaaaaaaattttttttttcatttattttaaattcaatcattttattaaattgattaatttaatttatatttaaattaataaataaattaatttttatttaatttatataattccttttttaagcaatttaattttttaaaataaatactttaaatttacatttaatttaatttaatcattaaatttaaatttcttttatgattaatttttgcttttcagtcaccgaaatgcttgtccacattttgaacatttgttccggtaagtggagtaacacattctcattcattttaccatttgttcgaatggttagacttgcattttttggagtttcggcaaaaaatcgaattaaaaaaaattgaaaattcaaattttggggatcagtcccattggccattgaaatttcacacaaattttgaatctttgttccaccgtttttcagatgacgaactgatggctgaaggcgacgacacttttgaaggtcagtcaatgccatagacccattaatcaattaattatgcgtaaatcaatcaccgttctttttttaattacgctaattaaccccatcaaaattacttaaattttcaacaaaaaaagccatgtgctgaaaaatgtgtgcaagattttgtgttgagtgtgctgtttttgtgtgtttttggctgctgctgctgcgtgtgtctgttgcaacattttcttccccgcattaattagcgcgcactaattagctcttccgcattaattttaattggccaatcacgtttttcaagacacccattaccaaattatgcctagggctgacagttttgcagcataaataatcaccaaaaagatgccaaaaaaggcacactaaaaacggctctggtttttaatcagggtgccgattttttacgtttttttaaatccctcagaaatttcaaaaatttcaatccttcgagggctatctatgtgtgtatgggtatgtgtgctgttttttggctgtctgattctgcttttttttttaatggaatgaaggatctgtgtctgttgtttttcgcaaagatttttaaaatttttatttttataaaaaatgaaaaatttttattaaaattaacattttaatttgttttttttctcgttcattgttttataacaaacaaacaaatttaattgtt

SEQ ID NO: 10344 - DNA, 2389 bp, Heterodera glycines
  unsure (1)..(2389): unsure at all n locations
atcaagcaatgcatgtgaatgttctgccgcaaatgaaggaagtcacagcgaagaaagaagagaaggaagagaaaaagacagcccatttgatcagcccatttctctaattaattggtttgtatgttttgtatgtaggcccaacccaaatgtgatcgtatttaagccccatgaattgttcatttcatggctccgatcgcgcaccgaataaagagagaaaacccagcatttgggtattcggtagcccctccccctcgccttcctctcccacccccaccccgaaccatggacgacgaactgtcccgttgcggcttgtgggccgagccgcaacaagtggcgaccctggcagggacattttggtggggttttggggtttgtgagcaggggtagggggagcatgccggccccacaggtttttcgtaacctgtggcgtctggcattagcgctattccattttgcgttccgtgtttctggccccttgggttttttgtaacccaaggcgcctgcattccgcgccatagggcccctcgggtcttttgtgacccgtagcgcctcgcctttccgcgccttgcattccgcaccgtttggcctcccgggttttttgtaacccggggcgcctccattccgcaccatatggtcccttgggtcttttgtgacccggggcgccttccattccgcgccatacggcccctcgggtctctttttggcccgtggcgcctcgccttccgcaccacagcccctcaggaaagaatggtcatgcgcttaggcagcgagcctatctcgcactcattggcggcattgtgccgagctcacaaagagggcagtgagcctaatctgcgcaaattgttgaagcgcattggagcagcgcatgttgaagcgcaaattggagaaagcgcattggagaagcgcattggagcagcgcaaattgttgaagcgcaattggagatgcacaaattgaagcagcgcaaattgagaagcgcaaattggagaagcgcaaatgagaagcgcaaattgaggaagtgcgaatgaggcggaagggaagcgaaaattgtcagaggaagcgaaaattgaggaagcgcagaccgaggcggaatggaaaattgtcagaggaagcgcaaattgaggaagctcaaaccgaggcgaaagggaagagcaaactgtctgagcaggaacaaaaagacagcgcgcaaattgaagcgaaattggaacgcacattgaagaacgcaaatgggaacgcaaatcaattgcaggcgcaaactgagtctgagcgagggcgcagactgagattgaacacaagcgcaaacagaacgatggcgcaaactgagacgaccacaggcgcaatactggagaaccactaagtggcgcccgtagctcagttggacagagcactcatgctttgaggagatcgagggttcgagtcccaccgggtgaaatctttgtgttctacactacgagcctggctgaggccatcacgaagtcaaaggccatgggcgctggggcccattgtgaagtcaaaggccatgggcgctggggcccatcgtgaagtcaaaggccaagggcgctggggcccatcgtgaaatcaatggccaagggcgcttgggcccatcatgaagtcaatggccaagggcgctggggcccatcttgaagtcaatggccaagggcgctggggcccatcatgaggtcaaaggccatgggcgctggggcccattgtgaagtcaaaggccatgggcgctggggcccattgtgaagtcaaaggccatgggcgctggggcccatcgtgaagtcaaaggccaagggcgctggggcccatcatgaagtcaatggccaagggcgctggggcccatcatgaagtcaaaggccaagggcgctggggcccatcatgaagtcaaaggccaagggcgctggggcccatcatgaagtcaaaggccatgggcgctggggcccatcgtgaagtcaatggccaagggcgctggggcccatcatgaagtcaaaggccaagggcgctggggcccatcgtgaagtcaatggccaagggcgctggggcccatcatgaagtcaatggccaagggcgctggggcccatcatgaagtcaaaggccaagggcgctggggcccattgtgaagtcaaaggccaagggcgctggggcccattgtgaagtcaaaggccaagggcgctggggcccattgtgaagtcaaaggccaagggcgctggggctcattgtgaagtcaaaggccaagggcgctggggcccattgtgaagtcaaagggccagggcgctngggcccatcgtgaagtcaatggccaagggcgctggggcccatcatgaaagtcaaggccaagggcgctggggcccatcgtgaagtcaatgcccaagggcgctggggcccatcatg

SEQ ID NO: 10345 - DNA, 1224 bp, Heterodera glycines
ggcccatcgtgaagtcaatggccaagggcgctggggcccatcatgaagtcaaaggccaagggcgctggggcccatcgtgaagtcaatggccaagggcgctggggcccatcatgaagtcaatggccaagggcgctggggcccatcatgaagtcaaaggccaagggcgctggggcccattgtgaagtcaaaggccaagggcgctggggcctattgtgaagtcaaaggccaagggcgctggggcccatcgtgaagtcaatggccaagggcgctggggcccatcatgaagtcaaaggccaagggcgctggggcccatcgtgaagtcaatggccaagggcgctggggcccatcatgaagtcaaaggcagttgtgaagtcaaaggccaagggcgctggggcccatcgtgaagtcaatggccaagggcgctggggcccattgtgaagtcaaaggccatgggcgctggggcccatcgtgaagtcaatggccatgggcgctggggcccatcatgaagtcaaaggccaagggcggaaatgcccaccagcaaagcagaagagccagaaaaagacacaatgaagtgaaaaaggacctcatcgcacacgttggtcaagcgtgggaatgtcgcggctcgaatttagccgcgactgtccgatgatcggacagttgtcgaatggaaagaaatgcggggggagaaggaggaaaaaacaggagaacgggaaattgggcgatgaaacgatgaaaaatgggcaaaaaagtggcaatttggagagagaataacagctcaatcgaccaagcggcgcacatgaatgagcagaaagctgcgatgaaaaacagctgtcacagccaacccgacagcagaaaccggcccttcccgcccgaacatggtccgatggggacaaaaagtgcacgtgaatggagacaacatcaagcaatgcatgtgaatgttctgccgcaaatgaaggaagtcacagcgaagaaagaagagaaggaagagaaaaagacagcccatttgatcagcccatttctctaattaattgttttgtatgtaggcccaacccaaatgtgatcgtatttaagcccgatgaattgttcatttcattggctccgatcgcgcaccgaataaagagaaaaaaacccagcaattggattttcgaaggggcccctccccctccccttcctctcctacccccaccccgaaccatggaagacgaaccgtcccgttgcggcttg

SEQ ID NO: 10346 - DNA, 1720 bp, Heterodera glycines
ggcaaatgtcgtcgcacaaaaaatcacccaccggcatttaacgacgtgccgctgaaacgatggaaacgtcagcaacatcaggggcacacacgcttcagcaaattccaacgccagtaatggcgaacattccgacaaaaaacgcgacaaaaaaagtgaaaaatctatttacttttttacgcttttcacatttttggttttaagcttgtgaagcgaatccgccatgaaattgaattgccgccgccagtgccgttaacgcttcaagaattggaacttcccgagcagtaccgaatctacaaacgcaccgaagaagcgcaggagcttttccttctggcggattcaggaacatacaccaaaaatgggcgagacggacaacagcggtgtgtttaaggggaattttcagccattttttaattttagaattctcatttttggccgactttctttcggaaattgggcttccgaaattaagtacatttacgctgactgaacctttgcaagtgcaccgacgcacttttcacaactttacgtcattttggcgcggtacttttttgtcaattttgttttacattcgtttttcaccaaatttcagtcgtggtgactgggtgtttccggtccttcactgcctgctgacgtgcaagtcgtagtccacgtacgaaaagatgtttgacatggtcctcaaccgctggccgacattttcaccaacaaacgcgtccatggacttcgaacaggcgatggtcaacgcactccgtgcgaaacatccacaatgctcaatcaacttttgcctattccatttggtgcgcaacatgaaagcacgtcttaccgacgagcaaactcatgtaagaaattttattacttttcaaatgctcaagtttagcgtttcacaacggacgcagcctttgcacaagctgccaaaatgatcacttcattggcgtttgtgccgcttgaggaccttacaccggcgctggcagccctagaagatcatctgtcgggtgaacttgagggcgttctcgattggtttgttgagtttaattttttttcaatttcattattgactttaaaggttttaatcaactacgttgggcgacttcgcaacaatggcacacgcactcgtccattgtttcgtcctgaagaatggagtgtgtatgagcgcacaatgagcggcaccaaccgcacaaacaacttcgccgaagcgtaccatcgcacgttgcaagatgcgatcggacacggacacccaacaatatggaaattcatcaatattttgcgtgagcaccagaaagtaatcgacgttgacttcgaacatttccttgccggaaatgctccgccgccaaaagcaaagcgctaccgcgacacggacaaaagaattctgaggattttgcagcgctacaatgaggaaaaagcgcagccgcaaatcgaaaatgatcaccaatatggccaaaaccaaaataacccaaattcgattattgaaatgcttttcgagcaattatcaaatggattgttaattttatttgttaattttatttgttattatattttggataaaactgagatttttaaaaattaagccaaagtgatattttgatgataattgaaaatttcttatatattttttttatctgagacggagttggccccttatacactaagacggagttgtcgagacggagttggctcagacggagttggaacagacggagttggctcagacggagttggccagacg

SEQ ID NO: 10347 - DNA, 2171 bp, Heterodera glycines
ttccttttggagggtcaaattgtcgtcggattggaattcgcagaaccgtaatttcttgcgtctctccaattaattaatgaattaattgttttttattttaaggtgtttgttgcctttcaattggacctttggcctcactttccttctcccattggtccttttccttggcactgccaccggttacggtgcctactccctttggtacggtaactctcttgccgccagttatggtagcggcgacgtttccctcgcgcttcgccgtttgcttcaccggctgagcagtgcggccggcacaacgcttttggtgctgcttttctcctttggcaatgcgcttgtgcttttgcagccggccgaaatgcgcaggtgaaaaaggggcggagagagaacgaaatgtgacaaattattatgacaatttggcattggcattggcattgtgttcatttttggaaataattgaaatatttttctttaaattccttttttatttctttttccattttttctctaggagtgtcttcctcctctctctctacctttgtttcgccgtctctctgtgctctttcttccgccttttttctcgcgtcagccgctatttgccattcccttgccaaaatgtcgtggccaattctctccgtcaaaattcgctcgtccgcggcatcgacgggtgccccccgtccgggctgaccggaaatttcggtgatctgcagaacgccaagcgaggcaagcagcacgcgccagtcattttgctgcagtcgggtgaatgccaagcgattgggcccaatggcatttacggaaatgggacgggcgcaaatggcggcacaacgggcggccaagggatggacaggtgagttatcaatggtgggaaaacctgccagatccctagtgattgcttcagacaatcgctgttgcgccgttctgttgtcggtgccgccgcgtctcatcggcctgaattgtcctccgcctttccgtccctcgcgcccgcccaccagcgattgtccggcaccgtttccacttctgccggcactgttctgctcgagtcggatgacttggcctctctcgaccgggccatcgcctgcggcaacagtgcccaccaaagcccccagggagtggcacaagtcactctttcgtcgttaccgcccaatttgttcgcggaagtggacgacgacgaggcggaggacgaggatttggatgcctttttggagaatggaacggataccctcagggcattgggacgacagcgaaacgacgcgaaacgggacacgtccccccaacacaaccaccccaaccacccactcgtcagtgtggtgtgaggggggggaggggacagtgccaccgaacgaatgccaaagacgcaacgaacggctgctgacactttctcaccattcatatcatttttcactttagtctcaagactttccaattgattaaaattatttaaaagtgtttaatcattaatttatcatatcatttccaatggaaagtcttttttaatataaattacatttaaatttcaaaatgaataaataaatttgcttttgtcagatgctttttcccgcactctttgcaaattcccttttcccttggggcgccatttgctaaaaattccttcgcttttgccattttcactgattgaattccctctaaaaaatggcttggctttgaagtcattttaagttttttttcactctattaattgagagattggtcgcttcgcttccccttttaaacattaaaaatggtttaaattatgccataattttctgcaattttggcccatgcccaactcttcccaaaagtgccaccgccgtcgtcgtccccccgtcgccgccctccgtccccccactcgcattgtcataattcctccttcatcttcctcctcttcttcttcctcttcctcctctttttcctcttcatcctcctcttcttcttcttccgtttccaccgtttccaccggtgtttcttctcgcgtctcgcgactccgtgccgaatttttcgaaaattcgccttcaaaaaagcctttgcataaaaatgttaacacagtccttgtcgaagaagaaaaagaagacgacaaagaacagaaagaagtgatgaagccgcaggggaagaaggccaaaaaagcgaagaaaatgagagcggtgggggagaaaaaacaaatgtgaattttaatttaa

SEQ ID NO: 10348 - DNA, 1697 bp, Heterodera glycines
tgagagaaatcggtgagaagaaacaaatgtgaattttgatgtaattatattttataatatttaatttttttttaattattttcagccccacttggcgctttttccctcctccattgtgcgagcagggcgccaacaaaagcaacagttggccaaattcacggaatcggaaatccatcggcgggatggctgcccatttgggagagacggaagagaattgggacaatcgcaacagaggtaaaagagaaggcggggcaaattggaggacgaaaaagcaaagttattgggctgtccattcagacgaagtgccaaagggatgaagccgagcgacgcaagaaacagtttgtatacacgaactcgaggaagtgagccatttaaggcatttgggcgaggggaggggggggggcatagaggctgaggaggtaaatgggtgccattgggggcaggggggaccttggtcaggaaacacggagcggcatcggcaactcattcattcactatcaccgccgatttttcaattttttatttaaaatttaaaataaaataaataaatgattttagagcgaacaaagaggcgcgaatggagcaggggccgcgcgaatatgaggtgagttgagaatgacaaaagtgaacgtaacgaatgaatgccacttgaactgattaattaagtcctgcaaagagattggcattgacttttgtgctcggaccacttcgcatggcattccctttgtcgggtgagaaaaggcattccgtcgtcactcattagcacttttgttgatcattaattatcccatttattaattgtctctttctcgccccagggctcattcgttcttcggtcgtcccttttgggcttgtgtcactaccatcgctttctgttccttcatcattcagacgtatttcacattgtccgattacctcgaatatcgaacaatcatcgaaatgcaactcaaatttgagccgggtttggcactttgcattccattaatttgcctaattttatttgattttcagcgcctttccccgccgcaacaatgtgaaaatgaaatgattttttatatttttaagggataattcctcatttttcagatgcaatttgaacgccttcaaattgagcgaagtgcgcaaattcgaagagattgagcagggcatcaaattgtgggagaaggtgaaaaggagaaaaggaaaaatgtggcacagtgccaagtgaatgaaacaggtgaccacaattggggttttaaaggcaatttcgacgctgagtcgactcaaagagacgccgctgcgtcgtcgccgacaagttcactaccgacccatttatgtgcggtaagcgcaaaagcattaggagccaattggcaggttttggcaattaattagttgattaataaattaattggttgaattaatattaattatttaattaaatgatcaattaaatagctagttaattaattattagttgtgtgtgtgccgcttcggacgaccaatgcgtgccgcaaaggaatgaattggacgtgagaattaaaaattaaattaaaaattaaatatttttaaagcgaactgctgcggtgtgtttgtgctatgaggacgaagagacgggcgacatttggccatgttatttgtattcgttgtggaaggaaaaggcaaattttatttctttaagcggctaattaattgccaaactaactaattaaataaataaa

SEQ ID NO: 10349 - DNA, 1398 bp, Heterodera glycines
ttttgaatttccatttcatctttccttttcagtccctttgtttgtgtcagccaatttcccacttttgcctgcgcattaagccgggccaagagattcactggtgaaatgcaattgaattcaactttaatttcgaccattttctgcccaggagaaaccccaacaattacacaatttatccgtccaccgtaaaaccgccgacttcggaaatggaaaaggcatttggacttgaggtaaaatgagcaaaaaagcaaatgggaggaataatatgagaaaatggaaaaacatttaggacctgaaagaccgaggagcgatcacaacaaagacaaaggaaaatctgattttcttgggtaagcattcgattgataaatcaaatcccaagggatttgctcaattgggtttgttcggtcggacttgatcagaaccgattcgatcggttgggttttcctctgatcaatgagtttaatcgacaaaatttgtcatgtgccgtcaatttgttcatccgaagcttaagtcgccggaatgtcaacggaagtgcgcaaaagtctgagctatgggctggaagagtttgtgttgcgctgctctttcaattcgcgcgactgcgacttgaaaaggtgcggaaaatggcgaaacaattcgcaccatttgaacaaaatatcaactgtacattaagagactttcaaattcaaattgaccccgtttatggcaattggtaagtgaaattggcaaattgggggacaatgggagggacaacgaaagatggaaatgccaatgccattgacagttggactttcaatttcaatgattcggtggaattgaaaaactcgcgcgccggtccgatgtacggacttcggctattgttaaacgtcaaccaaagcgattatatgccgacaacagaagcagcgggggttggcataatgagacaaaatgtaaaattaaattaaatgcgttggaaaaggtgcgaattgtcgtccacgagcaagaccaagagccattcccggacactttcggtgggatttaccggcgaagaaaatgccgaattggcccctttcccaaggctattccgcgcccgtcggcttcgtctcgtcatttggcctaaaaactgttaaaccaacaattcaaaaagtagttttggaaaaataaattcagaaaattttgaatcgcctcgacgcgccttatggcaaatgttcggacacttttcggccccacggttatatttacgcggaacactactcgcccgaggtgctccgtactttgcgtacagtacgctagcttccgaattcccctccctacaaaagggctgctaccgtaactgcttccagcatataatcctcgaacgttgcggctgcggagacccaagtgaaatatcaaagggggaaaatgaatggcccaattaataaa

SEQ ID NO: 10350 - DNA, 4717 bp, Heterodera glycines
tggtgctgttggtgttccgcacttgggccaacatatgttggaagtccaacgggcggccgtccttctcctctatgtacgccgggtcgaggccgtcgtcgccaaacgtgaactggaccacctcgttggtggaggtgcgcaccgtgttgtcatagctgccagccaaatcctggcacaattgaagcgagtagaaataataatacgataggctaattgtaaatcatttttaatgttagaaacaattttttgggaaaaaaaatttggtttaaaattcaagggttgaaggaaggcctttgtaacaacaaaaaaaaattatatcaatttttaaattaatcaaaaattgctaaacaaatttttagtttccccgaaatttttttattatcccctccaaaaaagccataaaaaaaatccgctcaacccaggggcagaaaatttttttctctggaaaccggaaattccgaccacataaattttggaattccggtcgaaaaaggatttgaagaattcctgaatcggagtctgtgtcccatccgctgaggcattaaatttaaaaaaaaattgcgaaaaaaacgcacttccaagcacttgaccagccgtcgctgcatgtatccggtctccgccgttttcaccgccgtgtccacgaggccctcccttccgcccattgtgtggaagaagaactccgtgggcgtcaggccggaatagaacgaattctccacaaaacccttcgcgtccggcgcccggtcgttgcgctcaaagtgcggcagggagcggttctgcgaatcaaaaatttccaagaaaaaatttcccagcggcgccattggcaccgccgaactgtattgtaccattattttttgaaaattagaccccaaaatggcaaaatttgggcatggttaatgtcgtctgttttttaactaagatggaagaagacgatttaatttttgatccaatacaacggaactaccaaaaaccaaccgacctcaaatccgtcagaaggccgtttgccggagatggactgttggccgaccagggcgatcatctgcgcaatgttgatgaaggatcccttggaaccgcactgggccatcgtcagcggcgcattctttcgactaaaaaaattgcataaaatttggccaattttagacggcctttttttcggaagttttatatgattttacaataattgggcctcgattaattgggtccttggacctgtttttggtgtataattactttcatagttgtccgaattgaacctggcgaaaaatggcaaaaaaacaacaacttttttaatacaaaatttgttcgtttctggcaattgtgaaaaaatttgtaccaaaaaattgtccgggacccagtgacggtctcccccgccccaaccgagcacatgaaccacccaaattctggcattgcacggtacacccacctcaggtactgcttgcacgccttgcccgcctggtcacggatgctggacagctccttcagaattttggactccaactcctccaccaggcccaagtccggcttgtccttttggcgctccaagcgcatgcttttgttcagctggtcacaaattttgtagccggtgttcagcagcacacttttctcttgcaacaggttgacattgggcttcacatcgccaatgcctgaggatggagaaaaaaaaacaaaattatttctgagagtatggcaggcgtcgttgcaaaataagaatttttgggtgcactccaaattttcccctgtaattaaaaaaatagctaaaaaaatttcaattttttttcaaaattttggcggtaaaattttgtcccggcgtaatttcggccagcaaaattatcaatttttcaacatctttttttttcacgacattttcaaaaaagtattctaagttttttttgtaaaatttatgtctggaagggtggggatggaagtcaggctcaagctgaaaactgaccgattgagaagccccggttggacaaatagacggcggaaatgcgtgccaaccgccacatcgcctcgatggcatggccctcgccccaatcgcgcaacaaacggtagaaaattgaacatttgctttcagagccgagcaatgctttgtcaagcgaaccgcacagcaactgattatttcggatgatcacaaaggtgtcctgattgtgagtgataattgaaacaaagaaatttttaatttttaaagagtttttgcagaatcgttttaagtcgttggaaaaaataaaaaaaaaattcctttttctttagaaaataagaactcatgaaaatatttacaaattgttaaaaaaaactcgttagaaattgaaaaaatttttggttttccggcgaggtataatcccgctgcgaatttgaccacgccatttttcaaaaattccgtaacacttatgggcaaaatttttaaaactcggttttgtaaatgtgttaaggacaggacgggaaaattgtcaatttgcgatttcaatgaacaattttatttttcatcaaaccggtttccccaacacacttaaaattttaccaaaatttttcaatttttatgtttgtatctttgcaattttccgtacatttggtgtgaattcgccctcgtccgggttgtgcattcggtttttggtggacaaattcagacacacttccgtgcctttgtagggcgcaatgagcagttcgataagctggaattattaaagaaactagtcaaatgaattttgaaaaaataataattaaaaaaagaattatcaaaagaaaattaaagaataaaatataaaaaaataaattatgaagaatttgaaaaattttcatattttttaaagttaaaatgcaaaattttcatttttccccattaaatccgcccaaaaaggatcccacctgttttccagtccacaactccttgggcctgagcagtgccggcggcggcagacgaatgcgtttggcaccggtgttcgcctccacaacggcggccgcaatccgttgcacttcggaccggggcagaaaggtgtccttgtgggtgagcaaatagcccgaggtgatgaaatctgaggatggtaaaaaaaatataaaggaccaaaacaaatttaggttgagacgcaaattaatggacaaaaattcaaaaggaattttaaccatttaatcacaaaaacgacaaaaaaaaattggaaggcatttttttaaattttacaaattcggaaaaggttcataaaaaattttaaatttttttattaaaaaaggttcatttaaaaattttatttttttttttgcaaaaattttgattaggcagggtccattacaaggattgaagaaagtaacccaaaaacgaactcccgactattgaactcaatcattcttgtcaaaaaaaaaaccccaaggtgtaagacaaagcaaaaaagaatggagcagattattccctctccgccggccgaatttttttttaaattcagaaattttattaaaaaaattatttttaattgacattttctttcctccgtccaaaattcaccttgaattgcggcgatcagcggctggcccgcccgggggctgaccaggttgtacttgaggcccatcagcagcgacgcctccgccttggcctcgtacgtctggggcaagtgcaggttcatctcgtccccgtcaaagtccgcgttgtacggcgtgcaggcgcactcattgaacctggcggaaaaaaagtgggaaaattaggcaaaatttatttatttacataatattattggcagcggatccttcgccatcattcgaaacatttaattaaatttcaatttaaattgctacaaaattttagtgattaaaaattaaatcaaagcaagtcgaaataccaagaaatcgccaatttgtcgtttttgggtcaaatttgatagaaatttacaaaaaattgtattactacccatttttaaattttatttttttttatattcgataacagggccctgccccgcacaacctgaatgtcctgtacggcatcaccttcacccggtgggccatgatgctgattttgtgcagggacggctggcgattgaacagcaccacgtcgtcgtcgttcaaatgtcgctaaaattaaatgacgacataaaaatgttagtaaattcttggttttaatgagttgcttatatcgaaggaatttaaacataaaatttgaaaatgtgggatgtaattttggaataataaataaatatgcaacaataataatacctcgacagtgtcaccaattttcagttccaaggccatcttttcgcgattgccatacctgtggaaaaaaaacaatttttcccctgtcaattgccttcaaaaaaccagcctcagcaagcgcttgaagcccgacttgtcaatgtacatgttggcgcccgggtggacggagtcgccgttgcgcaccaactggcgcatgcgttcaatgttcgcctcgcacaccacctcggggaaggtcagcgtggtggccacgtgccgtggcacgcccacctggtcaatctgaaacagcaaaataaaattagtagggaatgaaaaagacgagagttatttgaagattttttaatgtcaaattttgaaacaaatagagaatggtttggtgcttgtccaaagaaacaaaaaaataaataaatatttgtttattcatcagccgccgagggggtccgaaccaatgacaaaattgtcaatttaaacgttgaaggaaaattaattacatttaccaatattggtttggtacacataaaatttgtgctatttt

SEQ ID NO: 10351 - DNA, 3104 bp, Heterodera glycines
tttaacgtagaaatgctatttttgagccctttctttcatagcatatgtgcagaaaaaaaattaggtaaaagcatacaatttataaccttagtaataacatatgtcaaaaaaatgctgaaatatgtgccaaaaacccaaaaaaatgccaaaatatgtgctaacaataaaatatgtgttaaaaattggaaaaatcaaaagtatttttgcataaaaattccaaaaaatctcattctttatcatttttgcccgcgaaactaaaataatatttttccgataaatttttttttataaattgaaaactccagccagagaattcaaaatccaataaccaattaagaattcgatttttttttaaattttttgtgtttttcttacagatatttctcaaaagtgtcaaaatatgtgtttttataaattgttcggtctaaaatataaaaatcccagctctaattatggatcagtaaatcaattggaatggaaaacagaatgtattaaagcaatttaggacaatgtaatgaaagtggtcatttatgtgggaagataaattccaaggattaaaattaccttattttttttttttgtataaccataaaaatatattatatagttaattttttatgaactttttttcagaaataaccagatttaatttctttatatgattaaaaagatcaaatatttttcaatattctgtttaaagaaaaaaagctttgtcttatcataacttatcgaattaatctcaatgattgattttcttttctcattcaatctcgacttttctgatcactgatcagcggtcctgcgggcgctgcttcaaatactgctgcagttggggcagcgcatggacacggtcaacgtatttgatcagctccgggaacgcattgatagtctccggctccaacttggtaaacgtgtacagaaagttggccacctgttggaaaaacagcgattgttacggtatttatggtacggtacagtaacaaaaattttcaagctattcaacgtaaatacaaactcataattttttataactccatgacaaaaggtctagaaatttaaaaatttacgcctcgcacccgagaaattcaaaaaatttgaaaatttcgacttcgacggttccgatgaacgccagccgagaaaattttacttgaaagtccaccattgagaggccggacttgagcatgtagcccgacccggactccttcaaaagtttctcaaacagtggcaaaatgtgcttgactcccggctcgaacacttcgccacgcaatttgtccttgggaaattaaaaaaaaaatttaaaaaatatataattaaataattcttaaaaatatattttattttataattaaatagaatgaaaatattttagttttaaatgtatttatttatattgggccgatttttttactgttttcaccaaaaactcactcaattaatgaatgaattaaaaaaatcatacttattaatgaattattaattaatttaattagaaatactcctcatattaaataaattttcataattgcattatttgttcaccaaatcgccttggcggaatcccattttgacgtataaatagggggccaaatcagtgttagcatccttttgaaagtcgatgatttcgttagccttcgccttttcgcattcatctttgccggccaagccttaaatttaaatttataattaaaaacaaataaaattaattattataattaatttaccaaatttttcggcaaggtagcgcaaaatcgtagcactttgtcccaatggcttcccgtcaacctccaaaactgggacctttccgtaaaaaaattctgaaaaaaaatttgtttattttttttaatttggcattcatttctctggcgttatgccacccattatttactcactttgcttgtacgttttctcccattcttcatagtctttaattcggatgtcctcaaacggttgggcaacatagtgaagcaacaggcggatgggttcacccaaaccgcgcccatcaaaataatatatataatttgtattggaccattttttaggacaattattacttatagtaatttcctttgaaatttaaaattaaatcaattgaaacaaatccctttaaaaacagcaaaatgatgacaaatcagcagaaagagaggtagagaatgtgagagaaacgaggagagagggaaatagagagaaagagaaacaggagagagagagaggtgagggagagagagaaaatatgaaagagagaaatatcgagagggaaagaaaagagggttagagagagaatgattgagtgatgaagaaagagtaagaaccaaagacagtgaaaaacaaagaaaaatagtcgttatataaaaaccatcaaatggaaattttcaacaaaaaactgcccataacttttgccaatgtcaaccaaattagacattgttagtatcattcaatagtcctaacatttctctacaagatcatctaaatttcaaaaaatttggtcaagtttgagcaaagttatgaccaaaaatgattgaaaacctggtttctgatgtacatcagggttgttccggttcacccgaatcccgacatttttctcgtcccgaaacccgaatcccgacccgatggtttttcggccgacccgacccgaatcccgacccggtatttttctcgttccggaacaaccctgatgtacatgtatatcaaagtcaacaaaaattttgacggtaatttagaaagtccactaggttcacgattatttgacaacaaaaatcgcataacttaattaattaagcaaaatttggtatcatttgattgttcgtctcgatgttactgatcacgaatccggtataaccgtttctgagaaatttccaaccccggacccgaactcgaacaaaaagtcgaaagtccaaattctcgaatctagcattttgattcaataaaattccattattgaaggattgatggctatcagtttatttcgtttatttaaaccgcttttgaaccaaaaatgctagtttcgaaaatttggattttcgactttttgatcgaattcgggtccggggttcggaacgatcttctttaagaatcttatatttatatactatatacttaatgctact

SEQ ID NO: 10352 - DNA, 2045 bp, Heterodera glycines
ccaaatcgccttgggcggaatcccattttgacgtataaatagttgggccaaatcagtgttagcatccttttgaaagtcgatgatttcgttagccttcgccttttcgcattcatctttgccggccaagccttaaatttaaatttataattaaaaacaaataaaattaattattataattaatttaccaaatttttcggcaaggtagcgcaaaatcgtagcactttgtcccaatggcttcccgtcaacctccaaaactgggacctttccgtaaaaaaattctgaaaaaaatttgtttatttttttttaatttggcattcatttctctggcgttatgccacccattatttactcactcggcttgtacgttttctcccattcttccatgtctttaattcggatgtcctcaaacggttggccaacatagtgaagcaacagacggattgattcacccaaaccgcgcccatcaaaataatataatttgtattggaccattttttaggacaattattacttatagtaatttcctttgaaatttaaaattaaatcaattgaaacaaatccctttaaaaacagcaaaatgatgacaaatcagcagaaagagaggtagagaatgtgagagaaacgaggagagagggaaatagagagaaagagaaacaggagagagagagagaggtgagggagagagaaagagagagagggagggagagagagaaaatatgaaagagagaaatatcgagagggaaagaaaagaggagttagagagagaaagagtgagagatgaagaaagagtaagaaccaaagacagtgaaaaacaaagaaaaaagagagattggaagaaaaagagaaggagagtgaaaacagaaaaaaggtactaattgcttttgggtcctcttttttggtcgaaatttttcaaggcgtagccagacaggcagacagtgcactatttccttctttctttttctcaccccttccttttcccacacacacaatgctgctgcacagcagggatgggccgaggtttcgcttttcgcatttcgcctttcgcattattcgcattttttggcgtttcgcatttcgcttttcgcatttcgctttttggcgcgaaatgcgacttttacacccctaagaattggattaaagtcccataaaatttttcaaaattttacctataaattggctaattttcagtgaaaaactgtttataaatgatcaaaatttccaatttttttcccagcggcgcctatcggcaccgccgcgcccccaaaactcctatttgttcttagaaaatggcccaaaatcgcaaaatttggtaatttgatgaaaaactgttctcagcggcgcgccaaaactcttatttctcattagaaaaatgatacaaaaatcacaaaatttgatgattttttggtgaaaatctgtcaacaaattttaatcaaattttcaaaaattttcccggcgccgcctgcccccccttcccaaaaagtttttttggaaaaagcgcgcctcaaaaaagcgttttattgatttttaaatttggaataaaattttaaaaaatgatttttgctttatgattttatctattaaaaagttgtagaaaaaatttcgcttttcgcattttcgcatattttggcttttcgcatttcgctttttttttcatttcgcatttttcagtttcgcaaatttcgcttttcgcatttcgctttttatttttcaatttggcccatccctgctgcacagccagcacacggtgctgagtcgttatataaaaaccatcaaatggaaattttcaacaaaaaactgcccataacttttgccaatgtcaaccaaattagacattcttggtatcattcaatagccctaacatttctctacaatctcatctaaatttcaaaaaatttggtcaagcttgagcacaaagttaaggccaaaagtacgcgaggtaccaagttttcacacatttttggccgataactttttttaaactcgaataaaattttctgaatttttttgcaggctaatagagaacacgtagggctatcgaataaata

SEQ ID NO: 10353 - DNA, 905 bp, Heterodera glycines
ataccgtattttcacgattatgtgcccgtctccaattatctccccctttctgaggaggttgaaaaataatatatccggacatataattagagaaaatacggtatgtatacagtagaagatcgaaaggtgacgttaaaaaatctagcctgatatgtttccacggtttttaggggcacattagtgatcagtgataactatagaacatccattactgataatgaagaaaatttaaaaatttaattcgaaacttaaaaaagaaaagaaagcttcggtgcgttgcattaatgtaagacataaaaaattctcgcccggtgtgactcgaacccagcccgggagtgtcgctttcagctcgataggttcacagaagtggtaaaacctaacgaaaaatgtggtgtctttattgttgtaatgcatttatgtacatacattgctcttgcagtttaggccccacgtaatttcataacaataaaaaaaagtcaatcatttgaaattagtttaatcaatttttaaaatttcatccatttgacatctatttttgaaaatcagcagtttcttctttctgtttaataatgaaaagcgaaagaaaaggtggcctcgttccatcgttgtcgtccaagcgccaacagcaaagtgtccccagccattcggttccatccacggagccttcgcctttagcttctccgtcgttatttttggcatcgcaaaatgtcggagacaagggacatcaaccgccacaaaagcacgtctacagcgaattagccttgcgcaacaattaccaagtaaaccatgctaatgggttttttaaattctttcgacccttaattttgacatttgcggtttttaaaaccagaaaatttggcatttattttcttttgtaaaaataaatccgttatggggaaataaaa

SEQ ID NO: 10354 - DNA, 3498 bp, Heterodera glycines
caaaagagcgcatttaacttgagacaaatgaatggcatttccatggaaagggaaaaaggagtggtggggatgggatggacagctgttcctattaatgggtgaaaggaaagtgttggcgccagagaatggggaggcgtcactttggtgggtttgctttgagcgtttcatagtttgtatttgaatgtgaccctcttcataaactctgttcgttttggcattgcttcttcccgttggaactggacacttgcggtttaattacaaaaagaaagaaaagtaagcaagaattaaaaaactcatatgtattgtatataccgtattttcacgattatgttcccgtctccaatttctccccctttctgaggaggttgaaaaatactatatccggacatataattagagaaaatacggtatgtatacagtagaagatcgaaaggtgacgttaaaaaatctagcctgatatgtttccacggtttttaggggcacattagtgatcagtgataactatagaacatccattactgataatgaagaaaatttaaaaatttaattcgaaacttaaaaaagaaaagaaagctacggtgcgttgcattaatgtaagacataaaaaattactcgcccggtgtgactcgaacccaggccgggagtgtcgctttcagctcgataggttcacagaagtggtaaaacctaacgaaaaatgtggtgtctttattgttgtaatgcatttatgtacatacatacatatgtacatacattgctcttgcagtttaggccccacgtaattttatgacaataaaaaaaagtcaatcatttgaaattagtttagatcagtttttaaaatttcatccatttgacatctatttttgaaaatcagcagtttcttctttctgtttaataatgaaaagcgaaagaaaaggtggcctcgttccatcgttgtcgtccaagcgccaacagcaaagtgtccccagccattcggttccatccacggagccttcgcctttagcttctccgtcgttatttttggcatcgcaaaatgtcggagacaagggacatcaaccgccacaaaagcacgtctacagcgaattagccttgcgcaacaattaccaagtaaaccatgctaatgggttttttaaattctttcgacccttaattttgacatttgcggtttttagaacccagaaaatttggcatttattttcttttgtaaaaataaatcgtttatgggaaataaaatacagtgatcacgatttttcggaacctttgagcccgaattcgaacacttataaatgcgaataaagtggtaaaaaaactcgtcctttaaatattttcttcaagggaatcattcactatgagtttatgtttcaaatcgcctttttgttccctaaaatggattttaaaatttttaattaaaatattttttgatttaaaaatgagttacactatcgtagcgttctctggacccaaatccaattggatgagctaacacttgaaaatctaaatctggcagatgttggaacagagcaggacatgtcaagcggctgtcagcggaatcgccagtggcattttggggctgaccggcactttgggctttctgttctatttcctttgtgttttcttacaggtttgttttttagaacctatctttatatttcaacaaaaatattatgattttcgtccttttatctgtaaaaccgtcaaccatgaacataatgttgttcaaataataccaaaattattatttctactgcaaattcataaatttaatggtcccattaattaataatcatataattgtttcttaaatgtgtttcttttccaaggcttttgtctggcaatacaagacgggctttcgatggagtgcgtttttcacgagtcgttcgcttttcctcacccattcggtcgttagtggccttttcacttatgtccttttttgggtgtttgtctacggacttgtccatgtttattagctgttttgtaccaacagtatttaattttctttattcgataaaaatgtttcggtgtttttgattttccaaaggaataatttattcattaattattatctatcttttatttgttaatggatgctaattacgttttttaacaaggaatggaatgttctaattgctctcttttgagaagagattttgaggagcaaaagatacaaattgtccgatatgaggcgaagatcaaaggtaagtaatggttaatgaacgtagccaaatgccgtggacattccctcagatttggtaaatgcctacaaaagtctaacgactgagaagcaatcgttggaagttgcgctgagtttactttctgctgctggagaggagaattccgaaaagagcgaattggggaaatcgaatggcgaagagacgggagaaattgcgcaagggacggagaaacgggaaggggacgaggtgaaattgagggagaggggggaatggaccatccaatcggagagaatttaaagacgattttgggccaagtcttggccatttaagacattgttttgcgttttttaaatcacatttgatagttgtccgttgccgagcaaatagaagcactaaagcaggcgatttccacgctgacattggtcaataaacgtaaggagatggagttcaaaaaggacaggcggtcgcttttggtgcgtccgacggactgccgaccattgggtttttatccgcgcttttaggaaacaagagacgaatttcaaaaccgatgcagcgatttggagcagcaactcaaattgctgaaacagcagaacagaagccaacatacggtactcaccagggatgccatcaccgatttccgataccatccatttccaaaaatatcaccaaaagttactgttttcgaggcaaaaacactaggaacgaactcaaactcataacatcctcttttgattattttattttaatttaaaatgttgaagaaaatgaggcaagaatttgagcttgtgaatttaggacactctaaagagattttctccgggtgcagtcaatttcttccttttattcttttgtttttcaacagaagcaactccgcgcggatttggccgattcgaaagaggcatttgaaaaagcaatgacagaacacggaatggtattggccgaacttcagcagcagtacacgaaggagaagaaacatggcgaactgttggaaaaacaggtaaaaacgaaatgggaaaggaaaaagcgaatttggacaatttaaggtcaccgaaatgagtcaaaggttggcagaaaaggacgcgcagataaagcagacggaggggcgactgaagcaaattggcaatttggagaaggaaacggaaatgctgcgcaaaaaggcgcaactgactccgacagtccgagtgataaaagacgaattggccaatgtgaaggtaagacgagcgcaatttccaattctttgtttcaattagtcgtcatcggacaaagaactcaatgtgtgccgaagcagaaatgccatccaagaagcacaattgcgggagaaggagtgccg

SEQ ID NO: 10355 - DNA, 1841 bp, Heterodera glycines
  unsure (1)..(1841): unsure at all n locations
tatttatanttgattttcaaaaagcatttgactcattgcgccataatttacttttatacaaattggaaaaaattggtatacggggcaaacttttattgtggataaaggactttttaagtaataggacttttcgagttcaaattggggattctttatcttcaagtaaaaaagttggctatggcgttccccaaggctcttcctggggcctttattatttttgatctatattaacgatcttcctgatgctttgccatcaggagtaagaattaaattatatgctgatgatgttaaaatgtatatatgctataaagcaagatccgacacagaaattatgcataaagcattgcataatttattcgaatgggcaaataaatggcaaataaaagtttcaattcaaaaaacttttgtattatatttgggttcaaaaaacccaaacgaaacatataaatttgatgtaaatacaataaatgctgtggatacaattagcgatttaggagtaaacattgataacaaattacaattttccgatcatgtaaatcaaataacaaggaatgagtatttacgtatgcgttctttgtttcgaataattaaatccaaatcgtctaagatttggattacgttatataaaacttatatcaggcctttattggaatacgctccggaggtttggcttcaaaaaaatattaaaaaaatcgaaaagtgtcaaaaatatttcacaaaagggtattttttaaatgtagccttccaccccataccaaaatcgattagaatacctgcaactgccaacacttgagaataggcgaaagctgtttgatctgttatggaatcaactcgataaagaactaataaaaacaaattctttaaatcaatttaaaacaaacttaaaacttcactagggtaatatgtaagaccggaaaagctagaatataataaattttaagtgatttggtaattttatattttgacctcatttgattttgacctcattatttatttaattattttcacatttttttttttgccttttttaatccctgtgatcatccatatattttgtaacttactctacgacatatttttctgaatagtcgtcagagtaagtggtttttcgcccttctgatgacttttttatttttacaaataaacaattataattaaatattggaagattttttccagataaggagaatttttaaaaattttttgtcaataaaaaaactatgggacgaatttttgagaaaatttctcaacctaaaaacaaagttaaaatcgcgtttttcaagttgcacacaaatattaggcatttacctaaaaatgtcatcatccataataattgtaaataagcacagtttaaaatggtggtaatttttatcgcatcttctaatcaatattttgttccctttaaaagtgtccgtatattttgatcattacattcagcaggcttgtccctggaaagcagagcagtggttttttggcattttgccaaaggatgatttagtcataaatattcataaagatttattaaacttataattagggataccattttaggtgccaaaaactgccaaaatagttaggttataggttctaaaatactcccaaaataagtgctaaaaatggaaaaataggagctaaaaagtttcaaatttaggggtgtaaaatcgaaaattttctttaaaaagcaacaaaattatactaaattattaatgagatacacaatttttaaaatcaaaaattcttgtcaagaaagtaaataaataaattttgaagataaatttttgagaaatttttctttcttagggagtgcatttttgaaaattttcgggtcgtttcttaggggt

SEQ ID NO: 10356 - DNA, 1970 bp, Heterodera glycines
acactataccttaatgtaaatgaatttaatttttttaattttcaaattaatagattcaataaaatgaacacaattattgtcgtccttgttcaaaaatagaaataaaaaaacaaaaaatttaaatcgtaacagattaattaatttgataaaacaaagtaacttaataaataatcggacataaaaagaaatgaataatttgaataaaggaaacattttcacaaagagttggtcacatttatgcttgtgaaactcccttgggtgcttttattcttaaattttctttcgcaagtttaattaaactcaaatatatttagtttatccgttgttttaaatattaaaaattttagcttcctttccttctttgttaatatttaaaattatagaacatatacaattaatttctttaaatatatatgattctttcacaccgatgcgacaaatcttttaaattaaaagttgtcgatttgtggggagcgagggaggcgagagccgactttgccaagggcaaaatcagctgtttgcttccccctttccctttctctgccgtgccttcccaaatgtgggggaagggacggacgagctgttgaaagcgaaggctcgcaggagtgagagactcctgcgggggaagaccgacgaagcggtggtgagggcggtcaacgaagacgatgagcagcagaagggggagggagaaaccgtcccgaccaaatcccccggattcttttcacaaatatatatttattaagcagcagcagaaatgaatgaatggaaatgtggaagtgagcatacagcgagaaaaatggtgccctttttataggccgaaaaatgcgagggggcggggcacagaggaaaaacttaattggactatcactaacaaggcggtggaaaaaacagcgggcgatcgataaaatctgtcgctgttggcgacagaactccccccgcggcaatcatcgaatttcttcgcggtggtgtcggcgctctttcttcgccttgtgctttccatccgccgacggcgagcggtgatggtggtggtgctttcgctgcttctttgcgcggcgttcgtcatccgagcccgacgagctggcgggcggcgacgccgggagccacatggaattgcatttccgcctgtcatggttggcggtgacgaaaggcgatggcggatgaactgagcaaggcgggcttgctcagccgtcaaatacgccacagacgcacggagagcggtgagctctccgtgaacagccacgaggtccacggcggccttgggcggcgggtgcgctttggccacaattccctcgtcgtcctgggcgggaatttttttgattgcgacaattggccccatgcatttaagaatgaagtccaagggggtgactgcggagggtccgagacctcccccgctgtttgttggcgtcccccgctttacgggggggggactgattgagggtgctgccctccaacctttggagggtgcccttaccggtgggcgtgtacggtccgccttatcggcggtgatctccccttcctcgggggagtcgcggcgtgcgtttgaagtgccggagcggctcgctgccgccgttcgctccttttgaggaggaacataaagggggcaggcttttgccccgcggcgattggccagagagttggcacgccgaacacgtcggcaggcgttttgacgacgactcctccttcgcttccgcgtccatgaaatcgcggacggaaaagttccgtccgctttttgcgtcccgttccggtgtcgctgcggcgatgttgaacagttccaccgcctctttgcgtggcggtggcggcgactggcgatcaggcgatgatgataatgatgatgatgatgatgatgaataggcagacgacgacgaggagggcattttgatgggttttggcatttttggggcggagaatgatatggggacatggctaatccctgcccttatataggacttatggtcattggaggggcggga

SEQ ID NO: 10357 - DNA, 780 bp, Heterodera glycines
atgccaaggacattcttatataattggtattgctttttgatttggttccttcaagttaaaaacaaacaacaataacaacaacaacaatggaagtgcaacctgcagaaaatgatatcaaattgccccgtaagtggatgtgaaaaattgaaaatttggcaatttaaaggtcctttaaacagctgtcagctatatcgagtaagaaaaggccaaaagattactagccaaaaaatggaaaaatatggacaaagttttgggttttcgcaataaaacccgattaattttatatttaaatgcatatattgttatatagaatattgtaagagcttcagttgatccaaaccgggatcttattacaaatatagtgacagcgtatcatatgcattctttagtctgtcatttttaccgtatccccttctgggtacgatatatccccatatgtgcattcacttttggaattgtccggtcaaatctcgatgtgccacccacagcgttaattgattttagcgcactaattacattttgtatttccagcaaaaatcgtaaatgaccatgaaattcgtggtattgcgccggtcggagtgctgctcaacgcatttgagttgaatttgagtgcggtgccagacaaagtgttccagcacgaccttcgcttcgtggctgagtacacaaacacgaaagagggccaagcgaaactgcaggaattggcccgtgggcctcgcaatgagtgagtgactcattagcggagtgccaatctcgaacagcaaagatttggtgccgagacta

SEQ ID NO: 10358 - DNA, 4125 bp, Heterodera glycines
gggaaatttatttaacgagaattctcgaagaataaattacataaaaatcgcctttatttttcaatttgggtttttttattaactatttattcaatttacaaattttcaaaaattgccacagaatttcaatgcgttttttttcgcaaaattaaatccaaaaaaaaattactcatttatttaattagagtccactaattaatttacctgctctggcaattccacctcctcaattttggcactcaacaccacaatcactgagctgaacccattcgcgtcaaccaattccttagaaaagaatttgaaatttcaaaaaaaaaaagtttatttttatactttacaatgtgcagacattgaagaggcctcgaccttgaaaaatgaaaaatcaaatttggagaaaaaaaaattatagttaaaccaacagcataaacacgctttgctccgacttgtgcggcaaagaaggacaactaaagagaatcaaaatgaaaaatattttaggagtcatcaattattattttttaaaaattagaattctgaagttgaacaaacgaaaatttcccatttaaaaaagatttatgatataaataataaaaaaaaaattgaaatttgttcaaaaattccatacaatgcctgtgccagcgccgacgtccaacacaacctgaaaaagcggaaaaaagtgaaattagaaattaattgaatttccctaggaaacccaaaaaaaaaataaacttttttttttggtagatgaaaaattcttttatttaattttttctgcaacaccatacctttcccctaaaatcgtgccaattgtcaaaaattgcccgctgataggtggcggttcgggtgaagtcctgcagcatgttctgctgctggaacagcgagccataaaattggaaatattggacggcggaacctgtggggagaaaaaggaaggaatggaaaaattaattttaattgggattttttttttgaattaagaattcgtaatttcgtttttgtcagcacatgatgcattaaaattgaagaaaaacgtgaaaattaagttttcaaaaattaggaaagggtgagaaaacagagaaaattattgcattttctgtagaaaaatttatcagaattaacaccatcggccaccgataatttgtctattagcccaattcattttttcaactagaaaaaactccaaaaaatcatgaaagctaaaaataataaatttttaccccaaaaatggcatttttggacagtcgttgggtcagaattgaaagacccaaacaacaaaaaattatgtcattaaacgataaatgtgaaaaccttgttcggttctcgagtcaaactccgagtgcgtcgtgttttgctcatgttcaccgccaatgccatcatttttcatcccatttgccgctgtgtccgcagcggttgtgccgatgtcgtcgtcggcattgttgccgttaattccgtcacatttgcgctttttgttgttgctggcaccggcacagtccgtctttttgccggcatcggtcccgtcgccagtgcccggggcggctgcgattggttgacgacgacaaaatgtgtccaaattggtgcgaaatgtgccgagttctgggtaaaatatttatttttaaattaataataaatataagtgggaagtggaatatggaaagagacaaattggcaacagtttcctggtttttgagtataactcatttcatatttgtgcgaattgaaccaatctattatcatttggtaactctaaattatctctattaggaatgcaaaaatttccaaaaaatttcgttgtataacaaaaaaaaaaaattatgaccaaaaaacttaaaaaaaaacaacaacaactgggttttcgagtattttgacaataaccaatcattatcatttgatagccctaggctttcgtctattgcctgtaaaatttgtaaaaaatttgttagtcctcagaaaagttaacaaaatgttcagaaaggcagttttttagtttttttggtcagcaatttagtgaagaggcaagaggacgaaccatgcaacaaatttactaaattaagaattttaggaaaaaaaaaattaaaaatccgacggtgccagatatatgcattcgtggaaattaattaacattttacaggaaatgaaaacctttttcagtgctgaaacagatgacaaacgcattgagtgaacacagtgtgccattgttgggctcggcaggcggcgtcgaattccgtcgacggaatgcgattgatttctaaaaaaatgaaaattttataaaatcaaatttcaaaaaacggcatttagtgtcaaaaagcaattagatttcctgtttgttttgttatgaattgttcgttgggcagttttttaatcaacttataaaaaaaatgccatccctccctctcacaaaacctcagtgatcggcatgcgctcgtagtcatttggtctaaactggaagatggacgaagttttggcaccggatagttgctgttgttcattgcgggccggtgatgcgtcggttaggcctaagaaaatttttaaaaaatgaattgaaaaaataagtaggactttgaaaattgtcccaagcctattcagactactaataaatggacatcaattttgtttttaaatcaaatttgaaattaatttttacaaatttggtgcctcaaaagcgcttgacaggcctgttttaccatgcaaacatttaaaatttcattaaggtagaaaaaatatgtcaaatgaagcacaaaaaatgagttgtttgcccttagattggttttcaaaaaattccggttaatttttaaactgattcaccattttgatctccatccaaagaattaagcctcaatgtgatgccgttgctggcagaaggcaaaattgatagtcgaaatttgccgaaaaattgtttgaccatcggcggcacagatgcgtcatcatcacagtcgcggaactcgcaaattcggacgaaaaattgaagatgcggaattgacatggtacaacctgcttctgggtttctctttatatggtggataatattacgattaagcacaaaaatcaattttagtaatggacatttcttttttggccaattcgtttttatcccatcgtttttattatccgtattcgtttttgggccaaaacgcgaaactcgaggtcgaatatgacagacactcctaaatagaacgtagttttgtgaggaaaaaatggatatggtttaattttaaatttttgaacattatgccaaattattagaaagaacttggaattttaaaaaacgagtaaaaacgataaaaaggcgtgaaaagccgaaaaataaaaaatttcttttggaaacattttttatcaaaaaaaaacaaaaaaaaaatctctatttttattttcgcactgataaaccaaatacatttcaagattttctggagtgaattctggggccggaattccgctctctaagaataatttttggtctcgtaattccgaaaatttttgaatttttgaattccgatttccacattttcagccgaaacagttgccgaattttacaaaagttgtctgcttcaaccgcagacattggaaccatcatgagtacgatctcattgggaacatatacgttgcttaaattagaaatttccatctgttcgtttgttgtcagtgctgtgcacattgcaacagaagtgagtcaaaggcttatatgaaaatatgcggcacatctcagttgggctccagcaggtttttggactataacttttttttttctttgtcaactaaatctaacaatcttggtatcccttaagatgctctattagcatgcgaatttccaaataatttgggtcggggtcacttcggcgcggaccatttcggcgccgcaaattttgaaatgctataacttttttatttgtcagttagctttagccaatctggcatcatttgaaagctctatgtgtgctctatatttacatgtaaaaatagaaatgaatgattcaaaaataaaaaagttatgccacgcggcgccgaaaaagccaagaaaaagtaatttttgaggttttttggccataacttttttgtaaaactgacgaatttttttgaaatttacaggctaataaagaatctgaagagctatcgaatgataacaaaaatttttaa

SEQ ID NO: 10359 - DNA, 1038 bp, Heterodera glycines
tgatgaacagggatgccaaaaatatgcacgaaaagtagccaaaatatgcgcataaatatgcaaataaaatcatgaaatatgcacaaaaatcgcaaaatatgcaccaaatatgcacaaggcagtgaggctccctgtttacccactcgcgcatgcattcaaatttggatttaattttaggcataataaaaattttttcctaagagatattaaaatcggaaaatatttgacgaaaaatggcaaaatatgcaaaaaaaatctgaaaatatgcacaaaaaatggcaaaatatgcatgaaatatgcataaaaacccaaatatgcaaataaaagtcccgatttttatacgcaaacacaaaaaagaaagtgtttttccttttttcctactatttagagcaaggagaagccaggaaaaaaatatgcatttgcatatttttggcatccctggtgatgaatagtggcactaaaaacgaaaattttttgaaaaagaatgtgtttttcatgcatttctcatcaacataaagctgcagaaaaaatagttaaaaaactagaaatcctcgccctacttatcatgaatcttttgcgatgtttgagttgtttcgacctttcttagattggaaatttttttgcactttttagcacttaattatttttgggtaacctcgattgttttgcagtatttattactttttacgcttatccctatttaccattctttcaaacatattttccttttatataagttgtttataatgtaagttgaaggcactctatgtaaattaaaacttttggcttccaaaaaatttttctggttgctaattattaaggatataattgatattatttttatgtatatttttaagttccaatgaatccgcttcatgatcttatggttttgttttcgaacctgaatgttttccgaatcagattagatagtcaaaataaaaatatttctatattttcgtgaaataatgcggtagtttccgtttaatgccgcccgaccatttttaaaaactaagcattagagcgcgttcaatatgcata

SEQ ID NO: 10360 - DNA, 1261 bp, Heterodera glycines
  unsure (1)..(1261): unsure at all n locations
cccggaaaanatctgcaaaaaataataaaattaaaaaacgtcaaattttcgagggggcctagctcgaaaatttctgaaaatttcagaaatccgaaaagatggttggatagagctcgtcgagctctacaaaaaagccgcttacaccgacctcctcccatcaaaagccggggagttattccaccagcgctgaaatggcccaaaaaagtatgcaatttttagtcagtttttcggaaaaactggtaggccctaggggttcggtgaagaaccaaaaaatgtgcaaaacattccaacttaaaatcctatgggagcggatttttcatttaggcctttaaaaaatttttgaatcccaaaaactgcaaaaactgcttcgaaaaaagtgacttttcggcgcctggcgctcagttggccctcggatcggaaaatctatagttttcctgaatgcgccgtcaaaagttacccccaaggtcgaaatttcgaacccctcccggccttcggccgggagattttgtttttggaaatgaaactcactgttgttctaaagtatataaactagcgtgtggcgcagtagttgcttggtgtagacagtatgctttgcacagtattcgctcggtgtagacagtatgctttgcacagtaattgctcggtgtagacagtatgctttgcacagtgattgctcggtgtaggcagtattcttgtgagagatgaaaagaatatgcagtacatgagcgcttcgctacaaaggacttcgttgctagtgcatgcgattttgttcagtgatgagcaagtgcattcggccgcgtcgcggcctcagacggcgccttgcgtccgtttcttaattttgcgggggacattcggccgcttcgcggcctaaggacgggcgctttgcgcccgttttttaattttgcgggggacattcggccgattcgcggcctcaggacgggcgttcgcgcccgttttttaattttttgggggtcatttggccgcttcgcggcctcaggacgggcgcttcgcgcccgttttttaatttttcggggggtcggccgcttcgcggcctcaggacgggcgttagcgcccgttttgtaatttcttgggggggggggcatttggccgcttcgcggcctcaggaggggcgcttggcgcccatttttaaactttgttgggaattttcggcagcttcgtagccttaggacgggcgcttcgcgcccgtttttgaattttgtggtaatcattcggccgtttcgcggcctcagaacgagcgctt

SEQ ID NO: 10361 - DNA, 1513 bp, Heterodera glycines
  unsure (1)..(1513): unsure at all n locations
tttgaaatttttacatcatgtagtacancattcgatagagcttaaatagctctacaattttgctctaaggcactttttgactaaaaccaactcctgaccagttatgggcccgggactcaaatgtcccgctgaggccaaaaaatttttctatttccgggaaaaatcgaaatttttccgaaaaaattaccaatcgatagagctcgaaaaactatgttttggaagtggtctccgtttttctgggaaaattcgttaaaaaatcctaaaattcaaaaacccgaaaaccgttttttaggcctagctcgaaaaattttgaaaattttcgaaattttaaaatctggaaaaatcgagctcaccgagctctacaataagtctgctggccaccctgcgctcaggtcaaagcctaatgagttattcaacggggactgaactggaaaaagttggtactgaaaagttgccaatttctgcagcccttccaagtataggtagaggcctggaattttttttgaaaattagaaaacacttcaacttagtttcctaccagcaagcattttttgatcagagttttagaaaaaaagttatgggccatcaaacgcaagcaaaagtgagaaattggccgccaggactcagttggccaccggagcggaaaacccttatttttcccagatgcgcctcaaaaagttgtaagacccttccactactttcggggcgctcccggccttcggccgggagattttgttttttgaaacgaactgcaacgtttctctatagtagtataaactagcgtgtggcggcgcagtaattgctcggtgtagaccgtatgctttgcacagtgattgcacggtgtagacagtgtacttgaaaagcattgggttgtgtgttgagattagcgcttcgcgcaaaaggacttcgttgctagtgcttgcgcggcttctttgtctaattgattcggtaaggcctaatgcgttcattcggccgcttcgcggcctcattttattattcttaattaattaaatttaactaatttattttcattaaaacattaaagtattatgtttgcacattaattgctcggtgtagacagtatacttgtgagagatgaaaagaatatgcattacatgagcgcttcgcgcaaaggacttcgttgctagtgcatgcgcgtttgataagtgatgagcaagtgcattcggccgcttctcgctctcaagacgctatcttttccctaccagatattgtgaatccacttttgatctattgatgaaaagatgactattgtactagtcgcgtgtttgactccgcaggaataatagttcttgactaaaaatggctatctctgaaagtcactattaaatccctaccgggaattggacatcaacttttgtcttttgttgtagcgctgaataaagcactaatagtgtgtttgaaaacgcacgaaaaatagttattgacaaaaaatagctatctctgaaagtcactattaaatccctaccgggaattggacatcaacttttgtctt

SEQ ID NO: 10362 - DNA, 1432 bp, Heterodera glycines
aaaaaaaaaattttcaataaaaaaattttccccgcattttttttgggttttttttttttatcttttaaaagaagggggagagtgggggcccctttttggggggggggttttgggattttttttaaaatttaggggtgaaattttcaaaggggccaaaaaattttttttttttttcaaaatttttttttccccccctccaaaaaaatccaaaaacgccaaattaaaagggcatttttggttttcacccccttcaaacttccccagaaaaagtttttttttggcaattttaggagcaaaattatttttcataaaatgcaaatccatgggggtcccccctttgggttttgcattttaaaatttatttttattttataactttttttatattaaagataaaaatatgggataaagcacattagatagagcttaaaattctctacaaaaaagctcaaagacaatttttcgctaaaatcaacccctgacgagttatgagcccgggactgaaatgtcccgctcaagccaaaaaaaatttctatttccggaaaattttgaaattttttcaaaaatgccaccaatcgatagagctcaaaaaacggttgcttgaaagtggtctccgttttcctgggaaaaatctgcaaaaaataataaaattcaaaaacgaaaaattttcgagggggcctagctcgaaaaattttgaaaattttcaaaatctgaaaacgccatcggatgcagctttaaaaactacacaaatgctcaagcggcgccaacccgctccgcttaacccccagcgagttattcctgaaaaacggaaaatgccgaaattgggtgccaaattttgccattttctgcagcattggcatttacagatagccccgccaaataagcgccaagttttcccaaacattccaacttgatttcctacctccaagcattttccgctcccgcttcttcccgcaaagttacaggccaccaaagacggacaaaaaaaatttcacgccgtttcagcgccgccggcgctcaactggccaccggagcggaaaacccatatttttcccagatgcgcctcaaaaagttgtaagacccttccaccactttcagacccctcccgacagccgttcgactcaaattagtttttaagacgagttgcaacttttctctatatatgtataaactagcgtgtggcgcagtagttgctcggtgtagacagtatgcttttggtatatatgggcgggcgctgacatgagcgcttcgcgcaaaggacttcgttgctagtgcatgcgcggttttgaaatgaatttatggatgtgataagggattttggtctacaggcatcgcgaggacgcattcataattttgtggaggactttcggccgcttcgcggcctcaaagggtgctccgcgccggtttttaaacgttgtggggaacattcggc

SEQ ID NO: 10363 - DNA, 6528 bp, Heterodera glycines
tttgtgtgtgtgagctcctctcgcctggaattgctggttgatggactgcgtgttcacgtcaatgccgctcagccagcagccgtagcccgggtgggagtggtaccagccgaccacctgtgccaaatttgaacaaatttaaaaagccattttcgaaaatttctcacacagcccctccaaagcatgatttgtatgagtccgcaataattggaacaagacgggacaaaacgctaatatttcacacgaattaaaaaaacacaccttttccaaacggccaaccgcctcgcaactttcgctgaagttggtcataaattcgtaggcctgggcctgcgcgttcacccgcgtttcggtgcctaaatttcaaaaaaaaaatatggactagttcaaatgtgcgctgatttcaaaattggcacggcttagtgaccaacgatcccaacgacacctgggattatgtaagaacaattggggaaaaagtaaattacacttcgttcagtgaccaaaaaaaacacccgacaaaatgttgaaaaaaatcctttaaaattcgaaaattttcgagaaaggagttataagctcaactatagccaaattcaatttcccatcccccaaaaacaaaccttcgaccggcagcgcaaaagcgtccagcacaataattgtgttggcgtccacccggccctgcatcaaacccataatttcgatgttccccccgctgcgcgcgtgcatcaccattttgacaagggccaaggccgaaattttgacttcctgaagacagcgggaagccattttaatgaaatgagcgtgaaatgcttgagaaattaagttatttggacccctctaaattaaaaagattttcataaaaagccgttgactggcccctttttggcaaagattttgttttaaaaagtcctctaaacaattttttgcatagttttgggctcgcttgtcataaaacaaacatgcattttaactaattttggtcccaaaatcgaacgttttaaatcaaaatcaaaaaacgtcgccgaaattttttttttagcaattttagtggtatttccaacttctaataagatttttaccatgtaacaaatgacaaataaaataaaaaaaagatttgaagtgttcattttaaacatggacgagtaaaatgggttcatttaaacttattaaagaccaaagagggacccttaacgaagccgacactcatttcagaccaatccctaccccgaagaaaatgggaaatttttagttttttgttcgaattgtttaagaccttgaaatagtgcggatcctgctcccatggcttcacattgcgtatcatccgctgctcctcctggtcatacttgaacatggagtcggccatttttgaaatggggaaaaattggaaaaaacctaaaaatcagtaatgccaaaaattgaattacttatccattttcaatgaccatacatacatacatacatacatagtatcttcgccattattggaaaacatttgatacgttcgatgcagaatttttttctctatcgacatgcaaaatttggtgtaaattgtatgagtagaaaaaaagttatatgtggcaaagtaaattcggtttttctctattaacagagataaagaaatagtacgccaaaaagagagatgtttttttctctgcactctctttggttcatgtctcgttttttgaaacggtgtgttaatgatgtcaacagaaagttactaatataaaaaatttttacaaaaaagcctaagcctaggtttaagccaaaagcttaggcctagtctaagccattgttcgagttgcctgtgtatgagttattatactttatgtttaacaacgaagttttagttaaaaaattactgaataccggacaaaaaaataggtttcatcatagttattaggacggctaaaatatgtaccatagaccagggatagcacttaattctggtttccgaaaaattttgagcctcggaatgacatccctgccatggacacaaatgccatgggacgcgtaaactgtttttgggacgcgtaaaatgccatgggacgcgtaaactgttgttgggacgcgtaaaatgccatggaacgcgtaaaaccgactagaaccaaaaattattcccagggagggggtccgggtcgatgattacgagtctgacattatttcaatcaattttgaattattttacacaatttttggtattttttcaaatgttaaaagccattttggccgtttttaagatatactttagtgcatacggtatttgggcattttttggatttaggacatatttgagggatttttagtgcgttttaagcgccgtgtttcgacttttgcaccgcacagcaaaatcgacatatgagccgcgaaatttgcgcctcgacacttgcgctgactagcaaaaatgaacatttacgccgttcgtcaaaaatatatattttttaaattgttgccaattttcaaaaagatttaaaaaagtagtcaaaaatgcaggggttttcggggtcgctgctgctgatcacgaatatgacatcaatttctatcaattctgaatcactgactcgaattcgaaaaaaaaagtcgaaattttaatattttaaaaaatacatcaatatttatggtgctgttagttttcgacagtgttggtttcgacagtgttgttttcgacagtgattgatttcgacagtagaattttgtttttaaaagtatgtatgtatatggttatagtatcgccacatatcttcttctgctaccatttttcggcaaaatggacttaagcgctgtgttccattcaaatgcgtgttccaaaccgaatgtcatccctttaaattcacagaaatcccggaaaaatttttttaaacctttaatgaattgttgcttctgctgagattttttgcaactcggtctaccatattccacaaattaattgcaaaaagggcagcctgttgtctcaaattgagcacttaaatttgacccctaatccatgcatctggtgcccctcccgcatcacgtacaagaacttcttcgttttcaacaatttgccttgggccaatccatgtcctcacaaaataaatgacaaattcttaattttagaattacttcatttttttataagactagaccctgcaattcatggtttggctcaagcgttgccatcaatatgcaaaagtaattgtagacatttccaaccggaacaaatgctaacgcctgcagcgagcgaagagttattcggacattctcaacattattaaactatccaaataaattgggaaaagtctgaattcggcgaaaaattgcttggccgaagtggaacaagcagccgctttgttccgactccgggaacacttggcgtgctgctgaaattgatccggcttcaaagtcgctcttaatccttgccgggtcaaaaccacgtggactcgtctaaatcgacatttatctgacagccgacttttctaacaacttcaaacgttccatcaactgccacttcgtctctgtaggcccggagggtgttaatcccaaattgtgaacagaaaataatcattcggcttccttggagattttggttgtagatgactcgatcaaccaactgatcgggaatgacaatatcacgggttggaacagcatccaacccagcgtcgccttcctcaaataaacaataaaaataatttttttctatattttatttttttgaccgccatttgttgttttcggcggtgataattatatgtccatctcatgcaagaagggcctggtgcagacgcaactcgaactttaagaggcaaattcgaacggacgtcattgacaatatttcgccttgaagttgggtattcgctccttgcttcttggcgaagcctttcagctgatactcgaatctgtccaactttgtcttatacccttagaagcaatttatttgtaccaattcagcaccaaatgtagccggatggttgtgttcttttgtaaccctgcccaatttatactgtactccatcagcttcttgatgccattcgatttggacgcacgcacgaccaggacaataaggagaacggcaagggcaccgccaatattcccacccatctttgaccttagataaagccttaaaaccactgatcagatttttgacattagtttgttggacctcaaatgcatactcaaacccggcatttgttagcaggattttcccacgcgatgatttagccgcattaaaacgcaataaagccattatttgactaagaaaaaattgagtaaaaatggaactatggattgaggagaatgataatatggacgaagaatgaccacaggtcattcatattataactttactcgaaaatcttatctaggaaattgtttgtcgagaacagcacagcagcaggagatgtttgcgcagaaaaagttaacgcgataagaatattttatatttttacaaaaaataaccatacaactttagttgtgtttaatattatttatttatttatttaaattaaatttcttataaattttttatgtatatgaaaataatatttaaaattaattcatatgtgcatatacataaaaaaataattttaaaaaaataatttaaaaattttatactgtcgaaatcaatcactgtcgaaaacacctggtacgatatttattaccagtaaataattaggtaggaacatttgatcgaattccgaaaatctatggttttcaaatcaatgataagaccaaggaattttgcaaagtgatcgtattcatgatcagaaacgcaaaaaccccggattagtcttttcataacagaaaaaaaatttttatggggtcaaactattctcggtgggggtcgactgggcgccgccaactgggcgacgccgactgggcgacgccaactgggcgccagatcaactgggcgccgccgactgggcgccaatcaactgggcgccagtccccgtttccctccctactagagaagggattccgagaccacaaaaatttttgaaaattggagttccgaagcccaaaattttttcgaaacggaattacgtgctatccctaccccctaccatatatgtgataaatagggattttttaggcaaatgcataaaattttgcgtaatagttatgattgtaggcccccttttaagaaattttttttgttgttccaaaagttttctgggtcgctgacaatgaatcctgtatccatttcgaaccctcggacccaaattctaacaatttttgttcgaatttgggtccgggttcgtaatttgtcgaaatggatgtcggattcgtgataagcgacccaaaaccccttgaaatcatgctttcatgacttttaaaaataaaaacaaaaaaaaatttctttgaaaatacacccttcagaattgaaaataaaaattctcaaaaattttattgcctcttcgaaaatttgtgtctatttaaacctattttgcgatttttgtgcctaaagaaagggaatttgaaagtgggtcttggcgcccagtcggcggcgcccagttgagctggcgcccagttggcgtcgcccagttggcgtcgcccagtcggcggcgcccagtcgacccggtccgcaagattctccagtattaccgttgtgatgatgcatcgactattgtatgtatagcagcgctctttttttaaaatataagcaaaaatcaaaaacacaacacttaaatagcaaagtccgatataataaaggtcacataatcgcatcaatcacccaaattcatttctgctgatcaccactcggcccagcggaagcaggcagcatcgagaagacttcaaaaacaaaatttaaacaagaaatttgctgagatttttaaaatttttcacccattgtcgactccactgtctccgatgaaaagcactaattgtttgtttccatcagttaattcattcatgaccgcattttgccatttttcatcatcgtctgctgcaacacaacggagtcaatcggagaggacggacgaaagttgacgaaaatgccaaaagcaacagaagaagaagcgatggaaaatgcctaaaaagaagacaaaaaaaatgaaagaaaacatgtcggaaaaatcactattcaccgttttgatttgctcgactgtttccaaccattgttgctccactgttgaattgtcaattcggacaaagagctgtttcatcaaattgtcgtgacaaggcgtgaacagccattttgccaacgcttggcaatccgacgcattggcactgtcgtcgagcggaaattcggggcaaatgccgtcatagaaattgacgacacgaagggattgacaatcgttgaacaatttggttctccaatgtccatttgcgcgttttgaaatgttcgtccacgcggcggtcaaatcggcgactgatcatcgcaattccgaggccaagttgagagcgtggaagcaaaccgaacacttcaagccaacaatcggcagaaatgaagctgaaaaagcaaaatgattggcattgaaattgaaatttagaatattacatcgctttttccatttctctctccgcttcattaggattgtgggacatttttagaattaataatca

SEQ ID NO: 10364 - DNA, 2097 bp, Heterodera glycines
  unsure (1)..(2097): unsure at all n locations
actttatgagtccaatcaattgacaatccncgggtttttatacaataactttttccatgttcgaacaaaccctatctttttggtatcattcgaaagtacaaagtctaacgaagctaaaatatataaaatcgcagcgttcaggcaattaccaaaaaaatttgattaattaagtaaatacttaatattttcgtttgtaactttcttgaaatgttagatttttcttgttttctcgtattattacattacttagactttgtactttcgaatgataccaaaaaagatagggtttgttcgagcatgaacaaagttattgtataaaaatcattgattggtggactcataaagtgcactagagcccaatttcttgctatttttttaaattattaatcattaacctttgtgtatgagtttcattgtgccattttcgtaaccgatctcctcacaaattcgctctctcaattccaccaaatttgttggcatttgctgccacagttcgtttggcttcgccgccgcttcacaattgtttagtgagcaaaaaagacctcctgacaattaattcaggaaaattattgtgacataaattaatgataattattgcaaaccttataaaccaacgcgttggcaaacacggcgccccgcgccacaaacgcattggtaaagttgcgcttgtttatgcgcttaaatttttttccaaaaattatggttattacctgaaaatataaataaattaaacatattttataatatgatataaacattcaaatctgcaaaatttattaatcatagtatcgacacaattaatttatttttaatggctaccgatttttctctatttctttaacaaaattcttttctttttttctctttctctcgcacactctctctcactattctctctctctctttctcgctcctctctcactttcctatttttctatcgcacactctctcctccctcactattttctctctttatctaactaatgtatatgatctaattatcccccccccgtggggttgggggggggggggattattttttaagctcctcagagactgagggattaatggagattggtgggataattagagcaaatacagaattttctctttctcaaccccatccaataggtttgggtttgtggaaggggatgtcagagaaaaaaatctccaatcaaattatcgggcgaaaatcaatcgataatttgattgggaatattatctactcacatctccaaattcaaatttttctcccatttttccttttctcaattttaccctccttttgctgctgcttgtgtgaaagcatctccataatttattgaattggtcaaaaatgacatttttgtttgataaaacaagcttatattttatctttttataagaatataattctgttgaataaataataaaaaataaaagagagaaataaaaataaatgattattccttcattttcttacatttttttaaactaattttcggcaaaatgatgactctaaaaccaaaggagcaaaaaaaagaagttcccaacatcctcatttatgaacaattatttttttcttttattgccggaggatagtcaaaaaatggagaaggacaaatccgtcagtaaataatccgtaaggaaatttatttttaaaacacccagatttatttaaaatcacttggaaatttaatttaatcgctcaaaaagtaaattaatattttgggttattttataaatattatgaaataagcattttaaaagaagtaaatgataatttcattcaccagatggtcaattaattgaagtataaagtaactagaaagattaagaatttatgaaaatataacaataattttcgcaagatttttgattttgctcaaaaaaattgcagacggattatccactgaaagattgtcaaaaaaagcaaacgatttgaacgaccgaattgaaaaaatggtcagaagaaaagtttaaattttcgaatttcaaatagacctagcgctatcgattggtatatatttcgaccattttcggctctgggccatatgatcaatatttacccatttgaattatggtttcgaccttcccccctcaccgtccccggggacg

SEQ ID NO: 10365 - DNA, 1449 bp, Heterodera glycines
aaacgacccagtttccccatccccgtccacgaggctcaaaggctccctgaaaatgctacaccggcggaaaatccgacaccaaacatagatttttaaaaatataaattttgatttttttttgaattcagagtccggaaaatgattgtataactttactgatttgtactttaataaaattattttactaaaatttttgatgaacttcccaaaatttgacattttttgtcaaaaaaaaatttgttcgtaagatttcgtcttattctcaccaataccacaatatcaaatttcaaaagaacaacagcgggggataggcgcttcccccgctaggcagtacggttgaattgtcgatgaatatttttttaatttttgtgatttttagcacctcttgcgattttttaaaaatctgtttttgtagctttttggcactagaatttttgacaaaattgccaaaatatttaagaatttttctgtctgctcctttcggccaaatcaaaaattctcgtcacaaaataaataaataaatttggagatgaatttttgagaaatttttcatttcttaggggtgcatttttgaaaatttcgggtcgattatttttcgatcgggtccctgctctaatataacttttaattcagattaaaatccttttactccaacatggacattttttagatttctatataacctgcattatttggattttccattttatttactgtttattgaaagcatttgaccttattgaccgttcactacgagagtaaactaataattatttcatttatttactcatttaatctttgtcattttttatctcggaactcagactttcgcataaataataaactgacaaaatatttttaatcaaattaaattattaaatgtgaaagtcaaatattaggaaaagagttcaggcattttgattggctagatataaatcaaaaatattataaataaagaaaattactattcctggtacataaaaaattatcattattttttcaaatgcttttccatttgggcattttcacttttactcaagcattttgtcatgaattcggacgccaatgattgccagggttgctaaaaacaaaacatttaacgagaataaaaaaaaacaaccaaatgccacgacaatgaacgacttcgggttaatgcagacggtgccactatgggaatcatcaacgttgatcggcacaaaaatttctaaacaattacaaatatagattctgatgatttttttggattcatatatcatagaccgatggaatcgattgctacatattagattccttcggtttttagactttagacggttcagtccaaagccatttgagtgccgggtcttaacgggaatcgtttccgccaaaatcctttccgaatgatatatgtgattcaatttaaaacagaaaattcttaattttctgtaatttttcacaaccatttttatt

SEQ ID NO: 10366 - DNA, 1526 bp, Heterodera glycines
cttttctaactttttatgaaattcaaaaaattgactaattgaaaggttgaaacaaagttttgattatttttttaatatatatgtagataatatttaaaaaattatattatttgtttacttgcatgacgtggtccaccacccatttctcgtgctcaaacactttgatttccggcaaccaaatgttgagcttaacgaggagaaaagaaaatgaaaatgttgttaagaaaatatacgaaatgaaaaacaaaaaagcaccgttttgttcttgcctccttcgctgcaggtgtggttcacttccagcaccacgcggtaactgtatctaaacaggaaataagccagtcaaacactcactcatccatttacataataattactttttaataaaattttaaataaaattttgaataattttatttatttttttacttgagcatttccatgtcatatacgggggccggtgtggttgcgttctcttttggctcggattcggtggttttcttctcagcacagagactaaaaaaacgaatttttggcaaataaaaattttttttgttcagcagttttttctttttccaattgaaattttttgtgttatttatgtgacaaaaatcaatttttacaataatagtgcgtgctttactgcacataattaccgtaccgttccatcagcgtaataccgtaagcaaagctgtcagccgtcactcccaccagtgctttgctaaaaaacaaagaaaacaaatatttatttatttatttgtttattttttacgtcggccgtttaacaaatgctgcacacgtctctttcaacagtccctgaaaaaattataaaaatagataaataaatgttttgtttttgagtacctgtggcatgtattggcgaagtgacagcgatgcagtcattttagcgtttttgcaaacgacgcaaccctcaaaaagcagcaacaccatgtctgagagggaaatgtttaaaattaaattgaaaatttagttaaaatttattcgattgaatttgggtgccaaagtcagtctttaaaattgttaccaagcccaagccagaaaaatttttttttgggggggggaacctgaagaccttttttgctcttcgggcaaaaaatttttccattaaaaattcagaacccgagagcaaaaaaaaaaaatagggacttgtagccgtttttgcgtcaaaaactgtcaaattttggcaattttggggctaaaattccaaaaaactaaagtaaattggtgggtccggcggtgccgataggcgccgccgggaaaattttagacaatttgagtgcactttgttacaaaaacgcctataaaattcaaaaatgtcctaagcatttttggaaaattaaaaatttcaccaattgaaaacagaatttaataaattaatttttagcttctcttccaatgcttgcaaatttatgatgttcaatggctttttcaatgccaacaattcaccgtgcatgaagcccgtattgtcgaactgggtctggtttcttgaagttttcctccgcccttct

SEQ ID NO: 10367 - DNA, 2575 bp, Heterodera glycines
cccccccccccccccttagatacgggcctgatgtacccaaacatttttgttcaaaaactatttttcatttttttttgccaaaatgaaaacacacgcagcagaagcggagaacacccaaacttcagcaaggacagtgaaaataattgtctcatttcaaaaaaaaaaatttcccgagtttaatttttattttattatttatttaaaataaaatttgtttttgcccacccctgctggagtacacgctgctgtctttccgttaaatttggcatcggagacattttttcgcccttcgatttgtgtaacatatctcgttgcgttggccgatgaattcgacgggtccacctcttcaaattgttttaatttattttattgttttaatattaaatttggggggggagaagaaagtcaaacatttcttggacaaagttggacagtacacaaaagttgcgattgtgtacacaaggacaaaaaaaaatggtcaaagatttgcatgtttttggggcaaaatatgctaaaaaaatgccaattaaaaaatatatagggccttcaagctgctgaaaatttacagaaaaacatttaaaaatgaaaaatttcgagaacccaaaattcgcataaaaatagcacatttatttgaaacgggtaaaaattgctatttgctttttccatatgtaagcatagaaaatttaaaattttttgcccggttcactcaaaaccacaacaaaaaataaataatttacagacaaaaaaagaggcaaatatgccctgaacatgcaaaggtcaaaatgattgaatgcgaacccgggacgaacaatgaatgttttatgcatttacctggcagtgtcaggtcaaatttatccggaatcggcaggtcttttttcggttcaccggtcggttcgggtatcggttcaccggttgcaactcccggttgaccgcttggtgcaactcccggttgaccgcttggtgcaactcccggttgaccgcttggtgcgactggtacgtctggttttattgtttcagttccagttccattgacactcgctggtcccgggactgcaaattaacacaatgattaaaccagtgattgtgtgtgctatcaaaaacaaagggccaagctgctggtgggccgttcattcaccaccaccatcactcatcactcataaattccccaatttcaaattgagtttttttcgtatattttacatgaaggatcatttgaagcagcctcaaaaattttgtgcttccgtaaaagggcatattgaacggggcaagggggaggagaggtgcagttttgaattcatccaattacctgtctcattgcctccaccgcctcctccagcagtctttcctccaccgcctcctccagcagtctttcctccaccgcctcctccagcagtctttcctccaccgcctcctccagcagtctttcctccaccgcctcctccagcagtcttttctccaccgcctcctccagcagtcttttctccaccgcctcctccagcagtcttttctccaccgcctcctccagcaggatttcctccttggcgcttctgccgtgagttgggctctccttaataaaaaaaaattgaattatgtcctccacatatttatgtacagttcatattggcattgctcacctttcgccagtgcatccgttttgtgcttcaacagtggcggttctgggccttccggtgccgattcttcaacatcgtttggctccggcttctcctgtccttcctcatccgtttcctggctttcagtgagctggtcctcgtccggatttggtccatcctcttccacttcctggctttcctttggcttcttcggatttggtccatcctcttccacttcctggctttcctttggcttcttcggatttggttcatcctcttccacttcctggctttcctttggcttcttcggatttggtccatcctcttccacttcctggctttcctttggcttcttcggatttggttcatcctcttccacttcctggctttcctttggcttcttcggatttggtccatcctcttccactttctggctttccgttggcttttccgggttatttccttccgtgtctgttccctggcttttgtccggttttgctttgtccgagtccaaaattcctggatcaaattattaaattaattttttttttgttatattcatttttatttacctggcttttcgttgttcggttccggtttcgatgcgtcagcgtcggcggcgcgctgttgtcgaacaacagcgctgtccagcgcgctgatcagcgcgatcaacagactgaaagtggacagagagttaatatttggccatggttcaagccccacccctccctccaattaacttacacaagtgcagaccacttgttcatgttagacggtcgagagtgggacgggttgctttgaagaatgggattcgggatcagaaatagaggaaaaaatcacttcctaaaaaacaatgaaatcaaaatattggcttttaaaccaaaaatttttttgatttctaaatttaagtgaaatacaaaaaataaagcggttttcgaaaaaaattatttaaaattttttaatcg

SEQ ID NO: 10368 - DNA, 3100 bp, Heterodera glycines
tgatagaaatatagtcattttattattcgaaaatttttgagttaattgctttatttaattgagctgtaattttgaattcaaacaatttaaaaatggcattaatttttgtgtgtagcaaattttaaacgctctctatcttgtacatagtattttgtttttttcaaaaagaaaaaaaaaaaatttccaccccgctataaattttttctgacatttaaccctgtttttcaatgtgtttcatcggtaatagtggagaatgtgggctccaccaaaaaaaaaaaatttttttttttggttgagcacagattctccattaaatatgagttttcaagagcgtccttgaaaaaaacgggcacgaatgctggttttcaaaaacatgccggcttttgggtgaaaatatttttgcttttttccactttattacccccgttgtttgtagtggtagtgccaatgccaatttcttcctccacgtcgccctcccaaattggctcgttgtgcagcgacatccttggcattgtgccaaaccgttttgccatattattttttggttgcaatgaacaaaaacgggcaaattgggaaacaacaatttgttgttggcattgttgttgttgcgattcgacagcaacagcattatcattggcatttgcagcagcaacaacaacaacagttgaagaagagttaggggcacgcaatgagccctaaattgtcaaagtttgttaagtttttaaatgggttgcattttatcagaatttcttaaaatttgattttttttttgaaatttcataaaattctaaacttgttcgttttaaatatattatgaattattatgaataattttgttttttaaaaatcactttcttagtgcccaaaaaaaaaactttggaaagcatttcagacaaaatcttcaaggaaattttttttggatagattgcatttttgggattccacaattctctcaaaaattttagtcaaattttatttttttacaaaaatataaaacattaaaaaacaaaaaaacaccttaccgatcgttcaaataagctcgggttgccgcttggccgtggtgtcgaagcattcaacactgatgttaccgtaggcattgttggtattgacggcatactgtgcctgcggatttgaaggaattacatttcgccaatttgcccgcaaattcaaaaaatgattgcactaactgtacctgttagacactgtcaccgaattatttgtttgctgcacttttccatccaccaaaattgccttctgtggatcggatcggcgttcactgatcgacaattggcgaaacgacccgtaggcttgattggttctgtaaatacgagaaatttaatagtgagatattaaaggctctaattttttgagtttaactaaaaaaaattaaaattaaaaaaaaaattcctagggggttggaaaaatttcttgaaaaattattaatgaagcgccaatttgtcgtggattttcgcaaaaatttcgcgcatctttttcggaaattttttgttaggtataataagtattgaagggggtaacaacaaggaaaatggaaattttcagtaaaaaaccacaattttttccttggagtcttcttaacctgtctcatttcgattttatttataacttttcgaaaatttttatattccaatttataaattttttaaatttcccgcctcgcaaattctcctccacctccgccacaattgtcctcaatgcccgagtccaattccacagtatgcgcaagcgcttgtgcagtacggtatgccgccgtttctgcgtcccgtttccgcttcttctcaagacagacagtgaacgcgcagccaaccgcatggcttaagcgttcgccctatggcggaatgaattaataataaaacaattaatgaaaaatattatttattattttatggctaatatagctgaatttaacatcataaaattgcaatatatttagaagaaattatttaattacttagtataaaaaatatatttcattaaaaattgtaaaacattctcatttctttattgcttttttatgaaataataatttttttcaatataaactatagtacctacagaatcttttgtggcatggaagccgtggcacatccaacggcgcgtggcgccgtcccggcaaatgtatgaaaagcccttctcattgcttcgatccggcgcacaaaatgatactttttcgattgtctgcaaaacttttaaaatttaaatataaaatattcttagattttttaattgtcggtgcctgcctgatcaacgatcagtcctcggttgtgttcttgatcaaccacacggatgccgtccccggaaatgtacaacaatgccttggtcacccgctttcgggccttaagattttgcataattaggcactgattgttgttgtcatgtataggtgtgacaaggacgtccttgaaaatccgaagtgtccttgattttcgaaaatttgtcagttttttaactttattccataaacttcaaattttaggcgcaaaaaatgcctgtcaaagattggaattttgaccatgttaaattgaaaatagtttatattttaaataattaaaaaactgaattaaaatagacccaaaagaaataagcaatttacgaagaagacaaataaataataaaatatttgaattaaattattttaaatggttattgaaaagagaaaaaaattttgtttttttgatatttcaattatttattttaaatttgccaattttggaaaaaatttaattatgctctaaccctgaggtgttgaagcgcactttcgcacacggacatgccacgcgattcaaacacttcacaagcgccgagatactgtaaatatcgtatacttttaaaaattgtataaaattgtttaaaatcaatttaaaaaagccaaaaccattggaatttaactaacaattcgagattttagagtataatccaataaaaatgaataatgaaaaattctcaaaaatccacaacactttgccaacccaaacaaagtaagcgggccaaacaatttatttaattaaaaaaaaatgccgacaaaggcaacagaatgaaaaaaaaaattgcatttttagggcatttgtaattatcgattttg

SEQ ID NO: 10369 - DNA, 1363 bp, Heterodera glycines
gcaataattttttgcgccagcgccggcagacggcccttcgctggccgactgagtaccaccggcgccggcgccatcatttgctgtggccgatgattgagtcaatgccttaggcgagggaggatagcaatttttgaaataaaattgccgaaaattttaaatttcagtttaaaattattgaaagaactaagccaatggaagaaattgagggctcgaatctatggaaaataaatttttaaactgcatatggagacaaaattttggcaaattttttataattttggaaaataaaaaataattttaaagagatgggtaataggggaggcaggaagagctggaaatagtaagttcgggaaatttaagggtaaagaattgggatttttcccacaaaattcgccactttggggcttttttgactaaaaattgttattacaaattttgtttttttctccattttttctgcttttaaagtatgtaaatttatgagggaatatgaaaacgcataaaattttttaattttcgtttttccattcgtttttttattaatttttttttagaaattcaatttatcgaaagattttaaaaatagttatgattttttaaaaatcgttggtccctttcgcgaagcaacttttccattaacttccagctataaaactgtgttaaaattcattttttccataaccgatgataatccatctatatcagacaattaaggaataattaatcaatccatgataattagcctagccagctaattaggtgtcaagctgggtggttaattgaacctgtaattgatgacacccgcttgagccgcctttacgaaatgaacgccgaatggagcgccgaattcggtccatgccacggtttaaaaaatgcctaaaatttgttgcgtaaaattaaatttagtcagattaatttttaaacattaattggaaggatatagattattttaaatattttaattcgaaaatttgcaaatttaaaataaatttaaaatggaataagtattttaaataaatttgaaattggataaattattctaatggcatagagaataaatttttttaaattaaatcagagcaatcgaaagtgtactggatttttcgaagcctataataaaacttgaaaaaaaatgcacaaaaattattattttaaaaataatttaattaaatttttttttttcaatttttacggtttaatcaattaaattgggagcattttattgtgtttaagaaatggcttttacgctttgactttggcttgccaacatcgattactcatctatgcacatccccaagggtatatgtattttctgccgctttgggggggcaaatggcgtcgcatttttttgccttttcttttg

SEQ ID NO: 10370 - DNA, 6237 bp, Heterodera glycines
  unsure (1)..(6237): unsure at all n locations
tgtgcgtgtgcattttggtcgtcctacctttcatggacatccgtcgggtgggccaacgctcggcacaacaacaaggggaggaagaagaagcaagggaaaacggagaagcggggggagaacagcagaagcagcggacgaggcagaattgctctcgagtttggtgggtgaactgctcggactcctccgagtcatgatcagtcagtccaatgcgtcgtaaatttttccaaaaaactaaatcaacctaattgaaaacatgagatggacatcgacgacatggcccactccccccccccccctcccatcctccgccctttcaaaagctcagaaaagtacacgggaatgcaatgtgaatttggttttagatttgccgcgcccggctccgacccttcaaaccttggcacaaattggtgaggagaagccgcccaacccgaacatcattacatcatttatgcagtcaacatcattttcatggttttattttgtcctaatttagttaaaaatttacaaacatcggcacttttgtcaattatttggttaccccacatttgcgcccggacattagtgcctcggacatttgcgcctatgtccaaaatcgggttaaaactttattttttcaatcccggatggcttaaacagtttcaaataaaaaatagaaagtaattgtatgcgattacttgattcagaaaatttttgaaaaattatagaattatttttctaataaaccaaaagaactagttttgttaaatttaatgctgtttaagacgtctaagattgaaaaaacttaagtttgaacccacaaatgtccgaggcgtaaatgtctggacccggattatttgcaccaaaaaatgaccaaattaaaaaaagagcgactacaaatcacaaattggctactttgtttgttctgtggcccctcatttttatagtcaaacaaacaagccgtgagtaacaaaattttggctttagtgcactttaggcgtctccatccattagtttctttggcccaaacttttttatgacttgatcaaggcctacattcatggtaatccttcggaattggtgtccgacgggaaaaagataaaaattttctttgaacttttattagagtaaaattaatctctgcagttttttttgtgtttttataaattccaagtctttaagccttcgtttgataccaagaatgtatttagtgacaaagcaacaaaaaacttagaggccaaagaaattgaggttgaacacttttttaatttgaaaaatgaagcgccacaaaacaggaaagtacttgaaattgtattcatttcaaccaattccctaactatttgttgtttgtcacaatataagccatgagtcaatttctcaaaaaattaccactaaaaatataaacttttgagtaaaataaggtatcaaattactttaaactcgctgatgcataaattggatttttttatgaaatttatatttttggttgtcggcacattggtgctgggcattggcgcctggttgcgcatcatgaagagcagtttctgccgactttctcagtgagcgctaccgttaggcggtccacgaggcgttttgggtaagcaaattttttttggatttttttttctaatagaggcctaaaaatggtcaaacaaattatactggactttaaaaaaaaatttttttttttttgcccgcttataaattccaattgaaaataatgtttctttttacttttacatgaaaaacattttctgattggtgaaaacgaactgaattgctgcagcaaaagatgaatcctgtttaatttgattataggcaccaacttgaatttttagaaattcgttttttttttaatttttgagtttcgatttggggttcggaattgaactgattttaatgccgtgttcatgattaaaaatccatgagaaccaaaaaaaaccttggaaacttttgaaaggaaaacaaaatcaaacatttagttgaaaaattcgaccaaaatatggtactaccaattttttagttaaacttcaaattgcacagatgcataaattggattttttacgaaatttaaaataattttttttttcggttgtcggcactttgatgtaggccacgtgcgcttgactgccacgtgtggtatttgcctccgatgaccaaagaggtgggcaaaaaaattaaagaaatttttttcagcgattgatgtgtgttttttcgaaataggaatttcccccggtgggggtcgactggggccctggcgaatcggccatcgagtttggccaatcgggtgaagaaggcaatcgctgtgcggggcggactcgtcgacttggactgggacgggcagctgaagcggtacaaagtgccggcacggatggttgacgaacagcgggaaaggtggtgggtagaaaaaatttaataaaaaattttttcctcccagaaacttaaaaaaaaattcggagaaggtcgtttccatccgaaaaatttttaaaaaaatttcaaactagtattattattcaataaaaattttttgaaaaatcgctgaaaaaaatttcttcaaaaataccaagtttggaaaattttaaaaaaccatttcagtggaaaccatgcgtgggataatgaaccgggaagttttatttgaatttttttttctatgtttttcgattagattgttttcctacccccaggtactaccagaggtatcagcggtacacctccgacccgccttcctctgcctcatcggcgcccatccgcagcacaatgatggcggacggggacgaggaggagtacaaccacagccagcaggaccaccaccaccacaatcatcatcatcatcatcatttgggtgccaatgatgccatcatcaacaactgtgatgcaagcagtgccaacgacaacaacaaggagaacgatgacaatgacggaactaacaacactgattgtgaacaacaacaacaacgctcaaatgataccgctgaatttttgattgattaattgttgatgttgtgatgatgatcatttttatccttctccaccccatttttttaaaactataatagagcaaaaatatacatatattttttaggaggaattatagccatatacaatatataattatttatgttttatttacatattttttttcttactttgctcataaaaaattttattttttgtgcaattaaaatagctcattaatttcagaaaaaaaagctataacctaaattatggatcgaaaagcgtcgacctcgaagaagcgcaaacaaacggagaaggcccggagcaaacaacaggaggaatgaagggtcagacagttttttggtagtactagtaggaatgtttatatcccatttttttgcaaaaaaaaatcaaaattttttcgtttagacgtcctgaaaataagtaccaggtggttttcgcggtcgctgaccacgaatatggcaaccatttcgccaaattcgggatcacttaaccgaattcgaataaaaagtcgaaaactcgagtttttcaaaattcgcattaagatcaaaacaagctatattgaaacatacattttgttcagattatactagtaataaaacaatttcaaattttctaccttttgttcgaatttgagttaggggttcggaataagccaaaataattgccatatcatgatcagcgaactcgaaaccaccacaaaattgataaattttcttaaaaaaaatttttcccctggcgccaccggactccaaaaaaatttaattttttaagatcaattttaaaagtctttagtgaccaattattgcaatttacaggaaacttctggatcagatgacacggactacgaaggcgagctcacgataattgcaactgcgtgcgcgatggcaattttgctgatttgattgtacgcgttcggagcacactgaagaaatggaagaagccaaaaattgacaccccgcgggtaagaacatcaatttaaaagatatataaataaattatcaaatgaaatttcccaatgcaatataaaaattatcatttttcaaaaaagtgtcaaaactttttttggcgacccgatcatttcggcgttcgtttttcgccgaccgttttttgtgactcattttttgtgttcgttttttcggcgcccgtttttggcgcacgagtaaaactatagatggtgggtcacctttttggatttcgattccatgatcagaattcgaacaaaattcaaaaactcaaaatttatttttatgtttgtatctgtatatttgaccgttttgatcaacttaaaaacaaaggtaaattttgaacttcgactttttgttcgaattcgggtcagggatccgaaattagtcaaaatgaatgttggattccggttccccggccttcgataatttattgtaaattgaatcgatttaaaaatcctcaaaaatcgaccaaaatttaatcaccaaaaaatgtgaaaaatcgactaaattttcagttccgtatcctggttccggttacttattggcccataattttttgattgtgagctaatttatacgattttaattccattcgaaagcacttgattttggttaagatgtatgattaagcagaagtaagcgattagaaactcaaaaaagttcaaaaacaaaattcaccgatattttattgtaactattcaagtgttatttattaatcgctcagtttttgctgaatcatatattttgaaatataaataaaaaatgtatctctttgagaggatttgaaccatagacaaaacccattttgatggtgatcaccttacagattattgcgaaaaaattaataaaagcataaattggcgaaagaaaaataaaaatttgaaatttggtcaatgagtctaaaattacaaatgaaaaaaatttctaatttaattttaaggcatacccaaacagttccaaacccagaggcctgtgtctgatcatcaacaacacccactttgatcaaaaaattgtcatatcattgttgatttgaattattttggcgttttgttttagtttttgtgaccctttattttattttgttttgtttggggtatgtgtgatatatatgctcttcctaaatttgtaattgattgctgtgtgctgttttattaattggaagtaaaagaaagcagtgaaagagacggcgatttggttttggatttgggatacaattcccctttcccattggactattctttttcctacgacggctttttcaatgcttaatgtgtgttgtcttttgaaggcttcctttgctttacaaaacctcggcttttcccccattccttttttaatgagcgcttacttttgtatttatggcatgtcaataattaatggaggcgaaattttcgcgtgttgtttttcccccatcgctcgtgccattcgctcatttgacattgatacattttgtttcgcctttcctcatattagcattattttacagctaactaattatttttgagcaacaaaaagcagcaatttttggcacaatttcccaaaaggaccatttgctggccaatgctaatagtgtaaaaaaatgtgccaattgtctttctctttgcctgagttggcattggcattccctcgaggctccaattgggcggccaagctatataaaagaagaagcttttttggacgaccgactcatttatttgtttcttctctcatcgtttcgttttgaggggtcccaaaagtgcctttcccttgagaaagtcttttcattctttggggcgttttgttttataacttacaacaattattatccaattacgctttccttttaatacattaaaaatgatcgcaaaaaatcattcttcacttcctctgaacgatcaaaatcaaaacttcttcattgatggcgtttcttctcgacttatttacggtacgaccgtatgattaattaggcaatttttgaataacaaatcatttatatacctaataaataaaaacattaattaaaaaattcatttaattacacanaacactccattcaatacctttccctcttataataataatacatacacaaaaaatccccataaacaaaattccatatatcttcacaattcatacacatacaaatacctaacccaatttaaaatttaacattattataacacaaattcactcatacttttactcttacatataaataaactcataaataccttataaatttccttactatatcattaaaaaattcatcaaaaaanttcccctcccttnnnnnnnnnttcnncccaaacctagcagtgccccacgggaatgatttgtg

SEQ ID NO: 10371 - DNA, 4116 bp, Heterodera glycines
  unsure (1)..(4116): unsure at all n locations
cttttctcagagccaaccaaatttcataatgttctcctttataaacgaaaatttaaaaaaaatttgacgaagtttaaaatggtatatcaaaaaaaaaaaaatctgtaagagttgggcttttaccgtgggaaggcagttctgctgacttttgcagtttatgtgaccaaaaatgaaaataaacccataattaggatcttgtaaaccgaaaaatatttggaggcacgagtcgtgccaacaacatcaagacaccggagcacggaacatcaccaacccaagggttcaaaactataaaaactgcgtaccgcaaattgatctttttatatatttgaaaattgaatagtgcgatcagcggttttgatctactggtgtaaatttgatcactttagaaacaatcaaaaaagatatccaaatttgttgcaaattgcaacacctttttaaattttctttgtttaaaaatttaaattcataaatagggatgcaatttttaggcaaaagcctatttttttcctgagctccccgtggcttgaaacgcacgaaaaacatgtttttttcggctgttgttaagctacttttcgagttattagtgcctattttctaggcttttatttttagcgcctaaaaagcctaaaaatttttgaaagagcctatttttgcctattttggcgttttgcccaaaatttgttaacaaaaatgcaataaaaacgaaaaatacacccctaagaatcaacgtaaaatttttttcaaaaaatatcccctaacaaccgacccgaaaattttcnaaaatacatccctaagaaatgaaatttttttcaaaattcatctccaaaatttatttatttattttattgacaagaatttgtgatttaaaaattatttatctcaatactgatttggcctaatttttttatttttttgaatacattttgtcattttacacccctaaatttgaggatttttagtgcctatttttcattttttagtgcctattttaggggttttttagagcctaaagcctacctatttttgcagtttttagagcctaaaaattgcatccctattcataaaaatttaaattttaaattaattagccaaaacaaaatgacaaaattatcaaatttaaaatgcaaaaactgaaaattataaaaaaaacacaatgatgggattgcatgtgattttgctaattttgcaaactaaaaagcaagaagttaatcaattctccattcttttctgctaaaatttcttaattttatattgaaaacataaataaatacaaaaccatttgctgtgcttttagaacaaattaaatttgataaatttgtgcattatttttgtgatcaaaaatgacagaagatgagacggaagacacatcaacatttggcagctcaagaatcgatggctatctttacaaggcgagttttgaagcagtttatttccaaaatgggaacggtttgtggtcccaaattatggcacccaaacaaaatcacctttttccctttattgttaactgtttcagttggaacagcgtccattcgtcggccaaattcgcagaaagtattggtttgtgctgcctcgcgatactcccgttttatattggtatggcgaacgaaaaatttaaaaacgaacgcctaatttcagcccttttccctcattttcaggtacaaatcgcccactgattttaattgtgcgggtcgcattcttctcacgggcgctgcgttcctttacaaccccagggagcaagggattttcgagattcagtgaggaagtctcgattttatacgatgaatacttctgattctacttttccacccttcgggattcgtttttctcgactaaaatttcaaaaaaaatgaaattttctacttatttacgatttattgaatttataggacaatgaaatttagtcaaaacggatgaatccaacataaacaattccccaattatttttcagaggagtaaaatttctccgtttttagcgtcgacaacaaatgttatcttttggaggcgccgaacagccgtgcccggttggattggctcagcgccatgcagcaaagtcggcgtcggcactaccgtcgcgagaaggaggacaccaaagagaaatcatcagagagggaaggggagggagccgaccgaaccaatgccaatgaaaacgacgacggagaccaaatccaaggcaatttgccatcgacctcagcagccgaatcagtgccagacgaagaggtgccatttggggattaaaaaaatgcttccgaaatgtaaaattgaattatttaaaagtccgaagactccgcccggtcagtgttttacctgcgcgaggacggcgaactccacccgggcagtttggaagtaccgccggccatttacaccgtttgtgacgcggtggaactgaaaattgacacactgctcacccgcggtgtggaggagacccagcagttcgaagtggccaccaaaaagttactgcacaaggccaggagctcgttcaggttcagttagaggggggggggttgcatttgggaagtgattttcgggcgaatttctttttgggttgggcgtgtaatgggacccgaaaataaaattttcaacctcgattttttaagtttttctgtttgcacacatggtttaaatccgtcgataaaggacgaattatgaccattttctggattatttttccccgggaatttacattttcattcctcacgtaattattaacattttcatcatcccccaacagcaattcgttcccatcgcagcatcagcccagagagaattgtgctcgttgccaagaagttgttttcctaattttaattgcccacgagaaataaatgatttcataaatttgctgcagttgaccgagtcgttggagcagttgcgcaaccgctgctacgaactcactgacgatttggtggtccaccagcagttggtcaaatgtctgaagcggggcgttgtcgctgcacacaatcagcgcgatgcactgtaagcagttggatgaaccatggacaattgtttagggaggggaggggagcattcgtacatacctgaaaatttttatttaataaaatattttgaagaaagcgttgctgcgtggattcgtcgaccgacgcggaaaaggtggagttcattttggaacgtgaaagtgcgttggccaaggcgcaatttgccatttcggaactgagccgagacaacgagacgctgaaggaagagaacaggtgaagctgctcattcaaagcctttaaatttaatttgattatggagtcttttttaaatattaaatttttcgagttgaaataattttatttgttcgaccgttccctttggagtttgggacaaatgcataaaaataaaatgactggcccattcattgcattaaggtcaattttcccaattttacagacgccttgaggcggaaaacagctctttgaacatcactgtggatgcctatcaggagtcggtgcgcaccaaagacgagctgatcatgaagtagtgttaattaggggattaattatcaaaaaaaggcatttcttaaaattgttatttcccaatgtttgtcctgtttcttcagcatggttaccaacgcgaccaatgccctgccatttccttcatcgagtgtgccgtccacttctgctgcgaccggtgccatcgccaccaccacttcggtcggcacaagcggaactccgccaccgctcgcaacgcttcgcaaatcgctgattgggtcgttcatcggcaagggcacttcgtcgcctaccgcgcaaccgacgcccaccgctccaccggttggggacaaacagtcgccagcaaatgggaacggaggtggtaagtcaaacaatggcatttaaatgtttggaaaaaatttcagccgaagcgactgaagcactgctcgtcgactttggcactccgacggacgtggcggcaaagaatttgttcaccgaaacggcggtgaacgacctgaacgaaatgaaggacctggtagacggatatcggaaccaaaacaaatttctgaacaacgaagtgttgggtgtgtgcaaaaagaaatttcgcccaaaaagtcgaggaatttaatttattttttccttcaagcctcaaagaaattgtccaatcttggaggaccgtgagcgaaagctg

SEQ ID NO: 10372 - DNA, 1469 bp, Heterodera glycines
cgtgagcgaaagctgatccgacaaaattttaacattgaagctgtttactaccagttgaagagccgctacattatggtagaaaatgcaaaattcgaccaaatttgaaacatatttcgaatttagttgctcaaccatttccaaccgtcaatggaccgccaaaaacggctgcccgtggaaccgtcgatgatccaagaactgatcgacgaggtcaccagacctcactctccgatgcgtacacacaatgccaattccctggcggtggagacggtcagtgattgggtgctacggtattttaatttgatcagaattaggcaaagtcttcgtccactttggccacattggtcgcctgtccgcgcaaagccgttgcgatcatcgacgccaacacggacggcggcggtgttccgcaccacaacgacccggacacggactcgctgggcttctacctgagctcgccccggacgcgcaaagcgattgccgactttttcgcgaaggcggcaaattccgccagcggcgaggagggcgacggaagcaacgaagacgaacagacagcgaaggcggatgaacgccaggaggtgggaaagcggaacatttgcgagtcaattaaggggaaaatgggtttctttgtcagccggaccattcgacgacggcagccgaaatgccaaccgatgaagcggtgggacccgcggagtccgcaggatcggtgccaaccgaagcaacagccgtctccggcaggttgttcaaatgtgccaagattttcgaaaataactcgaactccttcagcccgtcgatctctcattttgtgccgtcctcctccttcgctgcttttacttctccttcgtcgtatgaaaatgccggcgatgcactcaaacaggacgattggctccttcggttggccgccgaccatcagaagcgatccgatgacattttcgcatccattgagctgagcaacaatcaggtgttgtcattttaaggaaatccccggatatcggtttaactggtagacttttgagaaaacggttttctcccttattttggactttcttacatttttcgactccttggggaattcgtgccaatgtcacgtgtaatcccacccctggcatcattaaccaacacttccccccttttcagaatctcgtcgaatggctgcagcgttgggacgcctatttggtcaaccacgtgctccagccgatgagtccgaatccgcagctgaaaatgttagtccgctgtggcattccgaacacataccgtgctcgggtttggagcaggttttacagtgccatgccaaataaatgctttttctaacataaaatttctccagtctcgtcgattttctggtcgggtcgaccaaatccgagacgggcaaaggctattacgactgtttgttgcgcaaagcccaacgcattcaggagcaaagcgcttccggcacggcggacgaggacgcggcactaaaacaggtacagtaacaa

SEQ ID NO: 10373 - DNA, 2857 bp, Heterodera glycines
tctatcccattaaaaaaggcataaacatcttcgaaattttttaaaatgataatggaaagccgatcctatttgggtacctccaattcgattaacaatgaggaaaataatgttgattaatcggctaaaatttaaaccttgtatttcacattaaatgccccgttcgtctccataatgcttcttccgttcactttcttcaacaacggtatgagcaggtggtcgaaaatgagcaagccggccgcaattttcaccgtgtcaaggctgaccaggaagtcggcgatcagaagcttctcgtccgggagcagcgcatttggcatcaaatcgacctaattaaccgggagtaattaagaacaattacacggaagttttgaaccctctatcccattaaaaaaggcataagcatttcgaatttttttaaatgataatggaaagccgatccaatttgggtacctccaattcgattaacaatgaggaaaattttgtttgaaaatcggttaaaatttaaaccttgtatttcacattcaatgccccgttcgtctccataatgcttcttccgttcactttcttcaacaacggtatgagcaggtggtcgaaaatgagcaagccggccgcaattttcaccgtgtcaaggctgaccaggaagtcggcgatcagaagcttctcgtccgggagcagcgcatttggcatcaaatcgacctaattaaccgggagtaattaagaccaattacacggaagttttgaaccctctatcccattaaaaaaggcataagcatttcgaattttttaaaatgataatggaaagccgatccaatttgggtacctccaattcgattaacaatgaggaaaattttgttaatcggttaaaatttaaaccttgtatttcacattaaatgccccgttcgtctccataatgcttcttccgttcactttcttcaacaacggtatgagcaggtggtcgaaaatgagcaagccggccgcaattttcaccgtgtcaaggctgaccaggaagtcggcgatcggcttctcgtccggaattggcgcatttggcatcaaatagacctaattaagcgggagtaattgtgataatagcctcggaaattctaaacctccaattcgaagttgtccaccgtccgttcaatcagcacaaccatgaagaaatgggttggcacatcaccaactcggctgtcaccaatcacctgtgaaatttggacaatgaggaaacttttttgaaaatcggtgtaaaaatttaacattgtatttgacacacaatgccccgttcgtcgcaattttggccaagcacagcggtccattgaacaagaacatgttgatgctgctttccgcgccaacttccacacattcatttccaagtcgtcgttccatttgccacggttgaaaccctaggggggcagggagtgaatagcagaaaaaataggagctttaacggtgaacaacaaaataaaaagccacttttgtacgaagcattgtgatgaaatccctattggttttttgaaaaattttagaagcgaaataccaatttgtgtttttttgtaatatttcgcaattgcgctggtcatatcagaattttcttagtataccaactcaaacgttcgggctcttgctaaattgttttaaagttcaaaaattctccccactggaacacaaattccattttttcgtatgtaccggaccaaaaggagaaaaattgattatttcaatgccattaacatttgacaccgattttccacactttgtatgtgcttgtgttgtcaaaacacgtgtagccgatgcgcatatgattcggtgtgatccacacagggtgatgaatgggcggtgggaattggtggtgcggaggaccatcctcgtcgttgttcatttcgtcttccgctctgtcgacttctcctcgggcgacgagaagatcattgatatgtttaaaaaaacagagaatatagattaccaacaatgtggtaaatgccacccaaaaagaaaacggatattcttccatctaaattgaaaaaataataattaaaaaacacgaattttaacgagaattaaaaaacagaatgaaacaaaataactgaaaacatttccttttatacatagaaaatggtctaaagaaaaaagaaaaatactgttacttcagagttcccaagtgtccttatttgtaagatttgtccttataatgagggaagaggtgtttggccgagaggatgcgctgatggggggggggaattgagcttagctcgatttttcggctacgatgtctaaatttgactctcaattttctgttgagtcgggggcgtttggaccccagtttttgggccccagggtcgtttggggcccaagtacagaaaaatgaaaaatcacagtaaaaacaactttttaaatttcagcataaaaacgtaaaataaacattttaaaaataaattaaacaataatcttaacaataaaaaatgtaaaaattaacagaaattcccgggttcataaggtaatttggacaataaaacaaaaaatcacgggttcattcgatagttgcgagaaattccccggataaactccaaaataatgtgaaattgattgcgattttggtggtaattgtgatcatggtcgatgtttgcctgcattcatcgggacgtaaaggcgcaccaaattaagaattcgttcatctggtgccaaaaactttcgcttttttggtggtggctcctctccggcaatgaatgacgcgtatttgacgtctgttgtcttctgctcacgacgtagcacggcaatgaagtgaaaaatcgacgggtgtcggaaattgaaggcgccctgtagacgatgatgctccgcctcggagtggttgttggtagagaccggcgcggga

SEQ ID NO: 10374 - DNA, 2512 bp, Heterodera glycines
gagttaaatttatttttagtcaggattccggtaatttttgcgtttctgtcagattagtgggttggttggtaatttaattggggaataaaagaaaaaatcatttttcagggccgtgtagggctgtggccttttatccgcttttttctggtctgcttaaacatcatcggcacattttcaggtgcttcggcggtgaaaatgggcaaaaagaggcgccgaaagacggcaaatcggcgccagaaatggttgttgaacctgccgaatgtgttcttattcggccatctaacgatggtgaattctttttgaggggggttcgggattgttgggttataagagggttagggtttttaaattaaaaaaatagtaaattggataaacaacagcatgcttctatagcaagggggaagaggatgggaattcacgctcctggaaagaatttttttgttgttgttaaaacttgactgtaactcctccacaaaatgcccgcacatgtcgccttttagaagtcccctaatgtcgggctactcttttggtccaagtgagtttgtgctcgttttagtttactaacctcgagtagtcacactcgcttgcttcaatcctggcggtatccgctttaccctccttatagtcatgagccaaacacttcacaaaactctttatttcggaatctttttggtcgttacttttttgaagctcatgcaaatttatcgaaatttcatagacaaatgagagaaaacacttagggctatcaaaagatattaaaattatttaattcgatcagctatgaaaggagttgttccacaatggctggcgcccatttggtcggcgccaaattgtcccacggccggcattggcattcatgtcgttgcctgattttcaaaatcccgactttttcaatatttcttgccggcgctctacccaatgcaatcgttgtcgagaagctcgaagtcaattgtgctcaaatcgtcccattcatcgcaattttccgctttcccagccgctgccttcacaattggacggcgacgcatctcccaacaatcatcgtgctgataatccggcgatggcgccaccttcttcagcaacagcttttcccgcgtccgttcattgaccaattcaaattttttaagctgggtcgggtcgtccagctgcaggttaatttcataggaagaagcagcggtggcactgagaaaagcctgaaaaattgggggaggggtaaaaaaaatttcgtaaaatttccaaaaagtaatggccaaaattttttcgaaaattttgcaggctaataaaggacatgagaaatattgaatttggtcgtttcaatgaaaagttataaagcgtcaaaattcgtctcactcatcaaatgccccacatttaaatgaccatcgccgaccaggccataaacacaggcttttagccgttaggaaaataattattttatttaataaaatattataaatttatttatctatcggatttaatcaacaacctatcacctatttaaacggtttaagctcaatggagcaaaaaaaaaaaaagaaatcaagatgaaaacaaatttaaatttaattattttgaacaaaaatttttgtacaaaaagcatttaaagaaaggaatttttgaaattttaacgatgacatttcgttgacctgcttgaatttgttgacccattccgcaacatttgtaatgcctccgttgtagttgcagcagtacaacgccttcgactgaccattagcgcttggcgtgtgcaaccatttggacagcacttgcgcagcaggtgcatctttctgatcactgccaatcatttccgggtctggccaagagaaaacggaatgattttcaaaaataggccaatcaaaatagagagagcccgacatttgcggccccagccaaaaacgtcatttgcggaccgacatttgcgctcggacattagcggtccgacaattgcgtcccccagccaaaacgacttttgcggcccaaccttttccacacaaactaaataagaaattattttccatccaatttaaatgaatttttatgctcttctaatatgccgattcaaactttctagaaaaattaaaaggggaggaaaaaaatcatcccgtccatttgaaactgggttcaaataagtatcgaactgaacaatagaaaaactgtggaaaatgtgttagatcgagcaacaaaatgttttgcgctacgaaatgatgaagaaataagtatgaacagtattaggaaatctcagatctctactctctctacagtatcaactggccgatgtaagctttcaagctctgaagagtttttgaacaagcccaattttgaaaaagaattactcgattgagtaaattttggcaaaaatttgaagagaaaaaggattttcgatgggagaacaattttgactgtggccgcaaatgtccgaaaatggccatttagaaatgggccgcaaaggtccgaggcgtaaagatcgggccgcaaaagacggaccgcaattgtcgtttttggttgggggccgcaaatgtcg

SEQ ID NO: 10375 - DNA, 1305 bp, Heterodera glycines
  unsure (1)..(1305): unsure at all n locations
aaaatatatgattgactattggtaaaatttttgaaaaaaatttcgcattttcgcatattttggcttttcgcatttcgcttttttttcattctgcattttcagtttggcaaatttcgcttttggcatttggcttgttatttttcaatcttgcgcatccctgatgcacggtcagggtcgttttcgtaccgccattttcgtaccgccgttttcgtaccgccgttttcgtacggggacgttttcgtaccgcaggggggtcgttttcgtaccgccgttttcgtacggggacgttttcgtacgagttcttgtacaagcgtcagattcaaatagaaaaacttaagaagaactaataaaaccaaaatttatcattttttgtttcccattcataaaattttgtagaaaattcataactttataataataacaaaatccaggacaaactaggtcgcatctcataatttcggaaaataccagcgagaaaattgttaaggttttcgggattgacattggcattggcataattgtgatcattttgagggacaatattgttattgatatcgttgtagcgttggacgagacgaagaatccgtgcgtcggcatcgagatacttctttttctgtgcaccaatttatcattatttagttttgttttaattacttgctgctggttcattttgtagttaataaaagcttaactgtcaaaacattaaaagtaattttaaaaaattaacaaattatttgaatgtaattttttttttgcatatccgctcgtacgaaaacggcggtacgaaaatgtcccccgtacgaaaacggcggtacgaaaacgtccccggtacgaaaacggcggtacgaaaacggcggtacgaaaatggcggtacgaaaacggcggtacgaaaacgtcctggcccgcctgatacatacttcatatatagagaccggatttttatgtgctaaaaatcctgaaatatgtaataaaatatgtgctaaaaaatgctgaaatatgtgctaaaaacccccaaaaatgccaaaatatgtgctaaaatatgtgttaaaaattgaaaaaataagtgtgtttttgcataaaaattcccaaaaatctcattctttatcatttttagcccatacaacgcaaatcaaatacatttcgaagtgtttggggtaaaattgtctttttttgataaatcatttctataaattgaaagttccagcagagaacttcngaatccaatgacgaattaatgaattcgagatttcattagttnnctacatcgaagaaaaattttttaattttgaaatttatgtaataatt

SEQ ID NO: 10376 - DNA, 1262 bp, Heterodera glycines
ctctctctctttcgtctttttccacttaatgcatttttcttcgcttttaaaggtcgtgtgcaacaaaatgaatcggctcaaccttttaaaagcgaaatgctggatggcgattggcttcattgtgcgtgggttttatccacaaatttgctgctgctggggttgcaccgctttatccgttctttgcccgtttagttttgtgtcatgctaagctttggccttattggattaaaaatttggagttggtataacaaaagtgagaaagatgatcccaccggtgccaaaacatcaaatattgccaatgctttctctgatctcggcatactcattccgaccatcttcgcgtgtatttctactgcatttgttctcgtcatgttttgtttcactggtgtggttttttcttccctttttttgttgttcgaaacaaattataaaatactcgaatacttaattagcacttctttcaaataattatgacagaatttttcattaatagcttttcttttccgaacttttttggtcaattttttgcaactgacttaggtattgctttaaatttttttaaattaatttttaaatctttacagattttacacacagcgcactgcaggtgaagtacaaatgtcgccagtgtggccacgaagtgcacaaaacatacgaattgatgggtaatggtggaagatgcaaaaaatgatcatttaatgttttgtttcccatttaagaagagttcagcaggggctttagcgacactttcagcgaatggggacgctacacaaatttgtgcgagccggaagtgatgctcaagaagaccgattacaacgacattgaggaagaattccgcgccatgtgccagtgctacgtacatgtgttccatgacagccgagtgtggaccaacaaattgatgaagcgcatcagttgaagagacatgtgggaaatagcgaacgaacgaacgatggataaatggaacaacaatatttgttaaatgaccaaaaagaacccctgtttattatgtccaattgttcatcatcgtgtaaaataatgtctgtaataaatgcgtaggaacttacactagttttattgtgcacagaaattctaaaaattcgaatgaaacctaattggtcctggtttaactgtttgaaaaggttagaagtgtctcattttttacattaaaaaagtgcatttctccacgaaaagggtgcggcacttaaaactgtcatttttattgggcaaaaatgtaagcattgtccataaactcttcgcatttt

SEQ ID NO: 10377 - DNA, 1614 bp, Heterodera glycines
aatttcttcttagtaaattttttgcgagtttgacctcttgggtactaaaaaatctatgaattttgaccaatcgtcataaattttttaataaaaaattcctatagtttcaatcatatcggaaagagcaaattctgtttcttcaaagatgttggtgcataaaaaccgccaatctgccatcaaaagaatataaaattaaaatatgaataaaattatatatatttttgtcatttgagtaaatatattacagtcgagatttctctagttgtttgtcaaaaaaattaatctatgaatgttatacaaatgttttattatttgagataaatttgcttaatagtaattaaaaaataattaattataaaataattttatttgattaatttgcttaataacaatgaaataaattagagttgctcggtaccggtaccgaccggtaattaccggtttttttggtaccggtacccgtaccggtaccggttttttcaaaaatcaaagtatcggtaccggtttgtctagtaccggtaccgccggtaaaaatttgcactggtaagaatgggggtctgggtgagaaaggagaaggaatttgatgaagaaggagaaaattttgagaaaaaaaaataaattatttattttcttttaaagcagttgttcatatgcataagtggtcaagtggctaaaccttctgattttattatttctcgcttgggttcaattccccactgggatagaatattcttcatattttctttaccattattttaattgaaattttaattaaaaaaaatattccaactttttttctttcattttaagcatcctaaaaacccaaaaattaatcaattggtctttttttacaaattctgttaacaaatcgcattaaaaaatacaaaatttttcccggcggcgcctatcggcaccgccggccctccttgttccccaaaagtcttgagaaaaacgtgccgcgaaaaaagcggtgttgaaagcaaaaaaggtcattgatttacattaatttacatggccggagaccccttcgcaaaattggaaaattggccgctgatcccttgttttgcaataatctgaattttgaggtctacatctgaattttagtgttctttatcctgaatttgaaaaaaaaacttggtcaccctcaatatacatatacttctgaacaattctaatgctaaaaaacaggcactcgcgcgaaaactgaataaaaattttgtatttgaaaaattttgtccaaaaatttttacgttggaaaattaccggtttttaccggtaccggtaccggtaccggtggaaaaagttggtaccggtaccggaaccggtttttgcattaccggtcagtaccggtaccggtttttttacaattaccgattaccgctcaactctaattattaggttattattaagccaaagaatctaaaaaaataaacacccagttaaataaaatttaataataattttaatgtcaaatttcaaatttaaatattttataattatttttacttatcttcaaacggtttgggttttaatcgggtcaaatttattgggctatagaaatgggttaaaataagaaaggattttatagaacataacataatacaataaattaaa

SEQ ID NO: 10378 - DNA, 1900 bp, Heterodera glycines
  unsure (1)..(1900): unsure at all n locations
ggattacacacatgcacatgtggtgtagtggttaaactttctacctttcataattttcgcctgggttcaattccccacttggatagaatattcctcacattttctttaccattattttaattaaaattttaattttaaaaaatattccaacttttttctttcatgttaagcatcctaaaaacccaaaacttaatcaattggtcattttttttacaaattctgttaacaaatcgcattaaaaattacaaaattntttcccggcggcgcctatcggcaccgccggccctccttgttccccaaaagtcttggaaaaaacgtgccgcgtaaaaagcggtgttgaaagcaaaaaaaggtcattgatttacattaatttacatggccggagaccccttcgcaaaattggaaaattggccgctgattattcaaaaaaccgcatgtctctatgacttatagcggctgaggtatgggcacttcaattttgacgtagtgtaaaatgcactattttcttaagaaatacagtactttttataggcaccgaaataaaagtcgacgtatctcagcgggcctaaaagtagacccactattccaaaggcaattcggtagcaaattttgtgctctataaaatgggcctactcaaattttccagaaaaattttcccaaccccctagaaattttttttgaaatttacccctcgttcccagccaaaatgggctgatcagatcaccatgaaggagtgatctgatcaacttggtgttgctaccttttttgatcagcatccaaagttatgcttacctgaatttttttagatttttttaatgctgatccagagaagcaatattttaaaaatgaaatgggacaacacttttgaccacctatattttgatcaaattgtgaacatggtaaaataaatcaaataaatgtttatgtcacaaatgcaaatatggtatcattggaaagcccataaaaaatgctatccaatggtatgctacttatctgttgaaattggaaaatgacaattttatacgcaattatttttttcaaagcatgatgggacaacacttatgaccatgactgtatgtcctgaatttgaaaaaaaaacttggtcaacctgaatatacatatacttctgaacaattctaatgctaaaaaacaggtactcacgcgaaaactgaataaaaattttgtatttggaaaattttgtccaaaaatttttatgttctaaaattaccggtttttaccggtaccggtaccggttgaaaaagatggtaccggtaccggtaccggtttttgcagtaccggtcagtaccggtaccggtttttttgcaattaccgattaccgctcaactctagttatatgtaagaggcaaacatttcaatgggtgagaaaagttaggagcattaaggtcaattgttttgcgtttttgatcgtttaaactaaaactggcttagagcaactcaattattttcccggtaaccaaccccggtaatagtttagatggttccccccatttttcggagaattttttttttgttttcaaaagtcatgaaaacatatttcagtccttgttttgtcttttttgctctggtccatcccgaaaaccctgctggtccgggtttttgcaataattacgggctgtactttcgaaaaagttatccgattcaaattgcgcttaatttaggccgctgtctccgccaggtcaaagcaatgaaaaagtgttctctttttccgggtccagtgatcagcggaagaagaagtgatcatttggggaatggccgatcattatcgagttatgatgaattggattgattgatgaagttttggttgctccttgattaatccaattgacgctgacattttttgctattaaaaaaggaaaatttggcacctttttttttcttt

SEQ ID NO: 10379 - DNA, 3419 bp, Heterodera glycines
  unsure (1)..(3419): unsure at all n locations
cgtaattattggaaaaacccggaccagcagggttttcgggatggaccagagcaaaaaagacaaaacaaggactgaagttctgtcttaacagaacccatggccctggcaagattctgggaaagtactgtacatgggataccgtttccctatccgtgtttcatacaaaaaaggccttatttctgctcacccaatgtcatcgtaaaggcggaagaacactttgttcaaattggcatccgaattttcgtccttcttctgctgctgtttctgaaccgccgccgtctccccaataattgggcatctctccaaaagccaattgaattcaccagtgccatccttcgtcagtgtcagcttctcatttgtcacttcgttcaccaattcaaatggctcgattagcgacaagaaaacaccaaaacaaattttgtaagtgacagaagtggtggcatggcgaaatgtctaaataaaaaattggtaaacacaaaaataatttgacggaaattctgacgagacacacctctttgaagttgttgacccattccagctttggtggaaccacataattattgcgatgcaattgcttcggctgtccatttttgctcggagtgtgtaaccatttggtcaaagcttggccagcagttgcattgggtccatcgtcagcaattccatcggggcacagataaccggaattgatcgaattcaattgatcaagatcagtgagaagtgtcggtgaaatgcggcgacgcaatttgtccaaatcatcgccatcgtgaaagccaaaatgacgaatgcttttcgcaaaaataggccaaatttcgcgggtaaaaacatcccaaaatgttacaaaatgttcgaattacttaatccgaatgtgattaaagcggattttgttgggcagcggacggtcgtggaacggaaattgcacacgataaccattggcatatattttcgcttttggcccttcctccttttcaattcgattgttctccgaattgtcaatttcgtcgttttcccatcaaaatgtttgtccactaagatgtcgaaacggtcggaaagcaatgccattttaaggtcgagttgagcatgttcaaaagatggcagaatgtccatccaaacgtcgccacaaatccaactgaaacatggaaaatagggaaaatgaaaatttttaaaatctttctttaccgtctgttcatttttgctatggggagaggcaaaagtcttctgcagtcgggcatgccagctttccacgccatttgttgtccttggcagatggagttcagtaatgtctttgcaattccaaaaatcgagcgaaatgacggagtgcgacgctgacgaccaatccaagcgttttcaaggtattcaagaaaatcctggtgccgttgagtgtcgcaaaccggtgaatgaacctttctgccaggtcattaaaacgtgccacaacgtcatcaatttcacaaaatgcgagtgcagagaactgtgaaaaggttcggatgttttttaaagaaaaatcccgccccttttgcccctcctctaaaaaagcactttcttgattgctgtctcgtatgcagtgtcttgactgtaccgcatctgcatgtcatgactttgaactgaccgccaatgagcttgtgacaggtgaaaccaacagccgtgcagaaatgcggtgggaattttcgctcgaaatgcattttcagctgccttttcaaagtcattgtgttggtcggttgtgccaccattctttggttcttttttgaccatttcaaaaaacgacgacgccctctcaaaaaagaaatgtaaaataaattaaacagaaaattttgaaaaattttccaatttttcagctttatctgcagcgattgttggcttttggtgttcgattttcttgcgccttctcaactcggcctcgaaattgcactgattagccgccgctttgacttctacgtggatgaacacttcaagacgcgcaaatggacgttgggcgaaattcgaatttgctacaaaattgaagaaaatggcaccaagcaaatgcatattcaccatgccgatgcaaatccattgccaatcccgcaaaatccgttgccgaacaaaatcatcggattccgaggcattaagatcgtgtaagaaaccgatcatccagattgttttgatttaggacactgactaacattttcagctacatcgatcaaaatgtcgtcgcatttctccgccgttttcaccgttttttctccattgttcaacggaattgggcattatcacgtgcagaagtgactgtggagaaattgacactgcaacaagaagacgaagatgtttggctcacgcgttgtccaattggatgggatgagatgaaatggggaaatgtgcaggatgaattattgaatgacgatccactgaatgcaattctatttttgatcagagaggacagattcgacgacgggtgaacaattttaaaaattcaaattgaattgattttaatgatgcaaaaatgcggttaataaacattgaacagtatatgatagatacaaaaaaaaaacaaaataattaggatgttagttggttgactcataaaatgccattggccccataaaaattgaatgctcttaaagtgtaattaaatcatcatcgttttttcaggcttctcgacgcagcttcccaagggccgagtgatcactgatcaacagcagaaatgaatgaattaattattaattgatgcgattatgtgacccaaatgatatgttggcactgtgccatttcacggagtaggacaaaacgtcgtcagccgaaacgtcgtcgaacgaatttttcgaccataacttttttctttctcaaccaaattaaacattcttggtattattcgaaagcattcgaaaaatgctattagcctgcaaattttcaaaaatttttatttatgcacaaaaaaatcagagcaaaaaaaagttcgaattactgggtttttgagttccttctggccataacttttttgaaacttaaccaaaatttttgagattttgcaaattaataataaacacatagagctatcgaacaacaccaacaattcttaatttgattgacagtgaacaaagttatgttcgattaaaacgtacatttaatatcaattgaaaactactaattaataaaattaaaatcaaatgtagaaattaagtgcttgattttagcaattttcatcggtcgtcgcaatttgtttggatttacccaataatttactaaaaattttttgttcaaaaaagcattcgaacgcaaaaaagaaacgaaagagagagagagcagttcaaagagcaaacaattgtcaacaatcaatccaattgattataaaaagtcaaaaatgtcggtcatttcaagtgtttgtgtatgcatttgatacggatgtccaaccaatttgngatgtttttacccgcgaaatttggcctattttt

SEQ ID NO: 10380 - DNA, 853 bp, Heterodera glycines
ttataatgtcaaagcaattaacattttcaaaaagtactcatcggccacaaatgtaccggaatttctatttctattaaaaatgaacttttctcattttgataaataattagccatacataaataattaagcctaatacaaaccataaaagccccctctcccctcctctccacccatccgttcgggcgaacatttgtccccattaagtgacgagaataggccacgcctcgtgccctcctcttctccttcttctgtgggcgacaaatcccaataaaagccggcgcttttcacagtcttacaaatacattccattctcagtgtcaacattcatcctccggcattttgccatttaaaagcactttcaaacgcaagctttattttaaagtattcttaaaattccttaaatacctcaactgcaagcagtaaattgagcagcaacatacaacacacaccaatcgcaggaacattaagcagtacaataagcaccatggcatttctcagcaggacgatgacgacgttcaacacaacgacgatgctgctaaacctggcacttttttgtcagtgcgttcattcgttggtcatccatccgcgactccgctcaacttcggctgcggttgctgcacgtcaaattggatcagggccagaaacaactgctgctgaagatgaacaactgcaacatttgattgacatcagcagaagcagcgataagtgcaaaaggatgcgttggtacggagcagaagcaaagcaaatgctcaggtgaggggacagattttagtgaaggcaatgaatgtgccgtttatgaagacccggaatatgccgcttttgagtcagagattgtgccgttctttctttggg

SEQ ID NO: 10381 - DNA, 2619 bp, Heterodera glycines
ttttagacaccttgacgagatcaggcttcgaacggaggcggcacaacggaatgcggtgtccaaggttggcaaagtgtcgctgctggacaagctgttcgcgctgttcacggacaagcctgacgacgaggggcccaagcatgactgcttcttctccgccttcaactgtccagtgaatccggcacggaacatcccgggcgttcgtcgagtgcgcattacggcggatgagcgtcggaaactgttggccgccaaacaacgtgccgcgacaatcggcagtagcggtgacaccacggcacggcactcgagaagcgcacggaaccacccccaccaccagcaacggatttgaagcagtgccattgaagcaggaagacggcacaccaccgattaattgtttgttcgctcacttattagggctgccaaaaatatgcacaaaaagttgtctaaatattcgacataaatatgtaagaaaaatcccgaaatatttaaagaaaagtccaactatgataaaatttttgaaaaggttattttttgaaaaaaaaaatcctcgtaaatgataaaataggcacaaaattccataaaaatgactttaataggcttagaatcaccttgtaatattttaaaaatttccttttgttttttcaggggtacattttcaaaattattttttcactataaattttcaaaataagtaaaaaaaatgaaaaaaatgtacaaaaatatttgccaaaattttggattttttccaaaaatttccgtgtaaaatcctcaaaatatgtaaaaaaataaaaatatataagaaaaaagtccaaaatatttacctacatattattaaaggttcaatttgataaaaaaaatcactctctttgtaaactgttcaaaatccagaaacatattgtgtttcacttactacccttaggctaacccagcttgaatttttatcaggcatacctcagaattaaattaacaataaaactaaatgttttttatatttttggtccaaaatttgctgttccaaaactatagactttcatcagatcactccttcatggttatatgcagtgagtaaattttagccccccaaatcgacttgaaaaacgaaaatttgggcaaaagtttatgtgaatttttcaggttttcattcgctctaattgcttaactcatataggtaatcattagggttgggaattatatgcacatgcattttttttcctggactgcgggaggctgaggcctgaaacggacgaaaaacatgtttttagcttgctttgaagcttctatgacgtatttcccatatgcatattttgcatatttcgcgatttatatgcatatttttgcatattttagcatttcgtgcatattttatgtggtgcatatttgggcattttttaaaatacccctattagaacggccctatcaggtaaattggcctttttgacccctaaagaccgaaaaaatttccgaaaaagacattttttagcaaaattttgtcgaaaatattgactaaattaaaattttcttaaaaattgattaatttatgtccaaaataagcaaaaaagcgaaattttgcttttcaggttgatttttcgtaaaatttaagctgtatcgtgttttttcttctaaaatgattttaataccatattttagtcatttttgaaagttttactttgcgtttagcgaatttaaagaaattttgaaaaattatacactcaatttggaaaaatttatgtgcatatttttcactttttatgtgcatattttgcaatttttggtgcatatttcatgcgcatattttaagattttatgtgcatataattcccaaccctagtaatcatattataaaaattcattttgattacccaactcttcaaaaaatttattttttgtattttagacaattcaagccagaaatagtggtccgcaaaagtcgttccgcaaatgtcggctaaccatttagaacatggagaatccaggaaaaatatgtatttacataaaattggcagccctatttattatattatacatttattcgttcctcaaaaaataaaatgaagacatttaattttgtttttttttaataatttaaaaatgtgaattacactataaaacatttttgatcatgtgattcattattagggatgtcaattttatgtaaatacatattttttcctggcttctccatatattttggactttttcatacatttttttacatattttgaccattctttgtacttatttttgacatccctattcattataggggcagggtcgttttcgtacgggccgttttcgtacgagcacaagtttttggctataacttttttatttgtctaccaaatccaacattgttggtgtcattcgatagccctatgtatcctctattagcctgcaaaatttcgaaaaatttcgttaaaagttatggccagaagaattcaaaaaaccagattttccaacttttttggctcgaactttttttttaaactgaacaaaattttttggaattttgcaagctaatagagcatcttaagggctctcgaatgataccaagatcgttggatttggttggaaaataaaaaagttatagtcaaaaaacatgtgctcgtacgaaaacggcctggtccg

SEQ ID NO: 10382 - DNA, 1132 bp, Heterodera glycines
atcagaagggctctcgaatgataccaacaatattagatttggtggaaaaagaaaaaagttatagtccaataactgggctataaaatatttaataaaagaaagaggaaaatgagcgtttttgattcctgcttttgttgctgagaaaatttttgcttttactttttactacattatttaattgtttttttgccgcgtttttcattattgaatttgttaattgtataaaagaatttgttaatgttaaagagaaaagaatttgatagttaaagagaggtgtgtttttgattttgtttagtaaaaaattgaagaagcaaaggattttgaatttgttttcattttgtaatatgaaaaagatcgactgaatttgatttgtgatttgatttgtaaatggggcgcccccacaaagtgtccaagccacgaaatgtccaaaagagtaaaaacccacgaaatgtccaaaatttttcaaaatttataaaaacaaaatgagtctaatttaggatttttagggttttcggggtcgctgaatacgaatataccctttatattacagttacacctttttgaacaattaagctttggctttattctccaaattggcaagcgaaggcaacgaaagcaattcgatcaatttaaatttgttgatcagtcaaaggtgcttgccctgtctcaaaataaatcgaaacaataaaattatgctttatgcaaaacgaattaaagacacgaaataaccaaacaaacacaatttcaaacaaacttgaaaatcggcgagaattaggcacagaagaaaaataatcaatcacacaattaacttttatttttccaacataagcactaattaaaaaaaccaaaacaaattatttaaggtcaatttgaataatcggaacgccaaaacaaacataataaattaaaaaattaatgaagtccaaaatgatatcacattaccccttggagacttggacatttcgtgggtcagcgagaaattcagaactaaagaaaaaatattttgaaaaaacattttcggacccactcctctttaattttgtgggtcagcggtaaatggttatatgtgtacacttatttcggtattaacgtttgccaaaataagtttttaaaatttgtgtcatttaaatgt

SEQ ID NO: 10383 - DNA, 3147 bp, Heterodera glycines
agatgtagccctcaaaattcagattattgcaaaacaagggatcagcggccaattttccaattttgcgaaggggtctccggccatgtaaatcaatgaccttttttgctttcaacaccgcttttttcgcggcacgtttttctcaagacttttggggaacaaggagggccggcggtgccgataggcgccgccggggaaaaaatttgtattttttaatgcgatttgttaacagaatttataaaaaaagaccaattgattaatttttgggtttttaggatgcttaaaatgaaagaaaaaaagttggaatattttttttaattaaaatttcaattaaaataatggtaaagaaaatatgaagaatacagtcatggtcataagtgttgtcccatcatgctttgaaaaaaataattgcgtataaaattgtcattttccaatttcaacagataagtagcataccattggatagcattttttatgggctttccaatgataccatatttgcatttgtgacataaacatttatttgatttattttaccatattcacaatttgatcaaaatataggtggtcaaaagtgttgtcccatttcatttttaaaatattgcttctctggatcagcattaaaaaaatctaaaacaaggcaagcataactttggatgctgatcaaaaaaggtagcaacaccaagttgatcagatcactccttcatggtgatctgatcagcccattttggctgggaacgaggggtaaatttcaaaaaaaatttctagggggttgggaaaatttttctggaatttttgagtaggcccattttatagagcacaaaattctctacaatatttggtatgctacttatctgttgaaattggaaaatgacaattttatacgcaattatttttttcaaagcatgatgggacaacacttatgaccatgactgtattattatttcttgaaaaattcgaaaaaaatggggttttaattaaaaaatttgggaaaaatcatcattcaattaacttttaattttcaagattcccaagtctctatgattttgtagacccttacccttctttcaatttcctatttttttaaacaagttttcgcagaagatttctctccatggaaatttttgaaaatctgccaccatccatcaataaatcccacccctcctccgtcgccctcattaagtcgcaaattttttaatttttttgtcaatgttatgtatgccatttcgtgaaatttgaataaaaaagacttttttaagtcaaaggttctaaaaatcattcaaccctcttttcattcaagattctcgcttgtccaagtttttttttgatctttctgtaattttctgtttttaaaaaccttacaaatcccgcgcctctcaaattttaattttcacaaatttttgcacattcgccgccaccccacaatttttcattttaattttgcaatcaaaaattcccatattaaaaatcaatcctcccattcaaattttgcaccatttctcaagcacattttcgtaaaatctccccccccccctccctctcctctcacatctctcccattaatccttcccaaccgtctctcccccctcccctcatcccactaatcgatccccacacatttctcacccattttccacctctataatttgtttttttttgtgtaatccatcccatcccaccaaatcccctctctttgctgcttcttccatacaatggtggaggagcgcaagcattttcctattttccaccagtgaccagcagcagattaaagccccccggggggacagctttttattttcacaccggcggggccgaacgagtggattaagaaattggataaagcataaagcggcaataggcacaacagcagaaaaggaggaggaacaaagtgtctctcactttttcttctaaatgtctctgctttgtctgtttctttgtacactttcccaacacactctctctatctctctctcttctctttcaatttctctcgctcacttgtttctttctctctgcttttccccttctctctctctctcgctctgtctctctctctctcatttttctcttccctacacaccaaatcaatctctgtttctctgctgcactctctacactctaaaccatttttttggaagacaggcggaatggggaagtgttccccccccccctcccccctacattcccatagcccatctccaccaccatcaatcgctccattaatgtggcacaaatgggcgaggatgtgctgctgctttcctttatccgaccttttcccctatatctctgcgtctctaccccacacatatatcttctgcttctctgtgctcctcactcactgttttcctacttttttttttgctcagcagaacaatcatcgcttccacttaattggtctcattagtgtgtgtgtgtgggaagttggaagttgagttatcctttcctttatccgtgtctttctttccctcctccaattccctctgcgtctctgtctgcccaaatttatattctgcttctctgccgctcctcctcactgtcttccctagacattttttcaaattggtctcattagtgtaagggaaaattggtggagtgatcatcaaaaggggccgacgtttctctccgattactcctctctctgcatctctgtcggatgtactatttctcacactccacattttcctgtttctctggtgcagcccccgtgctgtgaattcattacatcaatcacagacagagaagcgagagatttgtgtgtctatatttgttcagcagcatatataggaggaggtagaggatgatgtgaggaggaggaactaatgagatgacaaccacgacgacgactaaacattttccacttccaccgttgaggaggaagggggggacattttgtcccataaatggggacaaattttcaaaaagtgggacattttgtcaatagaaccggggcattttgtcccataaatgggggacagatttttaaaaaatgggctttttgtcaatggaaccaggacattttgtcctacaaatgggacttttcgtcaatagagaaccttggacattttgtccaataaatgggagagaattaaaaaatgagacgtttcgtcaatggtgcggaggacagcttatccaataaaaatgaaagagaat

SEQ ID NO: 10384 - DNA, 1141 bp, Heterodera glycines
tcgctcgtcgtctggaatcaatcgtagtaaaagggaaatggaaagaaagtccatcattagggggcatgcttctttcgccgagtgtgcaattttcgaaactgaaagtcacacaaaaagtatggggtgctttctttttagttgttttctttcaagcaattgtaaaagggatttcttcttatggcgctcaaaatacttcggcaacgatagaaatacatgaatctactgggtgatgtgcaagaatctatgggattgataataggtagggcgatgggaaccagttttttcggggcgtttatcgcacctcttatagttactacgctctatccactccttttccattcctcctcccattcaaggggtacaacaaccactttgcctcttcccccctcccccctccctccaatatttccaaccccaatttcagtgtgcagcagcagcacacacgcagtcagcatcatttcttaaaaataaaactaattttttggtttcttcgcccccatcattcacccgtaaaatgggagcccaccaatcagtcagcccccccccctcctcaattaccactcattagtgtggtgtatctatcaattagtgagagataagggggtgggtagtgtatgtaattgcgctaaatttggagtggggttggacaaattagtatcatcatttgtagggggagggttgtttggttgttggatgatttgatatgtaatcactcactcactcaccactctcttatttttatctcatcatcatcatcatcaccattcgttggggtccatggtcacctcccccgcattcatttccccccccccccccccctccccgctggccgctcgccgacgacgacgacgacggggaggagaaggacaggacgattatttattccaaatttccatcattcattcattttggtgctggtatggggtgagaatatggggaggggaagcaaagcaagaagggggagggggctttttgtattgcaaaatcacaaaactaatttcatgggtggggtggttagcagtgtgtgtggcaatgtccaatcccttccattcccgggacaaaaaaatgctttcaatcattatgagcctctaggcctaggtcttaattaggggtgcgtagggtaatatgaagtgtttaaggg

SEQ ID NO: 10385 - DNA, 5161 bp, Heterodera glycines
aaatgtgtataaaaggagttgtttttcaccatttttcacattcttcctacaattcacgcattcattttcttattctacgaattccttattgtcttcaatacaaaaatgtcgggcaaagcgtcgcggatgacgcgaaacgtcaaaacactcattcccgaagcggtgaatttttagtcgaattgttttccatccaacgcattgaatgaattgtttttgatttcagcagaaagcagcagatgaaaaaaccaaaaaagaagcaaaggcacttgaggatgtgagtgatctcccgtaaacacatcaccgagatgcagccgattcgcttcaaattttattggacatgaatttttgtctcccggaaattttttggcactaagttcccacttcttaaattcgaaatcggattctgtttcttgaattttctgaattcgtcaaaatttcgtttgcgcgtcattaattagaaatcgtgtttcggttcttaaatcatcaaatccgtcgaacgttttgttcacgattcttaaattcgaatcatgtttcaatctaaatccgaatgtttcccgcttatcaaactcgaaatcggatttctgatgcttttgaattctgaatccgttgaaatttcgttcccgatttttaaatttggaatcggttgcatccctaacacggcacctacgttcaactatacatcacataaccattttttgcatttagttcctggtctcactgagtccgttcaacaagaagtgggaagtggagcgcacgctcagttctggcgcctacggcgtggtgtttttgtgcaaggacccgttaatggagtgagtttttcttggccctctgctgctggtggtggtggattaatttatcccatattttgcttatcaatcatctctaattaattttaatccattttcaacaaaacagcatcaaaggcgtcgtgaaggttgcgcgtgcggagtccggaagtgaaacggccgagtgggaggcagctgtcatggacaaagtcacgaaaaatgtacgcctcggcaaaatatgccaatcatgatacatacatataacagggagggatggaatgctaatttccgaaattttctgcgaaaacgtattttagaaatattttttcgaattttgaaattttcgtttttgaaaaaattattaggcctaggaaatgccattcctgtgatacataatacttttgttacacaacaccaagctaatatccttttctcatttttacccacagacacacggaaagagcataaacattgtcaaactcctggacaagggcgttctggttgctccggacaacagtcggctgaacttcatggtgctcgaattctgcgaattgactgtcaagaaataccttagctatgtgtgtgcattttgttggtctttacacacagaattgttggcaattccaacttaattaggcttgtcgtccctatggcttttcctttggttcactaaactgcgctaaagtgcccaattgtttatgatgatcatcatcatatgccatgttttgtttaagcgaccggctggacctccacgaagggctcgcatctgtcaagtgttgctgggagcattgaaggccatttacgacatgcacaaccaaggactgttgcaccgtgacttgaagccggaaaacatgggcattttgtcgagggccgacccggtcactgtgctttacgatttgggcatgtcacgcatgtttaccaaccaattgggacaagtaaatcttgtctatacttgttgaccgtatacatatcccctctctgtgtttaggtgcgcgaaccacgaactgttgtcccgttcaagggcaccgttgagtgggcatcgggccatgcgctcaaggggcgtgagcaggtgcggtgccattttggcaaaatgacggcctaattaatcaaactttatttccaattccaacacatttcagactcgttgggacgatttgatcgcttggctgtacattgctgtggaactgtttgacccggacgtgaacaccgaatcgccgtacccgtgggacaaccacaggatcaacaacaccaaagtgattggcgattgattgatttcattcaattgatttcatattatttgcgtgtttttcaggccgttcgttatctgaagagctcgtactcgccggccaaagttctgctcaagaactggtaaggattgttgatggcatcattaatgtgttattaatgattgctaattattcccgtttagcccgcgtcaattctattccatccacacgtatttgtattgcggtaatcgtctgcttgtgccggactatgcattccttgccgacaaagttggacaagcgatggaagaaatccaggagcagatcaaaagtggtccggttactacgcaaggcaaacagccccagcagtccgcggcttccgtggcaatcagcaaaagctctgtggctcagtcgatggtcagcaaacgctaataggaaaaaacgatgctcaaaaaaatgatccttaatgatgctattatatgtttatgtatgtatgtaatgtatatgtatttattgcattgttgtaatattgagtgcgtaataattacgcctgacagtctgatcaaattaaagttgtaatttttagtagaacaaaataacgaaataatcaattaggtaaataatggtcaagtggcgattataaattgtcaaaaattaaattattatttttcagagataatttaaaaatcaaatttcaacttttacagattagaaaagatgctgcttgcttgttgtatttgaataaatttaagccatttaagacttcgtgcattattaaacgtcggacgattaagtccccgttgaaaatagaaacttcagtatccgaattttttaacatgaaaaatggcaagcgctcccctaatttgcatttttctcatcattttaagccgttctaaatcgaatcccttttgtttttgggccctcagattaatattttccgctcttgtttattaaaattttcgaacttttaaatttgtacgtatgtcatcaaatgtcatcatattatattgaactaatgggcgaatacatatgaacacttagcgtgctttttccttttgttgtgtatgtctctcgtatctctctctctcttctctctttttctatgtgtgccctctttttctttttcccctttatttcccctatcttttcactttctctctcgtcatttttttccttgttctctttcctttcttctctgctcttcgcacacgcatgaagaaagcgtacgcctttttttctctctttactctttttcttttctcccttaactatttccatgcatgtctatctttctccaagtatttcttgcgaattcctttctctcccccttcatcttttccctctctctgccctttgtgtgcatttgatttctttctctccactctcattgctttccatccacgtcaatcgcgtttgcatttgggcctcctcttttgcctctttttcatttctcctaacattcaatagattttaggccatcctaaatattttgcgtgtgttgaaagaaggtgtttttctccattttcctttgcataaggtggttttacaaaataaaattttaatcgacttcgctaatcgattttcgtttttttttttgcaattaaatgagcaaatagccaccaaaaaatgtagtggttgcttaaaatcgcagtcatttggatgatttaacccgttttttaaaattgtctcttcttttttgtgttaattgcataatttagtattttaattcctaaaatttgattgattttctttgtttatcatttcaaattagataggtttgcatttaaattttgactattatgtaggtaaagtcgtaaattgaaacagtgggtaccggttgcgcattagttaatccatcgatttttatacataacatttaatggtaatggatgaacataaatgtacacgagttaagggggaggggggagatttgccgacaaaaaagttaaacatattaacattcaaaattttttgttgtcatacatattttacgttggtattcaataattgatttataatgacatcatcactaaaaattaaaatattttgtcttccgattccattttccacaatgcttttcgctttgaatattataattaatgcttattaaaattaggtatgcttctgctgtatgcaagcacactcattcattcatatgtttgcgcacctttcattcaaagatttcccaaaaaacagcgaccaaagtgttcaggggagaagggaaggggcaggtggggtgcatggaggcaagaaatgtaaaaaatgcattaatatttattattttcttatgtaattaactctgcttttctttgtattacatagaaaaatggctcttaattaaatgaaatatataaaaatataaaattgcatttttgtttttctgtaataataataaattaggtattttaaattgctttcatctccattatcatatcacatatcatttacacattttgacttatttcatgtgtcttaagacttaggcttgattgtttattgcttcactcccacatacacatattttttttctcatattcaacggccttgggcttttgctttccaattggtacagtcagtgtcaaacagaaatggcatcatttgtcatcaatcccggtggtcccggcggttatgtcattccaaagcgtcgaaatgcaacggaggaggaaaagaagaaagaaagacatggggcggcggcggcgacggcggaagatgacgccaaatgtgagtgcgcattaatttttgaatttatgctcaccggatttcattgctggtgttatgtttttgcattactgtagtataactgtaccatttatcccaacaaactaaagagacaaccttatagaaagttgttgcattgctaagtgtaattatgcagttagagagtcgattttatgtgttatgctgttttttatagaaatgcattttagaatttactaaattttaccgtttagtattgcttattaagcgattaaaatagcggtgaatgaaacaaaatttatttgattgggttcatcattatgagttttgcctcccaaagtttgcccatatggaaatgattccaattcatccaagcctaattacatattgtccattgttactgtatgcaattgccctctctaggagtaaggattaattttatgattgtggaaattg

SEQ ID NO: 10386 - DNA, 819 bp, Heterodera glycines
taaaagcctttaatgcctatacataaatacaagacaaaagaatcaaattgaaaatgataaatcaattaataaaagttgtaaatgctaagaacaatttgtttattgagtgaaacaaaaacgaacaaacaacaattttgggatttgttacgccgctaagtccacagtgaataaaccaaaagtttattcaaacaaataaaaagggacaaggcgaacaataaaataaatattgattggaagtggggtcacagaggaaaaaggagaaaaatgacaaagtgaacagaagtgaacgaaggaggaaagaggaggggtatttatgcaaaaatatatgaggggtcaacagcagggatgggccaaattgaaaaataaaaagcgaaatgcgaaaagcgaaatttgcgaaactgaaaaatgcgaaatgaaaaaaaaagcgaaatgcgaaaagccaaaatatgcgaaaatgcgaaatgcgaaaagcgaaattttttctacaaatttttaatagttaaaatcataaagcaaaaatcattttttaaaattttattccaaatttaaaaatcaataaaacgctttattgaggcgcgctttttccaaaaaaactttttgggaagaggggggcaggcggcgccggcaggcgccgccgggaaaatttttgaaaatttgattaaaatttgttgacagattttcaccaaaaaatcatcaaatttgtgatttttgtatcatttttctaatgagaaataagagttttggcgcgccgctgagaacagattttcattaaattaccaaattttgcgattttgggccattttctaagaaaaataggag

SEQ ID NO: 10387 - DNA, 2547 bp, Heterodera glycines
  unsure (1)..(2547): unsure at all n locations
ttatatttcttgttcattttttgtgggctttattacccccccggggctatcttttgtttaaatgttattattagttacccttaaagttannaagatntgatnnagnaaaaggggntaataaatgaagaattngttgtnatttnngaatntatttaganntgnatnatnatnagagtagggtngntanttttagtganagaaaatntngaaatagttaantaaaatagtggnaaaaagtnngaaatagtgangaatagtganataattttnagnnaaaataatttttattnatagttgaagttgnaaatgaggtanttttnntttgaantattnnnttatnaaaatttttgttaaggaatttccctaaaaatgtcgaaaatatgttttttgagctccttctcaaaaaaaattgagcaaaaaattcgttaaatcactaaaaatagcgaccctaataatcagataagaaaaaaaaacaaaaaacttttaaaattaaaattaatattaaaaaaaaaataaaagaaaggcttcttcgtgatcgtttcgtccatctttcaccattaaaaatttcaatttttatgcatattggaagcaagaaaatgacacatttttgggtcaattttcagaagttgtttaacggcgcgctgtcaaaatcccgctgcgtcgaaatcccgccgcgtcataatcccgccgcgtcgaaatcccgccgcgtcataatcccgccgcgtcgagatcccgccgcgtcataatcccgccgcgtcgaaatcccgccgcgtcgaaatcccgccgcgtcataatcccgccgcgtcgaaatcccgccaaagccaaaatgagtcgaaatcccgccaaataaaaattagcgaaaaagccttaaaattacgttcctaaggcttcaaaatacgaaattcattaatactttaccagaatcgcataaataaataaataacaattttcacgaaaaataatgatatttttaaatattgaatgaatcgaaaaaagagaattgtatgatcgaatattcaaaattttcatagtgcatgaaattccgagctcaattcgctgcgtccacttgtcggtcgatgtttctgctgacttcaaaaattaagtcggaaagggtcgggcgatcagacacttgccattgccttctcctcaacggattcttgagactgtttttctttgatggcattctgcaaaaggaaaaatgtcgttaataattcccatctcaacgtcacccgtccccgataaacaatatttttacaaggaaaacaacctaacataaaaaaattattaactaagaattacagttttaaaattgtcgagaggggagagggaacaaactattccaaataaatatttatgtgttcttgaataaaaattatttcttggaataagttagttatgtggagatagaatcaggtcttatatgcacaagaggtgtctccagacacatctccccctagagtgggacagaaggagaaaaatttctggaaaatttggctcaaaatcgcaaaaatcggtctttttggaaaaatctgctaacaaaccgcattcaaattccaaaagcggcacccatcggtactgcagaactttcccactggagtgcacttcattctcccgccgtttccctcccgaaaaaattttcaagaaaaactctaaaaattcttattggaaaattccacggccggagtcccttcgcaaaattgaccaccccagactcttttcacaaaaatttgtttgaactccccgcctttttaatgtatgattggtggtcacctgcaaaattccgttgaaataattggcaaatgcatttgcgctgttcatctcgccaaggtcctctgcagggatcaggttgatgaagtagctgaggaactgcttgatctggaagattctgtaggcggtcttggcctgcatacagtcgaagttgtcacagttgcaatgcgttggagaagtgcgccatgtcggtggacgtgccgaaagacggctgctgagacgtaccaggaactgcggcagtgccatccatggtcaaatgaggatggcaatggcaaaagttggcgaggcagtctttcgctctcgtactccttccaagcctcctctcgttcctcaaacaaacaaaacatgtttaaaagttattatcaaaaatataaggcaaagccttttaaatttcattttcccgatttgtcactcccttgtaacagtttgaataaacgaatacctctgaagtaagctgttcctcctcaatgctcgtcaacagaaggtcatgcgtgtggtaacttgtctacgggtaaattccaatacaaaaatctttgttgctaatggagacaaagagaagacggagagaaaaaagaaaaagtgagtgcgtttttggggcttttgtgagaacgcaaaatgaacggcttcacaggggggcggaggaaaagcagtaagggaggagggtgaagagaagaggaggacggaggggtaggaggggggaaaggggagagtgggaagggggtaaagaggtgagaggggaaggaaaaaggaaagggggaaagggaggcggagagacagcag

SEQ ID NO: 10388 - DNA, 832 bp, Heterodera glycines
gagagagacagagggaagggagggggagagagaggaagaaataaagagaaataaggacagagagaaagctagagagggggatgagagtaagagagaaagagagagagaaagggagagagagagagaaggaagcgaggagaaagagtgagaaagaaaggggtagggagagagagagggaagggagggaaagagagaggaagaaataaggaagagagagataggggtagggagagagagagagaggaagaaagagagaatttgagaagagagagagagagatgtgaagaaagagagagggggagagagagaggaaaaggaataaagatagagagaagagatagaaagagatatggggacggagagagagagagagaaagatagaaaaatgggagagggtagagaggagagagagagtgaggagtgagagagaggaaagtgagagggagagagagaggaagagatagaggggaagttagaaagaaaggaataaaaagtgagagagaagggaatgaggagagagagatagtgagagagagagagaagagatgggtagggagagatagagaggaataaatagaaaaggagagaaagagagagagagaatatttgaggagagagagaacaggagattgagagagagagggggggatagagggttaaagagaaagaaggagatggtagagggtaaagaaagagagaatgggagaacgaggagagattaaatgagaaagatagtcacatagagacaaagagaaagatagagcaagaagaaatgatataaagcaagaaagggggcctttttggtgaaaagagtaaattattaaaactaaaa

SEQ ID NO: 10389 - DNA, 3111 bp, Heterodera glycines
  unsure (1)..(3111): unsure at all n locations
agtgctgcgggaggtcgatgatgaaganccttccgggaccgctaagcgtcaannaggcgttcgagggcctaagccagcccaagaaaagggactaaaacgaaagacagctgggacaagtgaagacgaagttcgtgaagaggacgaagacgacgatttggattatgggacaacgaagaagaagaagaaacgagttggcacagcttcgccaggcaaacgaggtcgtccgatgggaagcaaaagcaaaacgattgccaaagcaaagaatgtgggacgcccaaaagaaggaagaaacaatgaaaaggaatccgaggacgaagacgctgaagttgtttacgacgacagagtttccgaaaaagaacggacgacggatggtaattcttatttaacttattttatttttcgttaaattagacgaattcgaagagacaaagccttctccaaacaaagcgaagacttcggttcaagcaaaggtgcctgctaagaaacgtgggaggccgcccgggcgtcgtcagggccaacaatctccggttgacagtggaaacaccgcgaaaagtgaaactgatgaggcgaaagtcaaagaagaggcgggcggcaaccaacaaacgattaacgtggaggcataagctgcggaagaagacgcgtgaaatgggaattgctttgaaatgcgtctttcctcatctgagggaattaccaccactgattttatttagccaaccaatatttatttgctttttgttggtcggtcgatatttcaatgagaattgaccaaaaataccttttctcgaaccattgtaattcattctgcttcaatgccgttaatgctcttgtcggtcggtacacaaaataacgccattggagtttttcgatgtattttgtttacccaatttctctgctacatttacttcaattagcctttttggcacgatttgattatcacgtttatttgattgaataaatgcaaaaaccaaatacttggattttgtagagttcaccggtactgttgtccaattttttttttttttagattttctcccagctttttataaagaaaatggttaagactttgtttcagcaattttgagaatcgttgtcagcaaaatatgataccaatcggagaggttaatttaaaaaccttttacatacaaattctttaaattcagacgaaagatggacgtgcagatatgtgagttctgatctgtttggcaatgtgtttaaatcactttaggacaaattttgagatggatttgttcgacacccaagtttatcgcaggggaggtaatccgtaacaatggctgcattcgagttccctctgcatttcagataaagatgaatcaaacgaatgttgcaaaaattcgatcgtaaaaccggcatgccttcccgtcacaattctcgcgttgcttttgttgatggctttctttgttccgatgcttaacgaggaaatgggcgattttgccgtgggcagcgcaaaaaaatacgaacggacgggcaaatgcaccgacgaatgcaggcaaattgaaaaaatgcacaaacggtcgactgttataccttttccgtttgcgttttgtcgagtcaataccgacgggaatgaatttttctgactcgtcgccgaggcatttgagtacttttcacgcgtggatggaattactacgacttgcgcaaaaagcggtggacattacggcattgtattggaatttgcgggacaaaacgcattacgaaacttcctggcaggtattgtttcaaatcgaaattttctgagtttgaaaacaaaattgttttactatttaggggaaagaaatatttggggaaatcgtagagactgcacgacgagatgtgaaagttggggtcgaattcttttgcttctttaatattttttcagattcgaattgcgcagaattcagaatcggtcttcggacctttaaatgatttgaaattcctggaaaagaaaggttttttatttatcccaatttttcccctcgttttttcaaggcattgtctccgtttcaacgctcaattttactgaaatttttggagctggtgtcctccacaccaaactttggattgtcgacaatcaacacttttacttgggttctgctaacatggactggcaatcgttgactgaggtgctttcttttggcactttcatttttttctttttgcctttaaaggtaaaggaaatgggtcttatgcttgtcaactgttcctgtttggcctgggaactcagcaaaatcttcaccatttactggagggttggacagaatcacaatcgagtgcccgctgcttggcctgtttatttgcgttcaaaatttaatgcccaacacccattggaaattcattttggggttgaaccttctcacacttttgtttcggtatgaaaattgtttcacgccttaatctttctgcccttttctttaagcattcacccgaacaattcaacccaaaggtgtccataattatttgataattttcctttcatttgtctgtagggcagagagcacgacctttccgccataactttttgtatgagcaaagccaacgaatttattcgtgtttctgtgatggattatattccggcaacaatttactcgccaaaaaacgacaatgtgtatgttctttcttctgtattattttcccaactttgaaaatacagcttttggccacccattgatgatgctttaaaagctgctgcttaccggggtatttgttgttgtattaaaaattagttacaacagttacttttaggagtaaaagttgaacttttggtgagcctgtggcctcattcacacaaaaaggctgtttatttcctccgctctctgctcgaaattaacgccgcacttccactaacaaattcggggaggaggggcagcatttccattgtgagttcgtttatttgcgttggtttatccgatttcttccagaaatacttccgggttccggttagtcctcagcaggctgttctggaatttgcgagggtaaaccacaataaatttatggtcaccgattcttgcgcttggattggtgagtttgggtcgtctttttcatgaagtgaacattttatttaaataaagggacatggatggtcgggcgattacttcactgcaactgctggtgttg

SEQ ID NO: 10390 - DNA, 2870 bp, Heterodera glycines
taaggaggtgtcctccggttctgctgatgatcagctttttgccgttttgtacgtgattgtacctcacaatatgcttttaattttacagtttgacagttgtctcaaatacactattagctattaataattgatctcttatgtctttctaacatttctttaaaatgtatcaataaatttttaatttatatttgcacgaaattaattatttggtaacataaaaatcagtttggtataccatattatttggtaatggaaattctctattccggccatatttgttttcgcttgaatatttccaccacgaatggagtgcatcggctgcttggctttccgaacttcgttctctgttttgctcagaccattcagttcggccaactttggtcagggagcacgggacattgggtgggttatcccatttaattttgtacaacagatgtgtttttagttcttgtcacaatgtttcgtcacgtcattcggccctccttgaaaaagctttggctccctttgtaccgcgtacggcgaaggaattggccgaatatttggccaaaaatgtcctctaccattctgtcggcgatgtcctcgtggtgcacaaaccttacggcggttagaaaaggctgaacaaaaggctgtttgatggactctatcagattagttgctactcatttcagttggctctttgggctatgttcaaaaggaatttggcatttttccgacaacgcaatacaaattcaaagatcgaatggacctatttaacggagtgaaagtgagtagggtcgctggggttctgcaaaaaaggcctttcagaaggatgattcggttactttggaggatgcaattccgcacttaaaagaaatattccacgagccaaagttacacttttgcaccggtctcaaacggtcggtccctttgagcctttctttgcgatacgtcctctttcagttgggtgtccggccccgtggtgcttccctgctctgagaaggcttttaaaaacatcggtcacaggttcttcctccaatttggtcctctcatccattgtccttttgtgccctttcagccttttccaaggagagtccatcagtcacagcaatgagcattggacagcccagcacatgcaccgagcattgtttgtcgggtgaactcaaacaaaagtgaccggaggcctttcttcagggcaatttgcatttcgcgccctcccagagacgaaggtgccgtcgatggctacgccacgttccaagacacgagccgtgccaacgaagtgagttaatatgacaaggctaatgggtctatcgaccaattattacaacaataaaacccgtttgttttgtttccgggtttttagtattgcctttcatcttttctttcagtatattttcgtgccttcggtaaaaatcagaaggcgggcgaggtacgggaaatttgctgtgcagggcgaactcttctaccgcgtgcttgactcgcagtgcggactttcactcctcgacattcatttctcaaaatgtgctttttttagggtgtaggaatgtaatttgaaaacaaaaaagcatcgttttttggctgcgtatttatcgaaaattaaattgctattcccagaaaaggatagaggcaaaacattaagtggcgttctcgctcgacataaattttgactttcgtttcagtcagccgacacttcccccggctaattctctcccatttgggctgtccaatctttggcgattggatttacgagcagagattgcttaacgttgacggacatccgatctgtgccgagccgaaggacgtgtggagggctgaggcgaaaaagttcgagccaagcgcctttctcaataaaatcggcatcggaagtttcggggagttgcgacctccgccaccccttttttttgcggtgtacgaaagcactttgcctttctttggcactacgaaatcggaaagacgaagaaccaatctcgtctccagaacaccgcctcctggtgaaaaaggacgaaacaaaatttaaaattctttgggaatggttgaagaatttttataaattattccaaacaacttctaataaagttattttttacagtaaattgtttacagatcatttcatggccatggttgacctgctcaacttcggaccatcagttgaaaaattgctaatgtcgcttgaacttggagaattagaagaagctgaaattccaccgaccgacaaaagcactaaaagcagcggagaaacaaaattttgaatatgctcaaacatttccaactttaatttgatagaaaataagtttgttagagaaacagccgtttttataattaatttataaaatgagtttaatttggacaactgtgaaaggagttgcactcaaaaaccgtgttgtgtgcccattgtcccccaccaagttgacttacagaaaatagattcattctatcggtgttttgcgctttgtcactttaactgtgcttagaaatgccgaaattgtcccccccccccccctccaccgaatatttcataaaattgcttatgtgcgaaagctgttaacaaattatgtcaaaactcccctttccaaggcggcgcctgtcggcaattgttatgatgaataatatgaaaatttatgcttaaatatttttaaaaaatgtgtattaggtctttttttaatcatttttggcaatgatttacttattgttattgtggaaatttcgatggatctttgtattttgttttttttaattttgtcgtcatgttctaatgcagcactttgactgagagagtattggttgaattgttttggctacatgagtctccattatttgttatttttcactttctttttaactaaattcttccaacgtcacttttattgattttccattttatggtttgttcttaa

SEQ ID NO: 10391 - DNA, 3768 bp, Heterodera glycines
  unsure (1)..(3768): unsure at all n locations
ccggaccttctgccctcgtgaatgatggcgaccgttgtggtctacccgttgttgctaaccacgaagattgtctctccctaatttttgcccgtccttttcctctccccttacgtattgtcccccggtatgatgtcttcctttttctcttatttgtacattttggttgcgagatggtagttctgaactgtgtactgatctaattgcattttttcgcataattaaaaagaatattccgaaactgttatctaatagcaaattcaaaaacaatgatgtttataccggtgcatttgtatatttttgacagccctgaaataaaaacacaaattgagaattcatattttcggttgcgtattttcctttcatgttcgggatcgtaaatttccttactaagatccctattggtgagatttagtgattacctgctttatgagataaatatgttaaaaaagaattcccgaaggtatagattcaagtgattccgagaaattaaaaaattcgttaaatatcgtctacaataacattttacacgacgactattaaataataaaatcattgattgattgattgtatgtcgtcatattttagcaattagaattccttccgactacgcataatatataggtaatttgcattttttattttcattcattttataatattattaacacattaacaaaatggttttcatcaattttattgcaattttgccatttcttacaatcttttcggcagttgtgggagcagacaatttaattcagaatggtgggtacgaattcgattcgacacgatttgactgggttttaaaaagaaatagcattttctatttgtaaaatttaggtaacattaattataaatgattgaaaaagaaattgaaaaaataatctaggatctattaaaaatgagaatttttgtgcattatatttttgattttttttaaattttttgattttttaattttaaaataagatgatgatgagctccttgaactgttccaaaaatatgtgttgctgctcaaaaaatcggagccaattttggaaatggaaaaacaattatttaacattgaaacttacaatttcaaaaatgaatttttgctcaccgaaataatgaattttgcgctgaatttaaatgccaaaaatgagacgcaatttgctcggattattaacgaagcgacggccgatttgaccaatttgggattattattaacaaaaaaagaccaaaccgaggaggggcagcaaaacattgtggaaaaaatgacaaaaatatgctattccgaaagcttttcattatggttggtgaacaatggcattttgctgaaaaatgcaaaatggagaaaattccttctccgcaagggtttcattaatcaggtcattttttagcaatttgttaattttatgacaacaaattataaggggggggggtaattaattaatttgtgtccgaaagcataaataataataaataaacttttaaatattttttaaggattgtccttttttcttagagttgactgtatgcttcaaaaatatgctaaaatttataaaattgcttattttaaaacaaaactgttaacaaaacaactaattttaaaaaatagacccaaaagtattttgggaaaatctgaaagcaaatcctcccaaatcgattaaaaatcgcgaatgttaaatcaaataatattttaagcttttgaattaggttttaaaggtgtccttttattttgtgcataaattttttttcatttcagtgatgtccttttgtggaatttttgatggaagcccggcttttaaatttatttttcgatttttggatttatttttatgtcttattttaggcgtcctcaatgcttttattttttaggctcaattcgatcagattaagccatcagaaaccgatttgaaatggtccgaaaagaattgtgaaaatgaattgggcattcaaaaagttatgaaactttttaccgacacacaatgtgaagtgcacttctcagtgatacaaaagctgattggcaaattcccgggtttgaccaaacctttcgccgacaaagcttgggcattaccacggtatcgaaattacggtaatgaattaaaaatagaaccaaaatatttttatttcttcgtaatttaagcgctatttaatgctgaagaacaaattgaattatacaaatttatttttaattcggacgagaaaacatctcacgaaacggagacgaaattggcaatgaaacagttaattggaatggcaaaagaaagggaggagagtctttttaaaaccccagaaattgcggacgaaattcgaaatgccaaaacgcagacttttacgatgatggcactatccgaaactttttgtccctccaaagaatggcccatggatcggatgctttgtccacttggacagtacgtccaatttttgagtgaaatggccaaaaatcggccgaaaatcgaatgggaggccccgatttggtgctttgcacatgatatcaacgaaattttcgcatgggtacgacaaattttatttggaaaacgggtcgaatttttcaaaaattatttgaaaagagagacaaacggaaaggacgacgaaatcatcagaattatacgagaaaagccgggtgcaattttgagactacacaactttgttcagcataaattaatcgaggaattgtggaaagacgagcaaatccgcgagaagctttacaatgtgaactgtaagtgaaacggacttactaattagcactaattaatgacgaataaaaggagttattcggtcgattggggtcaactgctgataactttttttttgccataagattgggtcaatttaattcttaagctgaaaatgcgtcagtggaaaaggcattattaagtattgttgactaaattcaaaattggttgcgttctgatttgataattcggtttttcagacattcaaaatttaacaaaattttttaaaattaccaaaatccactaaaaattctgattaattaacgcattttgcactgatgcttttccggtcattttttaaaaaatcattctgatttagtttttcatggcttttttagtcttctccaacaaatcgcgacttttgcacaattatcgccgtgcaatggccaaaagttcgtcgcccattgagcgcctcggcgcccgtttggccgctgacattgcggcgatggccaatcatttgtcggccaaattcccaaaagttcagccccatttgcgtgccgctctttcgtcgtgccaatcgttttctccgccatttgcatcaaattcgaatttgtcttccttttctgaactgctcgacgtcgtttgggttgaccttcgctttctttacgataagtcagacccaacaatttgtgatgaaagaatctacaaattgacaattatttttgtgagcaattatttatcgggtgtgttagtggctttggcaattagttagttaattaaaccataataaaatggcttatgaattaccagttcttttcataatcacttatttacagtgaaaatgtaatataaaacaaaaattgagtgatttaacgcagaaattcaaaaaacttttccaaacaaaaggttttaaaggagcgaattgtgtattanactccgctactttggttanaataataatttaattttgctttttatttttaaaagaatattttttagttaaaatttaaattgtaaaattataaaaatgggagaataattctcgtgcactttctttggtcggattgtcaaaagcccagcctttttgtacgcttttgcataattttattctcat

SEQ ID NO: 10392 - DNA, 1731 bp, Heterodera glycines
  unsure (1)..(1731): unsure at all n locations
ttagatgagaaaaaattcattganaatttattgcaatttttgaaaatgggcgacataaaaaaattatttgaaatgaacggaatcacatttaatgagagcggcgaatttattacagcaaatgaaattgaggaaaaaggaaaaaatatgcagcgaaatgaaacaaaaaaaggaaaaggaaagaaaaaaagaaaaacccaaaaaataaacaaaaaggaggcgaaagagaaaaaggaaaagcaaaaagaaaaagagaaaaaagcggaagaaaatttaatggaggaaaaagaaaaagcagaagaaaaaacaactgaaaaactggaagaaaattcaccagaaaatgagaaggaattggaaaagatgaaagtaaaaagtggaaaaaacggaaacaaaaaatcaccagaatttgttttattggagggaaatccaacggaatttgtggaaaaagtgagttttaattgattcaaaatttataaagaataattaattatatttagcataaagattttattgtgatcaattgtgtggccgagcagaaaagtgattatgaaaaattttgcaattttattcgaggaaaaattcgatcgaaaatgaataatttaatggacaaaattggaatgaaaaattcaaaagaaattgaaatttgtgaaatagacacggaaattaacagagaagaaacatttaaaattgtgggcgaattggtccaccgggaattcaggtgaccaattattgttcgggttaattaattaaggtggtgaggggataaatgatcatgatttagcgttttgagtaattaattagtgaaggggtagtaattcataagcattttgtggagatattaattataattaatttaattattatttattggcggcataacttgcaattttaattctctctattttgagaagtttttgagaggtaattaatgcaaatgaattaatttaatttggttcccaaaaaacacaattattaatttgttcaaattttagcattaattttggcaaagtttggctttttggcattaaaataccagcgaatggcaacgaaaaattgaaggaacacttgaggaacttcgatattgaaatgaaaatggaatatttgcagcagttgggccttttgtctgttgaaatggacgaaacggaaataattaacgaattccaaaaattgggtgccaatgttttgtcgacggtggcgaaaaaatggtttttgatggacattttggaggagaaataataatcaatgaatgattggattgattcatttgtttttatttatttttgaaaattttttctaaattttctaaataaaatttttgtgcggcaaaagcagcaaaaatttgactaacttttattaattttgaaaaaatcccggggtttattttgatttggacctgtaaagcataaaatcgctttattcaacccaaatcagacattctcatatttttcaccaaatcataattgtaatacctaaaaatagttagttttaatttaaaattaatatttttataaattttatatttttacatttctttctttaccaattcacaaatcgcctgctgtttggtagtaaaacaggaatatgtgtgtaaattattttataataatctttgttcctatgaatgcattttgcctttaatatttattattcatcattcggccatttcaacaacaatttttggtaataatttgaatttgaaatatcaaattattcactcttaattcgatgactaat

SEQ ID NO: 10393 - DNA, 3935 bp, Heterodera glycines
tgatacgctaatgcgttcattcactcgtcgattctctcaacactttgaaattcaaatattttgtgcaaaaagtgatacaaaattcgttgatcaatcaaaaaatgattagctgacaaattggtgatactctggcggtacttgccctctaaattttcgggtctttttgattagccatttattgccaatttgtctttggtcctaaatcccttctttcttcatcaatgaatataacggtatttcacatttaacttctgaattgcaacaattggggtgggcagttacgcggagacggacggtcccggggggcgggggggggggggtacggtaaaaaaccaattcctactgttctccgtgaatatttcccggtgattcctatcggaactacaggtccttctaatcaaatttgttttaaaaaagacagtaattttttttggctgcattagagcccaaaatactgggggtggcgacggtgccccgcccgcaagccgaaaccctgggggaccgtgcctccccatgcaattactgtatttcgtcttttctttttgttttgataaaatttgagtttaatccagcagcaggatcatcaaatttttgacaatctctcacttggttgaccacattggtaatactgccgattacaacatccgtttttgccaatttcggacccctgacccgaactcgaacaaaaagtcgaaaattttcgagtttttgggtcgaaccatggatggtagatgagggtacccttggtacaggaagcctgtaaattcattgtccctgatgtgatgaatggtagcgctggtcagagcccgaattcgtgattagcgacttcgaaaatcccttaacacttatttcattaatttctaaaattaaaattttttcatttaaaaatgtgtgttaaaagtataccgtaaacccaataagtacccaaaaccattgcaacatcaaaaaatggtcattgtgtacaggtacgaacataaaagtgaattttgaaacttttgaattttcgacttttttgttcgagttcggatccgggattcgaatttgatcaaaaggaatgttagattcgagattaacgaccctaaagaccccataaaacgtgttttcacgattttttataacagaaaaaattgtcaaaattttgaatttgactatagacaaaaataaattcatttagaaaaatcgcgttttctctattaacagataaataaatacgcaaaataagatatgtttttttctcaataaggatgttcattcatcattagtcgaaaaactggaccaagcctaaatttcaagaattggagcctgaccagggtagaaatactcattgaaagcatacctgaattccactttggctaattttgaaaaaagaaagaatttaggaaactaatagaaatgacgaaaattctaccaaattcaaatgatatcttgtgaaaatacggcgaatagaggagagattcattgttggaaatggtggcggaatattgcggaaaagagggaaaaatcaccatttacttgtggatgcatttatttgtcgaactaattgtccaaaaagtactgccaatagagaattttgaattgttcaacattaagacggcaaaaatgcaccacaagagaccaaaaattgaaatggatcgggaaagaaaagcaaaaaataaatgattgaatatgggaccaccgttcggatataaatcagaaaattgggttgggactgccgaatacccgctcacaatcagttcatttgttccaactggtctttgatcttggccgcaaaattggtgagagtaaggcccaactcggccagaatagacacaagcagctcgacgttggcagccccactcacacagcgaggaatgtctaagaaaaacaatggaaacgaatgatgggcaaatgaaaaagatcaatgatccaaaaataggaagtccaatgccaaggcgactcaccaccgagttgtgtctccaatttcgactccggtttaccatcgtccaaatgcacgtccaatttcggctcctcaaattcaacgccgtctaaatgaacgtctttttcggctcaaaataaacgtcaaattctgactcccccggcttaccatcattcaaatgaacgtccatcttcggctcctccgattcaccgccattcatatgaacgtccatcttcggctcctccgattcaccatcattcagatgaacgtccattttcggctcctcagattcaccatcattcagatgaacgtccattttcggctcctccgattcaccatcattcagatgaacgtccattttcggctcctcagattcaccatcattcagatgaacgtccattttcggctcctctaattcaacgccgtctaaatgaacgtctttttcggctaaaaataaacgtcaattctgactcccccggcttaccgccatctaaatgaacttccattttcggctcctcagattcaccgccatccaaatgaacgtccaatttcggctcttcctgattcaatctgtccctcaaatatgacattatgacatcacctaaaaaagcatttagcttagtttaaacaaatgagccagttaattgcaaataaaccttgtataacttctcctggtttaaaagaagctgaaataagctcaacgggcggtgctgtgagctttcgttcgcgacgtccgggactaaaaaacgcaacgatgaaatgatagtgacattcaaaattccattttggttactcactcaaagccattgtaaaatgcccgcatttcatcggtgtaaacgaattccttctttggtcgctggggcttgccgcccctacgaaagggcgcaccaaccgccgcgttgccgccagtacgcgggccacggtaaccgccgccaccgcctccgccagtgtatccgccagttcggtaaccgccaccacctccaccgccgtaacctcctccaccagcactgtgaccacctccaccgccgtaacctcctccaccagcactgttaccacctccaccgccgtaacctcctccaccagcactgtgaccacctgcaccgcctccgccggcaggtcgactaactgcgctcacaccgccgacgtttccgtacattttaaaatttgctaattgcaagagaagataaatgtaacactaacactgaaaatttagaaatgatgaagcgatacacatatatttgtaataattttcgggatgccgcgagatcaatcccgcatttataatttgcaggaatttgcgggattaaatcacttttttgcggcgtgctttttccaaggaacttttggtgaactggggcggtggtgacgccttgaaaccctttaccgatttcctaacaaattttgtccaaaacttaattttggcattttgtcattgcgattttcaaagaatacacggatcccgcgggagcccgcaccaaaatcaaatttacggatgcgcggcggaattgaaactcaaaatttttgcatgacgggaagaaatgtagttattctctttgatttagtgcctatgccaacagtacgagtcggggcagtgcgatgggtttttactttttttttgttgttattttcttgtatttatattctagagactttaagctttctttggtaccaatgatgtaaagactattatggcctaataaactgaggatagtcattgattggatgcacaaaatccgcaatccctggaagaatgggtgtccctaatttaacgtttttatttttggctcaaaattagtttccgggggttttctaggatgctgattacgaatctgaactcggatttgcccaattccgaaacccggacccgaattctaacaaaaaagttgaaatttttttttcaaaaatataagttaaaatcggtcaaattttggcaaaaaccgcgcatttatatccgattaacactttgaagcattgtattaatccaaaaaataatagtgggtgcatgaattatagcttttat

SEQ ID NO: 10394 - DNA, 391 bp, Heterodera glycines
acacaaactttgggtagctacaattcgatgtgcaaaacggggaagacgcataaatatacaacatatacagggcacacaaatgtatcattcgtcgtcagggctcgtccgttgtgagaagtgcacatctacaggttgtaaatgaccggcagattcttgcggcgcaccattccatcctcggcgaaccactccagcttgaaaacggtggcggccgggtcgggcgtgttgcaccactccacgatcacgcggtcgttcttgatgtcgtcgttgttcgggtcgaaggtcgtgacggtgatgatcacgttcacggcgtcgccaacgccgagcgtgccgcacggagggttcaggaagatgcgcttcggcttggtcgtcttgaaggcgtacccaatgcgct

SEQ ID NO: 10395 - DNA, 4555 bp, Heterodera glycines
cccccccgtagtaggggtcagttgcgtctgagccaagcttaatacatcatactttttttcaggctggccaaattttataaattttgtatcattggaaagctctacatgtttagaagctttttaagttatttctaagcgattgaacaacttattaaaaagttgaaacatgaacactgccaaaaagtcagaatttttgcacattttaactggcccgtttcggttccccccccccccccgccgcatttctcacattttattgcccggaatttatttgcttaaaggatgaatcacttccatcacccactttttgattacgggaaatgggcgagaataaaggacaatttgcactgattgggggtgggggtgagtcagaagaaaatgtttcttcggcttctccttttcgggagaatgaatcattcgtttgtcaaaggaccaccaatttgataggtgaagattaattgctgattatttcattcgttttgccattttctttggcttaattaatcaatggcactttcgccacacattcactaattacccaaatgctttgttttgccacctcaaaatgttttcctcaaagcttcgaccaattcaaaagccgatcagtttcactgatcttcatctttttgctgacgattcatcttttatttgcggaaattgcttcggaaaagtcatcaaaagaaacatttaaagatgtaaccaccaaaaatgagttaattaactgattttaggcagtggaaagtaaaggggagaggacaatgagccgaggggggggggggtaatcacaaaattgggcttagtggcattttctaattttgctcctatcctcgacaaaactccaaaattatttacttttaaactaatcaccgctaattggccaatttgaaacaataattaccttttacagtctctggtgcaaaattcgccaaaaagcgacctcaactttctattccaacaacggagcactcagaaaacagctttcatcagacatcattatgcttcttccgtagcaaatggccaatctggacaacattctcggcaccggcgacggatacccaccggaattattggcaaattaattgccaaattaagcggaaagacgggaaaaattgcagcgactgcaagcaaaagcgatgatatttttgttgggaccgcaaagggtaaaatgaagcctcaaaagggtatgtctgtctcaccaattccccattatttccaaagttggacgaattccaaaccgcgggacagcgcccggacgcttttacaaatcgcgcgggttcgaccccccgccctttgtctcttacgcggcccccgcaggaagcgaagtggccaaaaggacgagggcaaatgcactgacggggacaaaagtggcattggccgccgcgggagtcggcacgggcatttggtactttggagcggagaatgccggtgggaaagggacgaagccaatgtttttggcaaattaaatttgaaagcaatccctttttatttttttttagctctttacgtcgcatttatcgtcggaggagtgctcatcgttttgattttggcactttctctgcttttttatttgtttttgtgccgaaaacggaaaaagggatattatgcggtcaatgagcaattggcttcggcatttgccaagaaagtgctcttttatttgttctgttgatttttcatttttgacaatatctctacatataatttcttttttattatttttttattaatttattttttcaataattaaattttttataattttatttttgtttccaaaaaatcaccaaaacgtaagtaaaaataggattgatagaataattgtgttattttttgtccaagttcgtccccctttcgctcctccgccggttggtgccaattttacgcgactttttaagggttctacaaaaacattttacaaattaagccgggaaaatttaacgaactttcgtgcaaaaattggtaacgggcatagaaaccagtgccatcgaaaatagcttaaggaaaaaagaattatcatttgtaattttgaatacttaaatatcagatgaaaaaaggaaaaaacgctgaaaaatgaaaaacattaaaaaaatgtattttaattattattatatatagaaacattaccattcgtatgaaattgcattcggaaataattcgattcgctttgaacggcgccttttggcctcaattggccgcagaagcgacgatttgtccttaaggcaacgaaagtgtccaaattggcaaaatggtccttttgctaatgacctgtcccgggttttgtagttgctaaacagcacaaaatcactttgggtggactcctcgcaactgaaacaaaacattcgcatttttgtccattaatcgcttttctttttactgtccgaagccttcgacatcgaaataccttaagaaggagtgaaaaaggaaaagcgaacaaattaatgatcaattagtgttaattggtgggcgaccaactcgaaagtgatgtacaccttttggcccggccttccgatgaaaacgtattggcagtcgacgttacgggggtaaaagcctcaaaatgagtcggtaaatgtgggaacatggcaatggccaatcggccgtgttaattacccgggtaattaggactccaaacatttcccgtcttttttattgtgccgttgaacacaaaggaacatccttcttcagtcaattgttttagttgggtgttaattagctgatttaaagataaaactcacttgatccgtcatcagccgaagcaatcgcttcgattggctgcgccccgaaatctttgatgaagcgatattcggcaatctgtgccaccaaattaattaccctcccattaattcccccccccccccttcccgttcccacccatccaaagtgttcgtcttccgtttcgtctctctcgcgaagtcgccaatcgcccgcccattttcgagtgttttgtgttgggttttgagcgaagaaggcacttttgagcacgtaagtgagagtgagcacattctttgcggacattagctgagccggcaattcgtcgccgcaaaagtcgtggattttggacattcgatcggaaagctaaaaaaacgaaatgaaaaaaagggggaaaagaagaaaaaattaggaaataaaataaatagggaaaaacggataaaaaagagatttaatttgaaatgaccagcacatgcgccgagagatggtcgttctcttcgcatcttaagcaaacaatttgcccccattagcctcactttctcaccttttcgtcgtcacattttgaatctgtcgcgaattcagctgaaatcgctgcttcaggcggaaaaaatggaaaatgatttgaactttttcgtctggggcaccaacaaaaatgaattggcactgaataattaatttggtcaaaaagtgtaactgctttgccttataattggccattaggctgttctccgcttcgggttcgaagtgctcactgaaaagcaaagccgtgttattttgccacggcatttcggtggagccttggcccatttgagtgtccgaattcggcccaaattgacgcaacaatcgccccgaagtctgtccaatgaatgcatcaatgaatcaaaactccaaaaattggaattttcacctcatttggcccatttccattcagtaacccattcgaaaaaacccgcacagggcacgacttttgctgggaaacgccaaaattgaggagaatttgccaaatgaaccatcggaatagccaaaggaaaggcacggaagacaaaagcatggcaaaagcttatcagagagtgtggaatataaagaaaaaggcagcaaaaggataattgtaattagcagagacaaataattagcgggaaaattgagtgaaagagctaattaactgtaataatttgaggatgcaaattgaaaaattttaaatattatttatttagcaatgccattaacttttttggccattcgatggcatttcccccccccccccccttttttcctccgtcccttttcttcccatttcatctcgcaaattgatttagtcaagggccaacaaaacgaagtacgacgacaggaggaggacggacatccaacagaagaaaaagaagaagacggagaatggcaaaaaacgacgcaatttggggacataaaaaagggaaggaattgggagatgaataaaataatcgcaaaacttggagcaattctcacgaaaaagaattgtcaagaaattaccgtatctttttaaacaaatctattggtaactcttttcaaaataaagcctaagcatatgcgaccgaaaatgatgagaatgaaaaagccattgtccgttcattcgccgttcgttccgccgattgtttttctgcttgccggtaaataccgtacgcggacattcgctgcttccgcgacgaaaagcggcgcgttttggtgcgtccattcggtcggatggtttctcagccgtttgtccacaaaatgagttagcattttgttgtgccctctgttggacggacttttgtgagaaatgtcgccacggatcttagcaatggagacaaaagcaaaagaaagcatttgatggcattaa

SEQ ID NO: 10396 - DNA, 3726 bp, Heterodera glycines
  unsure (1)..(3726): unsure at all n locations
cttttattatgagttcgagaccggttgactgtttttcctttttcatttatttttatatgattaataagattttttaaaccaaaaatacacattaaaatcaatcatccttggcataatttatagacgtattgaacccaattttattttctttgaataaaaattcaattttttgactaaatcatgaaaatttacaaaaaaaaaagaaaaaaaataaaaatttaccagaaattcataaatttttggtgaaaatatgttacaaaatagaccctaaatttcaaaattcacccggcgctgcctatcggcatcgccggcgccacaaaaaaacctattttttcttaaaaaaatttggcccaaacaaaaaaaagaccaaaaaaagatttatacagattttcgctgaaaattaaccattttagatgccttaggttgtgtttttaattaattctatacaaaatatttatgataaaaaaaataataaaaagcacataaaattattattacgaaatttaaatatttttaagcaaaaatttataaagttttttgactatttggcataaggcaaaaattgaaaaacctcgaccccgaccccgaaccccgaacgatttggcaaccccgaccccgaaccccgacacttccaaccccgacaaccccgaaccccgaattttcaaaccccgacgtcggggttgcaaccctaatttaaattatcaggaaacggattttatatgtgctaaaaaatgccaaatgtacatgtacttttatatgtgccaaaaaacccataaaatatgtgctaaaaaccccaaaatcggccaaaatatgtgccaaaaattaaaaaaaaactgcttgaatttttcaaaaaaaatctcatttttacccatttcacaagcacaattctaatcaaaagcatttcaatgctttttgaagcatctttttctcgctttctaagattttaatcattttttggaattttcttctctgaaattaaaattttgccttaaaagtgaaaaaagtaattaaaaaggtcaaaaagtacaacaaaaaaaaagataaaattttgaaacattgttggacattttgccaagaatttaggtgtcagaaagccgctacttttgaaaatttgtcaaaaaatcgacaaaatatgtgctagaaactaccaaacccccaaaatatgtttttattagcaaaaagaccaaaatatgtgaatgttaaatactataactttaagtanattatgtatttgatttttcattttaatacccccttttgngacttngaaaaacgtccgatccaaccctcaaaaatatgtaaattttaattcttctatagctctaagggttttatacatagtagtctgtaaaatattaaaaaaaaatttttaattgcaaatttcaaaaaagttatggccatacaaattcaaaaaacttgatgtttcgaacattttttagcctaatttttttttaaaactgaacaaattttttgaaaatgtccgtccgcaattgtccgtaaaacattttagcatatatattttcttcgataatatgttttaaacgaatacacatattatataataaaagccacgttattatattattgatatgctggggatgttttatattattataggcataaatatttgcataatgattgttgggctgacgtcactatgtgtataataaattttaatgttgaaatatattgtattgattcttcgattttatgaaattattcgctattacatacattcattttaaacaaatacgagcatttaaaatttattcaatttattagttattaaatttttatatttctctattatataaatgattttaataaaaaatatattaagatgataatattacatttgttccttttcctttcatcaattttatgctgttttggcacaaatggagtgcaaagaaatgaacaccaaaatgttgctgaggttcaattgaacgtaattaaatttaaccataattgtcataaagtatatctcactaatttgactaagacatgaagtgagagagagagaatggttaagagtgaaagaaagagagagactgagacagagtgatatgagggtgagatgagagagagagagcgagagagagagagagcgacagagagagtgagagagagagagagagaaattgataaagaaattttttaattgggctttcatgcataatttaaaaataaatatgtatgtatttagaatgtaattgatcctaatgacttgtcatcacctgggaactttgttgaagacgaccacccgccgaagttctttcgcatggacatgagtaaataaaattttgaatttaagataaatatatttatttatttatttaaaataacatcaggtcgataaaaattttttctagagttcttaaattattaagaattattgggtcttgaaaaatccaatcccatgcctaattaaaatcttactatacctgcaatctttgtattaatggaatatacatattgaaatttaaaattttcttagataacacattgccaaaaacttttgctgaagagccattacaaagaaaacggcgagcaccagaaaaatatgggacaggaaagaataagcaggcgcaaaaggacaagtaattagtaggggtgccaaaaatatgtacaaaatatgtaagaaaaatcgcgaaatatgtacaaaaaaccacaaataccgaaaatggaaaaatttttcaaaatattaaaaaattcaaaattttgaaacgcaaaatatcatatttctatttcaacattttgggcttttataaatttctttgtaaatattttggcatttttcgaatttttcatgtaaaatttcagaaactttttaacaaaaatgcaataaaaatgcttttttattgacgcgatgacattttttggagaaatgttcaaaataaatttcaaaaattttccactaaataaatctgtcgaaaaataatctccctgtctccattagtctgaccgtctctaataatctacccctttctgtgggggttgaaaaataatatacctgggcatataaaaagagcaaatacggtatgtatcaaatatgtaaataaaatttttaaaatggttattttttggaaaaaaaatccctcgtaaatgatgaaataggcacaaaatgcaataaaaattacttaaatatgcttagaatcaccttttaatattttaaatcactttttttagtatttttcaggggtacattttcaaaatatgtaaaaaaaaatgaaaaaatgtacaaaaatattttccgaaattttggatttattttttaggattttcaaaaattttcgtaaaaaatccttaaaaatgtaaaaaattaaaatatttaaaaaaaatccaaaatatgaaccaaatatgtaagaaaatctcgaaatattaaaaatattaaataaaaattcccaatttttagtaaaaaaaataaaaagttatgagtaatctcgatcaaaataggacaataattttgatcaaattgagaaatggccaagacaagcgaacaagttccaactacatggaccttgaaagtccgggatctgccctgtcttctgtacgacgatctgacagtgggaaaagcccgaaaaaagtgccaagatttgccgaaagtccggcatcatcatctcgatcgtcagctcttgggcgtaataaacaaattaaaacgactcttaatgttgacatttcatccaacagtgacaatagtttggaggaaatttacaagagactcaa

SEQ ID NO: 10397 - DNA, 1264 bp, Heterodera glycines
  unsure (1)..(1264): unsure at all n locations
ttttatgtaatttcatacaaattcaattttttaaattcacatttttctaganaattctttaatactgtagaaaaaattataaaaattatacaccttaattaaattcctcaatttcaaattgacttatntaaacaatatttaaacattaattacaaaatttattttttattttttgctgctggctattggtctgctgctgctgatggcctctttctattaatgcataaaactttccattgtggcacgagtgggcagccagtgccaactcattttcacttaacccgcacatttttattggcaaaatgccctctcccattggccaagtgccgtccgtcgtcattgtgctatgtccactaaagccccccccgccctcactcaacgcgttgctgctggcaatggccaagcaaatgcattggccattttttttcaactcaaagctggggccatgatgagaaaaagcacaacggcatcaccaccacattggccaacacggcacaaaaataaaataataataatactaataataataataataattgtcgggtggcgacgagtgccgtgccctcctcctcgctcgtcggttggcaacgtgccgttgtcccggctcgggctgctttgtcccatcccatcccaacccactcattacactaggcaaaagcagccactctcggcacacacacactcacacagaaactcattttagctccaaatgatgaagcaaaatgcatcatcagggactatacaattattcctatggttgttgtgattgtaagccgccgccgccgccatggcttataatttcaaaaacaaattttattgtacttttattcgggtgatgtctaatggcactgtattaattattggtaaatgataattatagtaggaaaagcactttcttttgtgattttgctaaaagttgggacttttaattacagacttttttttacatgttttggcatttttttcacatccgtctcaattagttagtatcagcagcaggcggaaaatttcaagagattgcatgatgcaatcacaaaataaattatccattgtcaaatttaacattatgttatcattaggaattcatttttaggcaaatgccgaaaatttctgcgcacttaataagcatgaaaaacgcattttccgcttggtttggggtgtctacgatgacttttataaggcctaactttgcctattttggagtttttgtgcttgaaagggcctaaatgcctattttaaatacaccccctagagaaatggacct

SEQ ID NO: 10398 - DNA, 2434 bp, Heterodera glycines
  unsure (1)..(2434): unsure at all n locations
catatccgctctttcttttatggatcttattaaaccccctttccgcgttttaaccgcccaaccagcttattcttggcttataaatttctgatagctcgtaaacgtccttttttataaaaaaaagtccttaaaaacttcgattactctgtaaatttctatctacaaacttcgacatttaaaaatgtatacttctatacgctcggccaaatttctaggctaatttaaagcaatttaacatttaaatgctattgacaccaaacaattaattcgtgtgaaaaaattaaaaagtgccaaagtcacgctttgaaacattttctgactacaaattgttttcaagattgtttgactttttaacaacatttaaaaattgcgtgctgtaagcatttcatttggacaaccacagattaacaatttatgcgaggcgcaaatgagcggtcggggtcgttttcgcgtggccattttcgcgtggccgttttcgcgtggggacgttttcgcgtgagtacctgtttaggactgaaattggtcggatttgtgcaaaacatccatgtttcgaatcccgaacccgaattcggacaaatttcttgactttttaatttttttatttcttgcggctagtatcttctacagtaatttgtcagtttggtcggatgtgcgtcaaacggaaaaaataattaaaattttataaaaatataacaaaaaataacaaatttcagaacaaactaaggtcgcatttcatagtttcgggaaacaccagtgagaaaattgataatgttttcgggattcacattggcattggcataattgtgatcattttgggggaggtgattgttattgatgtcgttatagagtgcgccgtcatgttctaacttaactttgtttcgttttgttttaattttttgctgctggtccatattatataatttaaatgggtcggggtcacttcggcgcggaccatttcggcgccgcaaattttgaaatgctataacttttttatttgtcagttaactttagccaatctggcatcatttgaaagctctatgtgtgctctatattcacatgtcaaaatagaaataaatgattcaaaaataaaaaagttatggcacacggcgccgaaaaagccaagaaaaagtcaatttttgaggttttttggccacaacttttttgtaaactgactaaattttttgaaattttgcaatctaatagagaatctcaagagctatcgaatcaaaaatatttaatttggttgataatgaaaaaagttgttagcaacggcgccgaaaaggccggcgccgaagtgggcggtttacgaggattttttttttccaaaaaataaccatttgaaaaatttttatttacatattggggtttttgtacatattttgggatattttaatttaaaaaatgacaattctagaataaaatctgataaaaacttgtccggatcaggcacttttggtgcccgaaagtggtgcgatcggcttccggaaaatgaccaatcaatcactgagttttttgtggaacgcacacactgagcttttttgtggaatgactcaccacggattttaccctctaatccctaattaacatcatatttttatgtacattttttatttattaaataataaagtttttatttttatctcatttttgccgttttcccaactctttcgcctgcagcagtttgtgcctgtctttttgggtcaccgttttgccctgaacaatcaaaggcaattcgaataatgcataaatgaatcaatcaaataacctttctctttttattatcttttgtccatcccattttctctcattttaaagcattaacagtacaattatggtgaataaaaagtatattcacaaatttttgtctcaaaaaaattttgcaaaacaaaagtcactcccccttttgttttgataaaattaaaaatctgtcactttataactagcgccaagtttgttaataggcccaaataattgtcatattcgtgatcagcgacctctaaaacccccgggcacttggtttcatgactttataaacaaaacaaaaaaatttaccaaaaaaaagtttaaaaaattttcaaaaacggtgactttttcactagcgcctcgagatttttagtcactaaaattcctagccctagttattaccaaaaatgttgtaaaaaacttggttttttgagcttctcaagtcctcccattggcacattgtccaacccctcggacgccaattggcaacaatttaaggcgaacaaaattcagaaattatttggataaaatgtgatttttacgtttctttcatcaagtacatactataaggacactttggaaaaccgaacaanatctcaacaactaccaaaaagaaactgataaaataagctaaataagaaagaataaatcttttttcacatttctgtttattttgcgaacagaaatatgt

SEQ ID NO: 10399 - DNA, 1063 bp, Heterodera glycines
tttctctataaaaataaagtttccaacgcaattaattcttcttccctttgtgacgacatcattcggaactcggccaaattgtgctaattgctgccaaaaatgaaccgacggtaatgaattttaaaagtcacaaattcgtcgtttatttgactaaactgttttcccatttcagttggatttgcaacgacgtttggatggacattttcccctcttttgaccgtcctcaacttggcctcaaattggcacttctttcgccacgttttaattcgctggtggacaaatattttgatggcaaaagcgaattgccaatttggagacaaatcgtaattcgtcgcaagggcattggaccagaaatgaaactttatgtagagatggattacgtatttgtgccatttccattgcccgaccgtccgttgcccagcaaaatccgttttgaatggcttcagattgagtaattaaaaaacagttttatggcaataaaagcattcattccattttcagttacatcgatcactccgtcatcgcttttcttcgttcaaatcaccaaatttttaacaaaagagacaccgatttacagttgtcgattgcgctatatgaaaagttaattcattgatcatttttattgttatttgaattttatccattttttcattttcccatccttggccaaatatttcatcaaaagttggccaaacttttgcattaaatccaaaagatttaactaacaaagtttcgtcgattggacttattatgaatgataatgacaatataaaaaataaattataaaattgcatttcttattttgtaaaatttttgtatatattatgaaaatggctgtcaaaaaagcttaggttttatcattggaaatgaataataattttggtaaaaaatcattaaacccaatatatatttttttttattatattcttacttttgaaattaaaatttgttttaataaatttaattgtttaacgaattatttttgggtcagattttttaatgacttccgcccaatggtccgatcacgcccaaaaaaggcataaaaaggaaaaaagggcacaaa

SEQ ID NO: 10400 - DNA, 2755 bp, Heterodera glycines
  unsure (1)..(2755): unsure at all n locations
tggaatttccatgccggaccgtccgttgcccagcaaaatccgttntaagaatcttcggattgggtaaatcaaaatcagagagctatgacaataaaagctttccttccatttttaggtacactgatcactccgtcatcgcttttcttcgttcaaatcatcaaattttcgacaaaagaggcaccaatttacacttgcggattcaatcatcacacaccacggaaggccagcggatttgggacatttttgttcgtgaaatttggccaattttttctgaaaacattcgccacttgggctttccccatggtgatcagttggaccatttgcttcgtcaaatttcgccgacaattctcatcgatcttaaccaattggtttcaatccattcatttggtctgtcgcccgctgcgtttggtgatgattttgatgggccaaattcaacaatttctgctggccaagcattgtccaaatggttgcactctccgagaaacgatggacaacccaagcgattgcgttgcgtagattacaacaaacaaacggacttagattgggtcaacaatttcaaggaggtgtggccccacattttcaacaaatcactgatatttgttcctatcgaattgtttagcattttcttcgtgccaatgccatttcttccgtcagttaccaaattcttttttctgttcgtgtgccgtcaatacaaatggtgccgtttgaattggtgaacgaattgacaaaggaaaagctgacattgaccaaagcaaatgaaaatgactgggagaattggataatgaagcgatgcaaaattggagaggccgcggatgttcagcttcagaaagatgaaaattggggcaacaattttaacaatgtggccatttggcttttcagtactgattgcattgggtgagcaattaaaaaaaacatttagttttgttaaataattcaaatttcgcttaattaaggccattgtctccgccatcagcagaagaagaacaagaagcgggacaaaacagcgaaaaagtgtcgtcttctgctgacaattagtgacggacaaacgaacaaaaacggaacggtgatcagccgcagaagaagaaatgaattaattaagaaaataatggaccaatcataattgattagtgataaaatgtatatttataaaaaaaacctctcaaatatattttaaaaattcggattaaaaaccgcaaaatatgtaggttttatgctctaaaaaaccctaaaaataggttctaaaaggaaaataggctctaaaaagtctcaaatttaggtgtgtaaaatgacaaaatttattcaaaaaagtaaaaaaattaggaaaaatttttaaaaacaaaaattctttttaaaaaataaaatttggaaatgaatttttgagaaaattttaattgcttaagggcgtatttataaaatcaaaaataggttctttcggaatttttttaggcatttaggatttaaaaataaaaacctaatagtcactaataactagggaaccgatttctagtgaaaaaactttttttttttgctcaattgttttgaagaaaggagctcaaaaacgcatttctgcgttaaaattttttcatttggacgtcatttttcgtcactagaaatcactattttggcgtttcgtcacttaaaatagtgaaaattcacttttttggctttttgtcactattttttcactttttcgacattttttggaaaatttgttaacaaaaatgcaataaaaacaaaaaatacacccctaagaatcgacctaaaaatttttcaaaaaataccagttagaattggaaaattttcataaaaatttttcccccaaatttttcttacaaaatttttggtttaaaaatttcaatatttgctaaaaaaaaatgtaagaaaggaatgtaaagatttttttgctcaatttttggctgaaaattatgtcactattcgtcactattttggacttttttcactattttggcactttttcgtcactattttagttaactatttcgggatttttcgtcataaagttggttccctactaataactagtgatgctcgagagcaaaaatttcccgagaccgagacttgaccccgagactcgagaccgattccgaacttgaccccgagactcgataccgagacccaaaaaacccaagacttatctgatcaaggaggctgcagatgatgaagcgaaagtgttctacttaaaattagttccttttttgttcaaccttgttaacatatgcgtggcccattcttggttctgttccttacagatccagcagcctgaaccgatccaagcacaaaatttgccagccgaacccgacgaactgagcccacaaacgccgaaaaccgtccgttgttccccaactccacgtccagtccgtgaacggcgtccggttgttcgttactcacccgaacccgtggcaagacgaaaacggaaatgaggacaaatgatttaaaaggggagatgttggatagggatttaaatattttattatgtattgacacgaatgattatcatccatttcatactgtatcccacttcccaattcttcctcatttttcattcagtcgacgcatttcccaattttctgattttggtcttttaaaattatattttcttttctctgtcaataaatattatttttgtttgtcctttggacacaacacttacaacatttctccaacgggaaggaagtttgcgaatccccctacggaaaaagtctgtgccgatctttgaggtgagggtactgcccca

SEQ ID NO: 10401 - DNA, 1339 bp, Heterodera glycines
  unsure (1)..(1339): unsure at all n locations
tgcaggtnncatgattttgtccatcaaaaaattggccattattttattattcattttttggcatcattagcttttggccattcggttgttggacggatcatacataatgtttaattaattaattgttttgtttgttgcccaattcttttgtcccttagctctttcggttgtccgtttgcccaacaatgtgcaggtgcgcagcgaggaaaaacagttggccaaactgatcggactcagcacggacagcctcaaatgtgtgcacaacatttgttctccgtggtcaatcccgtccaaaattcgtggacaattggacattttcaactcaaaactgtggccaaataatgtgacaaattcattttgtgggggggggggcaattaattttaatcggcaaagttacaaggcatttcaagtggtaactgcaatatgttcataaaagggtaacgatcttgaagtttgcaaggcagtgccaagcttagaaaccaggacaaagagacggcaattttaaattttggggcaattttcttcggaatcaggcaaatccgtcgtgcgcttgggaaaagccttagctctctctcaccgtctctctcttcctctctctctcaccgtctctctcttcctctctctctcaccgtctctctcttcctctctctcttaccgtctctctcttcctctctctctcaccgtctctctcttcctctctctctcaccgtctatctcttcctctctctctcaccgtctctctcttcctctctctctcaccgtctctctcttcctctctctctcaccgtctatctcttcctctctctctcaccgtctctctcttcctctctctcaccgtctctctcttcctctctctcaccgtctctcctctctccccctaagccccactgtctgtccctccctctctctcctcgaatttgtaagggaatgtttattttaaacactttcccaatttgtttcggaatgaactgacaattgacatccgtcgctttcccattgaaacaccgacggatggccgtacaaatttgaaaaggagcagcagcagtgcgcttattgaacttggcattaacttcaatttggcaccattgaaagcatttgaaagtgttttcgatgccatcgaacggtgaaaaaaataatttgtggggaaatgaaaaaatggcatcaaatgagccaaagggactttgtggtcttatggagtgtgttgaggacttaattatcttttttgttggcatcctcattaaattggttcccattagtcactggcctaccgtaaccgaggcctttctttttaaaagtcgtttatggtcccgaaaaaaccggaaattccttaccgatttg

SEQ ID NO: 10402 - DNA, 2218 bp, Heterodera glycines
  unsure (1)..(2218): unsure at all n locations
tgataatgggggcatntaatgtctttcaaaggaaaataattacatnttcgaatttctgccgcagggactgtcccaggatttcggctgatatatcttacaattagaagatntagtcaaaaaatgaccagattttggggcttcgatcaaattaaaaaaaaaagtctttttagggtccggccgaaaggcaccgccgggaaaattttagattttcttctcgaatattttcagtaaaatactatttttaaaataaatacgaacacgaacgtcctaaaatacggaatgaataatatccctggtccatacttttgccgctttagccccccggcacaagtgccaatgtttcctttttgctcggcacttgtcggtgcctcgggcaattggccactttcgccctccaatggttcaactcctcctccacccaactgctgaatctgtcccatttgcgtctcaatgtttccgtccgtttgtgcttggaattgcgcggcgctttgaccgaacgcaaaaaattggtgaataattaattaagtacttcaaatttacaaaaattaaattagttggactcggccagagaattgataatggccaacatttgccgcttttgggccaattcaatggaccaaagttcggaaaatgtttcacgcgcagaaattccaatcggaaagtcgggaggaaagttagaattcatcgttgaaataaggcattttgaaaattaattaaattattatgcgattatcacaaacagatttgtgtcaatgccaccaaattcggttggaattttgtgaaatttggtcgaaggaatgtcactcgtactgcaataagagatcactgatcaaaatatgatttttggaattttgttattattttaattaattcaataaaaaccatatttatcatttttgggataagtccaaaagcaagtcaacgacgattttttttctttcaatatgtgaagtttggacgcaaaagactgtgaaaaacgttaactgcgaacgttggattttactcaatattttttagtatactttcacatatttttaaggaaaatagtgaagtatttttgctaagtcaattcgcagttttcatctttttatgcattcgtaaaaaaaagaaaaaaatagagaacggaagagaaatttcttatttgccgatggtcatggcctcatatttcgtcatgatcccattcaattctttgcgcagatggaagccatccttctgcgaagttttctcgagcagtctcccaaccaattcagcgcaatattgtgctggaaaaaagcaaaaaagaattataatattcataatgaacgaaccaaaaaagtgattggtgggcggaatgagccgagtcgattccatggcacaagagttcaactcctccgggtggtggtccggcacgttctccttctcttcagactgtgtggctacttcactttccgccggcattggtgccgtttttgcctcttcttccggtgccaacaatgcctcctccgtcgcattcgcttccgacaattcctcgccggggttcgctggtgcaacttccacactttgctcgggctgtttattttccatttccggcaaagtcatcaattccttggcaaataatttctcctatttttctgtgtttcgttacccaatttgggtggataaatgagagaagaaccaaccatgccgtaattgtgtacactctgtgccgattggtcccattcgtcaatgcccgcagtgccccaagtatcaaaactaccatgcattccatgaaaaagagtgaatgccgatccgtcggaattgtcgctgtaggggccacgggtgcgtttccttgacctacgcggccggcgtctgtccacgtttcggaccagcggcggacacccccacgggcgcctcaaggctaaagtgccggtgccattgtgactgttgccagtgccggaaccaatgttagtgccggtgccattgtgactgttgccagtgccggaaccaatggtactgttgctgatggtggtggcattgtaattgttactggcgcagttgtaagtattgctggcgctggtgccgttgagactgttgctgctgccaccgaggagaccccacgggcgcctcaagccaaaagtgctgatgccattatgattgctgctggtgccggtgccaatgagactgttgccggtacgaatgtcccaatatttgtcgcggtcatagcaagaacatttatgtcgtcgtcggaatcgccactaaa

SEQ ID NO: 10403 - DNA, 2449 bp, Heterodera glycines
  unsure (1)..(2449): unsure at all n locations
attttcacaaattaagtgtgtcccgctcaaaatgcgaaaagcgttggtcgaaataacaaacgaattttgcgatgnccgccaatttccaaatggtggaacatttttacattgtttctgatgctcattttgttatttggtgccttaattcttctggtgagacaaaattaatggaaatctttaaattaaattgtcatttttaattaattaattaattcccaaaattgctttttgagtttttgggccttaaaatcaactcaaaaattgaacaacaagcgaaaatattgtccagattggtggaagagaaaagtcagcacaaaagtcgaatgattgtcttcacgtcggacagagaaattgtggttgtcgaaattagaaataaattaaattaattatttttgcttttcaatttaggaaattcttggcacagcgattaaaatgaaagtgccgaaaatgacgcgacttttgggcgagaaagggtcaattaacagccgaaggagcggaaacggcggagagaaatttggacgaatcggtgccattcacaacacaaaagacgaaggcaaaggcagcacaatttgcccattaataagcgatacaaatcattacaattcaaccgctgctgagaacgatgacggaattattcctccgcctaattttggcgtctcattttggcgttctgtgcgctttcaaaatgttcttggcgttgtttctcttactattgtactcctcctcctcgtccatttcctcgtcggcaccgtaattcgttgccaaaatttggccactccaaacgatgggaaaacggaaacggactgtcatttcgatacggaaaccgataaaacaaaagcaaaagcagtcaaaagcaacggcactggcgcttctgctccttttggcgttgagaacggcggcggagagatttggcaaacggcggaaggacaaaaagaggcgggaatttaaatttgaaatgacttaattagacaaaaagagagtacccgagaatgatacctccttattcattagaatctgttcattaggaaatgaggaaataattctaaggaaagctaattaaatatgacccgttttgctaatgggccaattagcggactttgggttttctcaaccgtaggccatcattaattgtgaaaacgccaattattggatgctgttcctttatttccctttcttcaacagaataatgtttcgttggaaacgtccgtttggtggcaatatttttcggcgccggtcaaagaacaaaggccaaaaaagggtgccgaaattgacgtgccgaccccgcaaaagccatcaattctgaagaagagggtaatgcagaacaacaaaatctatcaaagtccattttaagccttcgaagaaaccctttgaaatggacaaaattcaaaatggaaatgattcagtgaaaagccatcgctttgatcgttttgccaattgtcaattgaacaaagacgttcattttgtcgcaaggacttctgctgctggggaatcagcgaagcagataaagtaaagccaacgcaaaaattgcaataaatttgaaaaaaataaataaaaataaattttagcactttttccgatttgatggcaactcgtttgtccccaaaggtacgaaggaaattaagcctaacttaatggcatttcaatttctaaacttaggaaacgcattttgaattgttcaacgaaaattcgcgtctttttttgattttgcgacatccgccggacaaaaaagggacaaatgaacaacaatttatggaaagtttggaggagaaaatggcgaaacgaataggtcaaaagtcgaattaattaattgatgagtaaaactaacggaaattaagcagaggaaaactgttggggatggtacagtaaccggacaaataacagtgacgagggacaccgtaagaagacgaccaaatgggtacggttgttggccgccatcgaaaggcgacggacgaacaaaacgacgccaatgaaagcgaatcattcgaagaaagcaatcggataatttaagaacaatcatcgtcattttaacttgtttttacaaataaatttcaattttttgttcgcttctttcatttttaataaaaattaaatttttagtaattaataaaaaaaaataaattcaaatgacaaaattaaaaaaagcattccatgggaaaatttaatttaattatttttttcagacaattagcaaaagaaagggcaaacaaaaaaaaagttgacgcagtgtcagtaataaaattaatcattaagtaaattgttctgataattttcacctgcccaaaacttaacgaaaaatcatttcgtagcaaaataacacaaaattcaatcactttatcttanatttaataaatactttaattttcactctaaatatcatttttcaatgaaaattttaattngntaatgaggtacttttttgggtagcggcaacgcgtgaaatcccccgggg

SEQ ID NO: 10404 - DNA, 4659 bp, Heterodera glycines
  unsure (1)..(4659): unsure at all n locations
ttgcgtttgttggcatacgaagtgtatatgaagatgaacgaaacaggcaaaacaaacagtaaaagaaattgaaaaacgatgtttatattttataggaattccttgtgacatgattacgggtgaaaatcgtctctttgccgttgactcggacaacccatccgcccacacttcagcaaccatcgagataatgtccccagagcatagaattgaactttgtgtcatcgacgagatccaaatgctcagagacccacaaagaggtgctgcttggacaagagcactgatgggagcgcctgcggatgaggtaagaaattgggacgtaatcgtttttaaaaacatttttcctttgcgatttatcgggtttaatcaattttttttagttatttacagtacgaataaatttcttttttaaacaaaaattttcgaggttttagttcaaagacttaaaaaagacgatttccttttctgcatagctttttaaagaaaaaacatagaaacagtattatttctagagaccgagatttcatttatttattttttgcctattttaaaagaaaaactatccttcattttttaatctaaaaaatgattttttaaattatttagttatattatacattaattaaaatttactgatttttgtgtggaaactgcccgccattgaaaaactcgtttgactggcttggagaagccggatccagactggttgaaaacagcagtttccgggtccggcctctaaaaaatcagtcaaaccgggtttatatattttcggttttctccaagtctatacccatatgcttgttttactatattcagattcatctttgtggtgaagaatccgcttatgatatcgtctgtcgtttgctggaccctattggtgaacatgttgaccttcgtcgatatgaacgcaagggcaagttggtcgtgatcgtaacccacggacttcgtgatctgagctcaacaaaggtcgtaatattttttcattgtgttatttaattcaaattaatccatttatgtttaggatggtgattgtgtgatacatttttcgaaaaaaggcattctcgacatggcacgccgattgaaatttgaatacaaaaaagaatgtgctattgtatttggagatttgccccccgaggttaagcgagaacaagtcaaacggttcaacgaccagaacgacccgtgcaaaattctgcttgcaaccgatgcaattggaatgggaatgaacttgaacatcaaaaggtcgcttttctttttaaattgcatgggtcaattaatctttgatatttttcagagtgattttcacaacattgaaaagtcgtgatggctctttgctccccgcgtatttcgtaaaacaaattgccggcagagctggcagatacgcgtcagcatattgcaccggcgaagcgatggcgttggatgatgctgatgctggactgctcgagaagctgatgaatgaaccaattgattccattgaccaggccggcattttgccttcattcgaccaaattgaggtgagtccacgctctttttcattcatttattcagaaccctttaataatccattgaagatgttttcctttcacttgccccaatattcgctgactcaactgctcgacatattcgtttcaatttgcacagttagcgaaaagtactttctgtgtttgaatgactcaattaaacaaattgcgcaactcattgaacacatccaactttcacttagggttctcttctcatcatacaatatttataacaattttcagcaattaaggaacgttacattttctgcctcaccccaatcccttccggtgctcacccctttcttaactcggcttttatcaaaatggtccgacgttattctgagggcaatgcaataactttcgcatggatccgtcctttggttttgcctgagttgcgaattgtcgacagagtcgacgcggtcaatcgacttgttgacgtttacgactttatgggcgcgtacctttggcttagctatcgttttgaggtaacccttatttgaatagcaatctttacaatgtnttctcaatatttaggaacatttttccgaccgagacaaagtccgcgagttgcaacgagaatgtgtgggatttattcagaaaagcatggacaaaatgttatctgagtatggagaggaggaggcaaagggagcgccgcgcaagggaaaaaggagggaaaacagcgattcggagtacgaattgagggcgatgggactgcacaggaacagctcgaaaaggcatgacgacactgtttccaaagtggtaataaacacatacttaaaaatggaatcactttgtccggtttacagcagaaggaaggcctccaggaacagttcaacgcgctaatttctaaaatgcggaaacaacggaagcaagtcaaatgaagggttcttctgcttaccactcattaattgttatctcattgataaattgttttgtttgaaaacctttttcataaataatcgtcgattacgattgaatgcttctcatttattgattgtttttaccgctcattccttttttcaaagcatggaatcgtccaatgaggagcagcagcttcaggaaattgaggctttggaggtgtaactattttttataatagataattttgtttaaaattttatttagtcaatgtattccaacgaactgagggttttgtgccgggactttccgaatatcagtgtcgaattggatgtccgccccgatttggtttgctcgttcaatggataattaactattagaatttactgattaaggacgaattcactgaactcttcggcaagagtgtcatttctctgcgcgcaacttttccctcggactatccgaattgtttccctgtcatcgatttgccagattttgatggggacgacgatgaaaacacacttcagaagactcagttttgggatgaatgtgaacggagagtgaggtcggaattggacaaagtgatggaggattgtgtcgggatgccaatgcttttcacactgctcggcgctttgcaggttcaaaagctgtacgtttcagataaccaatccaacaaaacaggaattctttgtccaaatggcagatgattaccttaaaaaccgtgatgaattggagaggataaaagcggataaaattgaacgcgaggaacgggccaaattcgaaggtaattgtttaaccaaagcgagtaggacagataattttataattcatttagggacgagagtgacggtcgaatcattcaaaaaatggaacgatgcctttttgaagtctgtcagagtgccacaggaaaaaataaaagtttaaaatgttgaatttttaatataataatcatctttcacctacaggacaatcagacgacaaagagaatgaccggaaaacagctgttcctttcggacaaatcacttaacatttccgatttgcaatttattggaaatgccaaagacgaaaatgtagttgaaattgaccagtctctttttgaggtaaggaaatcagtgattaacaatcattgaaagctgttcaaatttactaaagggcgacatcgatttcgacgacgatgatgaggattacaaccccgaggctgatgttggaccagaagatgaaagcgaataaagttccacattatttatttttgacaaattgttattttcgggatcgctaatgaatccggcacccatttcgaccaattccaagctcaagaaaattcagatttgcaaagaaaaaaaagaatttttcttaaatattttatttataaaagcacactttattggtcccataatcggtgtcatggcaactcgtatacgagttgccttttgtacgagttaggggtgcaaaataatttaaaaatttattcctcataaattttatcggtggtttttgcaatttcaaatcaaaatttctcaagtttgacgaaaaatgcccgggacgcccggtaaaacggcctttttttgaccgggcccggccaattgtcgaagcccgagcccggtcattttgccgggctaaaacgggcttaaatttcaccagcgaaactgcccaaaatttgaaaaataattattatttttggcgaaatgtctttaattcaaattttcaaaatagcatatatcatcattttgacaaaaattgcctaacattataaaaaaaaatgagtattgaaacgaaaataaaaaaaacataaaacatgaagaaacagcagacactatgagtcagacactacactaaaagttaatgaaaattaaatgcatacaatgcgccaagaggaaaaagtgataaaacagtcgtttttctgaaatttctaatgcttataacttggccattaataaaccaaatagagcaattttggtttcattttgaagagaaaattctgaagaacatgtctaactatcgttttttacgtgtaaatatcattttttgctggaaaaggaaagaaatttattgaaatatttgctatgctaaaaaatttttccctatgcacagattttcttcaaattttgcataggcccatagtttgaccccctctatcgaatcacagtttattttttagctgtctagtttttaactcgagatcggctcttccatttttacaagggaaaatctcggcaaaatttttaaattagtggggttttttggcgttttgtccttaggcaatttttgcaaaatgatgatatatgaa

SEQ ID NO: 10405 - DNA, 1851 bp, Heterodera glycines
  unsure (1)..(1851): unsure at all n locations
ccccccccccccttaatgcctccccncatggcagccacctgtgagtagccgccgcccgcggcgccgcctttgatgccaaaggttggcccctgcgacggttggcgcatgcacgcgaaagtgttgcgacccaaatgggcgcacaagctttgcgcacttaaagcagccaattaaaaaatggagcgttgaaaaggtgtgtttgtggatggaatactgtaataatttttctaattgagcgccgccccgggggcactaactgagaaaaatacggtagtatcaatgatcgaacaggctgacaattttggcattactaacgaaatcacatccaactgggggtgccatcaaaagttagggccagggccggaattcgggacgagactaatataggtcgggatggccaaaaaaccaggccagggttcgagacgataaaaatgtcgggttttcgggtctcagttccgggattcgggcggtaacccggctccggaataccgtaaccacacttagtaaatacggaaatatttagtgctgtatcgtatactatacatacagtccaacggtggtggtggatttgccttcgcccaacggagtcggattgatgccggccacgacgacataccttcaaacagaggaaggggatttggataatgttttaggtttttggttaagcacagcaagactgactcgtcctcgagaatttaaattatttagtgaagagtttggagacaaaaaatgattttaaatttttagaatatttttaaaaattccatcaaaatgccggatttttaattttcataaataagttcaaagcccccgccggaccttccgctcttcaaaaaatttgaaaaaatagcgcagcaaaataaatatgaaatttagatactcaattaaaaaaaatatatttttttaggaaaataaaaaataaattaaaatttcgctctccgttttccggcattttttggcgccgaaattttcaggcaaaccccctgtgcctacggtaatttacggcagcaaaatcgagaattatcaaaaagtgggggctatgctaggcctaagaggacgaagccatgtgccaaaaatggttgttgttggcctaacattccattcgggcgctccttgagacggttgagcactgccaacgacactttggctttgctgtgcccgtacagctccaactcggactgggcaatgccaacttcggccgccagacgaccgatcgccttgggctgttgtgcccgggaaatgtcaatgtcagtgggcacgggctgaacagagcagggagagaaagaaatgatcagaaaatacggatttattggagagtaagtattctttgatcagctagtgatcaaaaatggtagaataaatgtaaagtgatcaattgctcttcgatcagtagtgatcacagatgatggagtaaatgaaattgatcagtatgataaaaaaaaatgattgatcggctgatgagtggtcaatcagttcggaccaatcagttagtgaagttttgtgatcagagagagttaataacgaaaacaagtgaaagcgctctgatcggtatcagactcgaacaaattaaattgattaataattgcgataagttttaagttctttgatcaataagtgaccgataaaatagaaaaaccggatcagcaaacagcaatataaacggaaattatgaattagttatctgaatagactgatcaaattaaacaatcagtcttagtggaataactgatcatcaaaaccaaccgaagacagatcgagcttcaacgggtaaagcttccatgcgttcactgcgcggcttttcacggtcccatcgggctcaacacggccctggaggaaaatggggggggggggggg

SEQ ID NO: 10406 - DNA, 1303 bp, Heterodera glycines
aaaagccgagagttatcgagtcgagattcgatactctggaacaaccccaagactcaagataccgcaaaaaaaaaacgaaactttatgagtcgaggactcaagaccgggccttgaaaattgatgccgagacagtaaaagcccgagactttactcgagacttcgacactctcgagcatcacccagtgctgcttacgttcagtttttggcacaccgcctggaggaaggtgttgcggacgagcattgccacggtcattgggccaacgccgccgggcacaggcgtcagaaagccggccaccgccttggcctcctcaaaattcacatcgcccaccaggtgacgcttttcaccatcgctttgcaccacgttgatcccgctgaagcagcaataaaattgcgcgcgagtttttggcgaagaattttaatttaaaaaaatcggcaaaatgttaggcccctcgggtgggcatcgaacccacgcctcctgacaacccgccagcaaactctaccatttagctaccgaggcaaattagcggagttagggggtttgattataattttttttttttttgatttttattttaatttgatcttatccttaataagtataaatgaagaagaagatttaaaatataatgaatctgaatttttaggaacactatctattaaggaaaaaaaaaaattaaatctatatgatcatgctcgatttggtattggaaatgatcagaatggatcaagactttgatcgcaatcgaatttcggacgggtccaggatttggaaaatacgtaaatccatattttactgtcctggtagtatttcttccgaaatgtcagaacccggcatcttgaccgatcccgatttataaacccaaaaataattaaaaagtgaaagtgttcggacagattacggtaaatgatccacaaacttattggaatagttcaaaaaaaatttgtttgtttttttgtacttttgggcacaaaatgcagcattaattatcctgtagcggttttaatgaaaaaaatatgaatatgttctcattgggtgctaacattttctgttcaagagtctcggcgtcgcctatcagatatcgattttggctgttattgataagaaatcttgactaatgaagttggctttatcagtcagtaacagtcaaaaaatagatctcggccctgtttattaaaatccgagtgggatcgggatgccgacgataaaattgggatttgaaataaatttgataagctactttacttgattaaaaatttattgttagtaaaaaaaagggggatggctggcagattaatggagtaa

SEQ ID NO: 10407 - DNA, 1681 bp, Heterodera glycines
ttaccatatttttgaaaaatggagggaaaaagacaaaaaatattaattttttggcgaaaaattttgtaaaattcacccccctaattcgggatttcaaaaaacgaaaaatacacccctaaaaatcgaattttttacttcagcccccccccccccaaagccaagggctggctacgccctccccctcccgaaaaattattttctttttcaaaaaaaaaaacatagaatcaaagtgatctatttatgatcattgtaaaatccttttctggatttgtttccgtgccaattatagaaatgcattaacaaattctcgggccttacttggacaataatgccatcagttttggcatccgtgttcaatgactcgaccaggttgaccagctcagcttcggtgctgtcgctgctcaacttgtacagcttggcatcgatgccgacctccttcgctttgcccatctttctgctgatgtaacaggacgagtcgctccgatcgccgaccttcaattaactaattaatgaaataattatccgttgaatagacaaattgactaatttggcggtgggggtcgattgggcgccgccgattgggcgacgccgtttgggcgccgccgtttgggcgcgggtacgattgggcgccgccgattgggcgccgccgtttgggcgccatgcggcagccaaatttttcgttttcatattatccaaaaacgtaaaaaactgaaattactacaaaaatttctagccattcacctgaattacgagaaatagcactcaaaaacgtaatgtttatggggttaaaatctatttgagtcacaaaattccttcatgactccttcttttttaatggcatgggtcctcgaaattatgccctgtaacttaaaatttgaagctgtccttgaaaaagaattcgagaaaaacaattagtttatataatgtttttaatcatctacattcttttgaatagattttgggacaacaaaggttgatttgatgaaaaataaattttcgtcttttatttgaattcgggtccgggattcgaaattggtcaaaatagatgtcagatttgtgatcagcgacctgaaaaccccctagaaatgttttaaaaaataatttttttatggtttgtaaagtgcatacataagtaccctgaaatctttcaaaaaaattttcctgctgatcggcaaccgccggaaccaatgttcccaaaaagttttttgcaaaaagcatactgcaaaaaagtgcacatgcggtgaaatgaggaaactgatgaacagaaacaaaataataatgaaaatatactacaatcatttttcattgcatattataatttttttgtatccttgaatttaatgaaactttcacgttacgtccttgtaaattattatacccgtccttggaaagtccttaaccctaagttgaggcaaggttaatgaatttaaatttccccatggcgcccaatcggcggcgcccaatcgtaccggcgcccaaacggcggcgcccaatcggggtcgcccaatcggcggcgcccaaccgacccggtccgatcgggctacagagatacattcatactaaggtctgatttttttgaattctaagctcagatccatgatcagcgtattttttcaccttagaaaactcgaaaagaaaaattaaatttatttttcgcagggacaccaattctccagtatta

SEQ ID NO: 10408 - DNA, 3169 bp, Heterodera glycines
  unsure (1)..(3169): unsure at all n locations
caaaatnttagaaactgggcgcaaagcgcccataagagtccgcttagtcgctaaattatcccctattattttcgatcaattcgaatcgcttcacagcctaggtagcgaagctcaagaagcgcgcagcgctttatccccactaaatacccaacggttcacgcacccactagttatctcattatatcattcagcacactattggctaaaaacgtcctcattttttgaaaattgtttataacttggagaaatcactggccgatcaattttttggctctgccgccattagctgactccgaccgatcaatttgtcggtcctgtcttctttagcgatcactttttggctctttcttcgagtgtcaatcactttttggccatatcttctattgcgatcactttttggcccagacgctgatcaattcgccccatttaaaaaataacaccccaaaaaaggataatttttttcgaaattttggaattttaggtattttgttcgcttccaaaaattttcaaattcaaatagaatgagcgatcaaagatcttttaatttccattttcttttataatttaagtcttagtgccattttcattccaaataattggctcaaatttcatttctttaggcccaaagacggccaaatttctcagctttttggagcagttcacactgtgcacaatgttccgcatttttggccgtttcgtcggcacttatcccatcgcatttctgatcttctcattgatccttgcttcgctgtcaggttgagcaaagttgcaaaaaatggaggccgaaatttagaaaataaaatggaaaattatagtttgcttaggttcatttcgctcatattaaaattcaaaaaatattcgattttttggaatttgagataataaattccatttcttttctatgaatctatttattttttaaaacatttttaaatattctcgaatatatacatacaaatttttaatttaatggaagattttttaaaaattcaataaatttaatttttatagaaaattctagattccgagccattgaaaaagcctatacctggacctgggttccatgttgacctggacctggatttcctgggaaaaaattttgaataatccatgtccatgaaaaatcctgccaaaaaatgcttggacctggacctgtttccagaaaaattcagacctgggtccaggacgaaaccgagaaaattcgcattttccaacccgccatttcctccttttcatggcatccggtatgaatttttgcgactttttattgtcaatttttaaagcaaatgaaattttttgcctaaattttgaaggcctttttattgttttactagcaaaataaataattttattgttattataagacaaactgaattcataaaatgttaattgcgccaaattcgaaatttggaaaaaatgtaagtttcaaaaacaaaagccgaattttcatatttttgaaaacttttaactagaaaaaattttcgaaaatgtaaagccttttacaataaaaatttaatacgaaaataaaagtaggcaaaagcaaaaataaaaaaccaaaaattttccaaaaaacttataattttaaaaatttgaaaagctttacaataagaaaagtctctatttaaaatataatattacacatttaaaacgctttaccatggaccaaaattgaaaataatttatttttattaaaatattttttacccttttttctcattttaaaattttacacaaaatgccccaggcgatcccctgctgaccacagtgatgctgcgagcgcgcgaccggcacagcatgcaccggctccgttggctggacgaatgcgttcggatgcacgactttttgcgcctgaacatttccgccaccgttgggggacaggtgaaaaagcagctaaaaagtgccaaaatatgacaaattaaatttcacccaaatgccaatggccccgaaatccacaaaaaatttggcagcattttaatgtaaattcggccgcatttttaaagttagccatggtccccaaaatccagcaaattggattttctttgaataggctaattctttaaattaaaaaataaactatgactaaaactcccctattttcgggttccatatcccaattttgaacccgttttcattagtaaattaggggcaggcaggcttttgcattgaccgtaaccaaaaatgcatattttcgggaatctctatgcattattccgcatttctttcaaactttttgagcggaatgatgactaaatccaaagttaccctcgaattagggtcctcgccatattcataatttctcgtaaaaaataaaataaatttctattgctcaaaatccacaattatccctctggtccaatactttgtgatgggtacggttttggcaccgtttcccccggcattttgggtgttgcccaaaatttgtttcaaatgccacgtttttcgatccaagacagcataaacagcgagaaattaattggataacagggggcacaaatgttcaatcccctttaatgggggataaagcttggtgggggtaggactcaatttttcaaaccccctggggctctatttcacggggactctaatttaggggggtcggctctattttaggaaatatgctatttaaaatttactcatttttcatttttgcagttgactaacgtggtcaccttcgccatcggcgccttaacaccaaccccgggtttgtcttgtgattgtccgccgaagagaagagggatgtgcgaggaataattttttgccggggaattgagccgggaataggcattcgcattcccgagagcgataccctataaatcagcgaagaaaaaccaataaaactgactcgagaaaggggcacaaaaaagagctgggaaaataatgactctgctagaattggtccagaaaatgacaaagacaggagcaccgagggataaatagttcgttagaaaattttaaaaaatcttccaaaagctagtggaaaattcttagattttgatatttttaaaattttctcgggcggaacgatgtgcttatttgttagctcgagacccaacaaggattagattgaagcacgccgagaattggttgaccccgcgcatacagatggaaagaaagacccaagaaaatgtcgacagatttttcaaaacacattaataacaatgagaattaa

SEQ ID NO: 10409 - DNA, 3529 bp, Heterodera glycines
tgcagttgtgcattcaatgcaatttgcaaaactctcacatcacgtgtttcagttgtccattcatttgccaaaccagcagcccgttgtatacagggccttccaactgggtgagtaaagctgaggaaattcagcgcggcgaactcccagagacgccatgctctgcctattggaagcaatggcaaaacgaatggcagcatgttccttcgctcaaggacatgctttttcaaaaagtcccagagcaatttcgatgggcaaaagaccgttgggtcccatataaaaggaagcctaccaagaggcccccaatcggtcgtgttgtacctgtccctccaaaggacattgaaagatttgcactttatgtgctgatgcgtcactttcctggtgatcccgaccacttaaaactggtcaatgggcagcagtacagcaccttccaggaggctgctttacagcatggtcttcttgaagatgaccaaatttggcacaaaacgcttggcgaggcagccttgcatcgctggccggaccagatgagatggctcttcgtgagcatcctcgtttttgggcagccaagcaattccctggaactgtggaacaagtacaaagaccaaatgtacaatccacagggcattatcagtgcggctatacgccaagcacgggagcaagaagcgctagccgacattgattggcgattgcacttctttaactcaagctgcttgcactgtggcctcccagatccaccaaattcaaaagccaaaaatatcaatttggcagttgaagaagctttctttggtgatgatgatctgaatatgtcgcctggccagcaaaatcctaggcagcagcaaaacgctccacctccactcaacagcgaccaacaaacggtctttgatgctgttgttaaggcaattcagtcggacccaagggatccgactgtgcctcgccgtttcttcattttcggcgatggaggtacaggaaaaacattcctgtttggccaaattatcaaccgcttgcgcaagcccccatacacctataaagtgcttgctacggcatccactggctgtgcggctattttgctgccatatgggaaaacagctcattccacgttccgtctcggcagagaagtctcgctagacaagcttccaagcattccgcttgaaagcttctttgctcgacggatacgtgaggcccagctcatcatcattgatgagatcaccatgcttcataacacggtgattgcggtaatcgaccgagtgtgcaaagaaatggcaattcgccagcacaaggacctcctcttcggaggaaaaacggtcatttttagcggtgacttcaaacagtcactgccggtcgtgcctcatgaaggcttacccgctcaggtgacagcctgttttcaaacatctccgttgtttggacagttcaccacgatgaaattgaccatcaaccagagattgggccaaggccagcaagcgtacttgcaaatgtgccgccaaatcggccttggagagaccggagaacacttctggattcctccgcagttcctcgtaaagagcagggaagagttgatagactttgtctatcccgacttccaaaaactccttggaaatgacaaggaactgctcaatcgtctgatcctcgcacctcacattgacacgtgcgatgagatcaacgaaatcatgatggcgaatgtgcctggtcaagtgcgcgaatatttgtcttcggacaagccgcttgacgagcgtccactggacatcgatgaaattgagtcggaagtggcagcgttgaaccggcgcacagactctgggatgcctccccaccgtctgcgacttaaggtcggaagcgtcgttgttctacttatcaacaaaagtgataaggaaggactgatcaacggcacacgcatcgttcttgaagaacttggcgacgatcgtctggtcggtcgcgtcattaacagcaacgctgttggtggccaggttaagttcttcatcgaaagaacacgaaatgtctacgaggacaaaacgcctggcggcttaaaatatgagcgtttgcagtttcccatcaaacctgccttcgccatgaccattctcaaaggtcaaggccaaacaatcagcacggtcggaattgacctcgaaagggatgtattttcccatggtcaattgtacactgcattttcaagagcaacggacgggagcaacgtccgagtgtacgctcccagaagggagaccgatgcacaagacagagtcaaagtgctgaatattgttgcaacgaaaatgctcaatttgcaataaagcaaacgagttaggtccagcgcgtgcacactttaagatgtcaccccgttctcatctgcacttaaaacggacacatattcaaaaaagtgctgccagctggactgaatgaggcaggtgggccatgacgtgcgagttagggcacttccggtttccattgcattgaaaaatgcagtgtgtcaaggtgaaaccaagtgcatgtcggctgacgcaaagaccctaacacaaggcctaggtagcgaagctcccaaagcgcgaagcgctttaagaaccaagaaacatgtaagcacacacccgctagttcctacataaaacgggaacaaaaaataaaatatatacaaaaaaaaaaagatttttttgtgcacactcccagtctatatttaacgcattaaaaattaccgtaggacaaaagaatagaagaagagggtggtttattttcctaaaattattttttatttttggttcatcatttatgtggttattaaaactgcttcttattccaatcatttcattcctttatcgattaagttggaccacaacaaaaaaaacggcagcgtactgcgcagtaaaaatagcgaaccaatcaatacctataaggtacgggattgatgcaaaatctcgagtgccctctcgagtttactgtttagcgggagagacctaaaaatacgaaccttttaattgggggaaattgcgaaataaggaaccaatcaagcattttattgacaggttgtcagctgacacctggcatgtgactgtttttcattgacattgtggaatatttcgttgacaaatgttacattttcgacgcacgggcagaatgtcacgtgtctattgtgaaatatgcaacaaaaaaaagtcacgtgcagattgagaaatatgcaacaaacaaaagtcatgtgcagattgcgaaatcgatggggaaattgcgaaataggaaaccaatcaatcaattttgattgacaggtgacctaattcggtcccttattgcgaaatagtcgtaaagtctaggcagattatcaaataatgggagagaaaaaagaccatttcagaaaacaaatttcaatttaatttatttaaatgaatttttatttattcaactattgtccaattaatattactatatcttacaattaattcgaatttcattgacaattttggtgcttatcgatttttttcacgactcggaatcgcggcgcatcgacggagcggatgagagtggcggtctcattatcgaataattttatcgattttttttttgcgcg

SEQ ID NO: 10410 - DNA, 1516 bp, Heterodera glycines
ataaattaaatcaaattttttattcaaaaacctaaaaaaaaacaaattactattcgccgctgctttgtttgcttcgtaacggaacattgccgcaaatacgtcggaaccgcagttcaaaactgctcggtgtgctgggataatcttaaaacagaataaattttgaaaaataaaataaattgacaaaaaaaaaaattagagttgtacgggaccgggaatttttgccaaaaccgggaccggaactgccaagacctgagaagccgggaccgggacttcggcttttgtccgggaccaaccgggaaaaaaatacaaaaaattaaatttatttcaagtgaaaatagtaaataattaattttttgcttgctttttattttataaaaccaaaagttaacgcaaatttaaattataatatatttaatcaatattgcaaagcaaatttattttaattatttcaaaaaattacgcatttctttaaaaaaatgttaaaatattgtgaattaaaaaaaaatatgttgaattatttttgtcaataataaacccatgaataaattcaaaaaatttttaatttctgccaaaacttgcctcttttccgtctccgtcgcccaccaaaaagtgcacatccgcataatcacccgtgctcagcatcagcttcatccgatcaaccaacaaattggccataataattagtgccgaattatgagtattattagccttaaaaaagcaaaaagattttttgacttttgaaaaagttattaagaaaaaatttcaaaactttgacttttttttttttttgctattttgatgctataacttttttagcaattgttgatagcaaatcaataggttagaaatagcttttaacatcttaagagctttcgaatgataccaagattgttagatttggatgaacaagaaaaatgttatagccaaaaacatggtggggcctttttgcgtggggcccggcccaagtgctgaggtaaaccgctattttcacgttttataaattcagccaaattaggaaaaatgtaaaactggaaaagctaacttttgagtccgagcaaaacaatgaaaaggggaaaatcaattaagggattacaattaaataaatgcaaagaaaatgaaagagtcagaggaggattaatctcagataaatttaaaaaatttataatttaatggagaatgaagagcgagagcgaggaaagggaaaacaaccatttttaatgagcaatcggatcaatgcctgatcagtgatcagacattgcttcgttttggtacgatttgataactagaaaaataattttggtcaaaaaatatgttcaaaaaattaaaattaatttctaaatttataaattagtgacttgaacttcctgctggtgactttatgtttgatcaagttcctaatcagaggccaaagcttccaatccacttcaaataagtcaataaatgttttttagtgtgctaaataaaaactctctctaattgaatgaatggaattaccaagaataaaaaaaagaacaaa

SEQ ID NO: 10411 - DNA, 4096 bp, Heterodera glycines
aatgcaataggaggacacttgttgcaaatagtaggcaccaatccaaatggcgtaataaaagtacggatactccccgttgggttcgcctgaaaatttgacaaatttattttagaaaaaaataaaattttaattgtaaatatgaaaaaaagaaattaaaaatttattggaaaattgtgatttcgtttctgatttttatttgtgtgtcgttttagagagctgctcgattcctgcccgcaattcctcgcccattaatatatttttatttcaagcttagaaattttaagatttttttttattagaaaattcgaagaaaaaaaaattgtagaattcattttttgaagcttaattttttttttaagtttattaatttaaaaaaagttctcggggtaaagggaaatgagttgctcccattgtaaaccccaatgcattaatttcttcgcaaattattaaaaatttatgctatttaaaaataaaacccagccctatatttttttgcttacgaaatgacggtgtccagtagacgagcagtgccagtgccaaactcatcaccagtcggtacgggtacgcccacaagaacacgttcaacggcttcggcccggccgtctgtttgccgagcacccacggcagaatgatttgcagcggagtgaggaagatggagcgggacgcaattttgtccgtggtcagcccctcgttgatcaactgaacagcagaaaagagaagttaaattcgcaaaaataaagtgtttatttttggaaaatttaagaaaatttatagcgagagttcgtcccccccccgtactttttcccccagaaatcaaaaaaaaaaattgaaacgaaaagttaaaaaaattttattgttagaaaatgtaagaaaattcaaaagataaaaattttttcaacgattttttggagtaattcaccataaattttcaaaaaattttataaaatttttcttgtaaaagttccaagaattgtgtttaaaaaaatttttcagcgggaaataaacgggggagggagtggtggtggtaatagtggacccagaaaaaaacaaataaagtttttgtttataaattttgtaggccaccttaaggtccgtcatgccatctgtggcggcaaaagctatctgaaaaacggaaaaaaactgtcagtcaaatccaaattcaatctcccatgttggacctttcccgtgagcagcacaatgaccatgatcagcatcggtttgaggcacaaaattttgaccaacaccgcgtacgtctcgaagacgcccagcgacagttcctcgtcgttgttgttgctgtcactgtcgtcgtccatcggattgtggtgaccattttcggccttccttaaaccgtgtcaaaaatggggaaattaggcaaaaaaaaaatttttttttactcgtgcggttgcgagacgacggagtggtcaatttcatgcttgaaaatgaacaccaacgtggtggtgacgaggaacacaaggccccaaaagaagacgaaccctgtggaaaaaatggcatatttaaaatttttttaatgaaaaatcaagtcgattttattttcaaatttaaactcagaggaaatattggacccttctttttaaatatattttcgaaacatgtgttgaaacgggtcaatgccttttgtaccgctgaaacagtaccaaactcaaagcattttagaaagaaaaaaaaaataacgaaagaattttttttaaataagcaaaaaagaaatatttgtgaattttcaaaaatgctctcgaaaaaggggcgcggtcgcccccgaaatagaaaaatggaggcggaagagcaaccgcaaaccacacacagttagtcagtcgtcaccaaacaagttcggtgacagtgctttttctcctccagtgtttcgtcacttccttccactccaaccgccctcccccctccttaacaccattcattcgtttcccatcacttgcagcacaaagggttcttctccccgtttaatcacccgttcttccacacaacacacatgcgcattgcccacacaaattccaagtttcgttttccacagtcctttttcacccataaatattaatttggttgaaattgggccaagatacgaatttatatgtcttatattttcttgttttcctaccacatgcggtttttaggaaacgatctagcacccgccccatcctcccaccatctacggattttgttttgcattcttcgctctgcgcatgtgtccttgaggaaggaacaaatgtcctccggcaacgaaatgatgggacttgggggtgggcttttgagaggggcaaacaggctgatttattcattccaaacattcacacaataacccccacaagttggctgttgggttttagaaagaaatttaaatgcaaattttacccatttaacgatagaagtagaaaatgacaaccaccaaaagcagataaatctctgacaaaatgccatcaatttgcccacccattcgcttcccccgcctcgcatttcttgtgaccacactcaatgcagaagagtttaaattcaattaacccacccagaagtagcacactcattaggcattagttggccgttgtggcaaaatgccgtaattcactcgttcaaaaaatcatgaaaaataattttccggcagactaaaccaacaaagttggtcccccaaatgtgccaaacctacttcctttcccaacaatgaggacggacggtaaattggaaattagggaactgccgagcccatgtgggtcgcggattcataaactcgaggaaattagccacccaaacagccaaacacacacacaaatagtgcgctcgctcatcaagcccaacaaatggcccataaaattgggccaatccatggcacacacaattgctgacatcattccactcgttatgtgtgtgtgtgtgtgcgagcgatgtgcaaaaactttttttccgccatttccgtttaaggcatcgaagtccgtccgttcgtcccaataatcccttcgccggtgtgtccgctgctgtggcaccaaaacaatttgctataaaaccccgcaggcgcccattgttcgccatgccattccttgttgctgttggccaattactgcacattgacagccgaatggcgttcagccgagcactgctcattgtgctctccgcctcgctgacactgcccatggaaacgctggagaggagcttcagtaagtgcaaaacgagtggaagaaagcagaagcgagtagagggccatataatcaattgggtaatttttgaggaaaattaaaaacaacaaattttcagatgcatccaacgtctttcagtagtccataatttcatttaaattttttcaatttttgctcaaacaatctcaaaaatggagctgctcccgtcttctacaaatatgagtatcaagaagccagacccgtgtccagaaaaaaaaattcaaaggggttccatttttttgttgctctcctcttcaaaatttttagtgcaaattttgaaaattgaggggatacattaaatttgtacgagttttctgcgatttaattaaataaaatggaattccatgtgattaaacttgaaatacacagaggacaactgcaagtcggaaaaattgcgcgaaatcattctggagacaatcggactctatccccaccagtacagctaccaagcaaggtattaccgtattgtaataatcccttggacaaataataaatcggtcgtattaataaaacagacacatgaaacaagtgtcggaaaatcggtttggtaattggtggagcgcggtgattatcagtgagaggggcggctacggcatgagtgccatttatgaccaacatcaaaacacaaggcgagtggaatatgggcaagggatgagtcaggcaaaggccaggcccggatccttttttgacggaaggtagaaaaaagccggaatttatcggcaaaatgtacaaatagacataccaattaacatttaccaacaaatggttttaaaaattaatgccaaaaataaaatttgaaaaaaacaggaaggaggagagaccgacaattttttgccggagaaaagtgaattaagtttaacttacgttaaaaaaacttagattaaatgggcaaaaagcaaatttca

SEQ ID NO: 10412 - DNA, 1606 bp, Heterodera glycines
aaaaatgaaaggttgacagcaaattgggagcagcacaaagacagcggtcgaagagcacattcaattgttttttgcggaaagttaacaaaaagaatttaaaaagtgaaatgactcattaattcggggacaatttgctaatttgccaattttcgctgaatgaatgaatgaatggatgagtccgagccgcataaatgaatgagcaagtgaagtcgtcggtcggtagatgaatgtgccattgcccaaataaatatgcgagacgcgccaaacaaaacaattgggggcccagccaatggtggcattggcatgcaaaacttggcacgcgcaaaggaattttcggcacattaattaagggtaattacgcggggccatttccgcctacggttttggcgctcctttaaggcaaaaaatgactttgccattttggctcagagcaggaaattatgccaaactttctaaagctaatgccagaaattaaattgcaagcccaaaataaacttgaaatttggtcaaattttccaaaattatagcccatttattcacacgataatcattttagttgtcaaacgcatgccaaaaaaataaattttattataaatttaggacttggtagctattttgatccaaattaattaaaaggccaaattccattaaaaaagcattgtgccaattgcctaatttggccgttttgcgcggcattcgccacagaacgccccgggggaaataaaaacaaaaaaaaaagaagaaaagcattgccattgcccaataatacccataattcgtgaccatcaaacccatcataacataagcattgctccgtccgccgtgtgcaattccccgtcatattgcccctcctcctgctgttgctcctctccgctcgtcatgttccgtctcattaattgcacttctcctcatccccccccctcccccctccgtcatcctccgcccattcatcccctccctccgctccccttcttcccccttcgcctccttatccccaaaacaacaatttattcattcttcttgcaatccttcacatcgccgcagggcgggcggggcggaagatgcgcgtcggatggttcgtccgtttcttcgtcttttcttcgtcctcggggaattgccctcggggaggacagcggcgggagggagggggcgggatgagaagaaaccgctagagggggacaattgatggtgatgatgatgatgatgacaatgacgaggaggggggaaggaggaagaggagggaggaggatgacaatgggttccggaagcccagagggactgtctcaagaagatgaatagatgaaaagaggtaatatactttaaaaatagttgagacaaaatatccaagaagaacaataatctatcgcaaaaatcttaattttttcgatgaagcgccaatcggcaccgccggggccaaaaattcataaatcttaaacacgagagttctctcgagtcgagaccgagagtctcaagcattgccaattaaaaaataatgcgctgctttcccacctccgtacccgaaatgtgtctatccccagccatttccatggttcgtcgagtgagcgcacgcccaattgggggtcccgggtagcgttccttcaagtaa

SEQ ID NO: 10413 - DNA, 2339 bp, Heterodera glycines
gcgcgcgggggggcgacgaccaggccctgagggaaatggcccgacgggcactgttggccaaaattgaggttcgggaagaggaagacgggtccggaacagcagcagatgaaccatttgccctttccatagcaatatgagtgggatttactgaccacaatcaccagcagaattgataatctcatgcaaatccttttatttctccgcctaattacccaagcggacattgctcctttagttacacagtatttgacttttcaagcgcaacaaatgtaaagttaagggagtaattaaaataatccaattaactgggggggggggagaagaagagaaaagagagaaggagaggatttgaatatttatatgttttacccaagcaataaattaattaattattaattaatgatgccttagcaaatttaatgagctcaattaacaactcattgttaagaacatatacacacataattgtttttttttattttgtaattgatatgaaagttataaaatttggtaattatcagtgcaatttgaaaaaatgacaaatgtaaaatttaatatttaaaaagtaatgtgtatataaatacgttaaaatgggcaattccattctttcttcgccctttgtactcaattcaaaaggcattcattcagcttatttttggaaagtcggcacaaataaacggatggacggacggacagatgacatttctcggcacaatcaatgcttttccggagcaatgccaatgccgggcatatttcgcccttccggcaacggatgaacgccgctgaagtgccccccccccccgccttcctcgtgcccccgcggctcactccgtccgctccgaccggcacactgagtcccgtgggcaatcagtgccgatctcaaatgtgcacttgtaaattatgcccagttatatgtgaaaaagtgataagctgataagagtagttggtcactctgagacttctgtgggtctgttggaatttgttgtgccattttctgtgccggactgattttttggcactgaatttgcttttgctgtggtgttatgcctggccgagggccgaggtttgcttttcctcgccattgccagaaggtttttcgttacccagccacaccgcaggttcattagctggcaaaactcaattttgcgcttctccccacacttcctgtgccgccgttgccgttgacgggagtcgttccccccctctccgttccccccccccttttttttattctctctctctctcgctctctctctctctcgctctctgtgtctctctttgtctctctgtgtctctctttgtctctctgtgtctctctttgtctttgtgccgtgccgtctttaccgctaatcataattcgaattttccgtccatttttatccccgagacataaaacaatcaaaaaaaaaagtcactaaaattttatttttataaaattttaaattcaaaatagcattaatattcatttcaatattttttggacatgttggaggacggccaattgagtcccacgggcggcctttcgaccatcgtcggttgcatttacattggcatcgcattggtcggcttggtccttaacgtggccacttgtgtgatgatcgcttcaagacgggtgtgtggggtgatcagcatcagctaactgatcagaacccaagacttttcagtgattaccatttgctcttttcaggtgtatcgcctttctgcctatacgattatggccaatgtaattaattaattaattatctttttttctaaatgttaggttgaaaaagtcaaatttggcattcaaattgctttgagtttggaattttcggtggcacttgccgactgtgccacgcttatcgttgcgggcgtcgcctgcggatgcgctttgataattccgcctggagcagaacaacttttggcaaaaaacaacagctcatgttttgccgaaaatggtgtcgatggtaatttctcttctgctggccaagtgattggcgaatcactcttcggcatttccgactttggcatcgcttttggcgaaatttcttcatggactgcgggtgttttgtcatatgcttatcttggcatcaatcggtcatatttgaacgatgatttttagcagaaagaagcgttatcattaaacacaataattataaattatgtattttattttattattttttggattttattttttatccaaatattaaaataaaataaatttttaaaagccatttttaattatcagttgtgtggccatccgcttttacggcactcgtgccaaacagttgaaccaagtttgtgtggcaatgattgtgtctgtgctgagttgggccttcggattcgcattgggtgaa

SEQ ID NO: 10414 - DNA, 3182 bp, Heterodera glycines
tgaaaatggtgaacaaacgattaaaaccataaaacaattcggtacaaaaaattccaaaactcacgttttggagtcgaacagtcgcccggccgatgttgcggacgcccaccgatgtaagcccagcgatgtgtgactcggtgtaaatgtgcgatgcgcaggtcacgccggattccggatgttcgacgtaaaaggcggagatgggcggatgatggctgacttgctcgccgatgaacgtcatctgaaacgtgggaacaaatgttagatttctcaatgagtgacgaggctatcacttaaactggacctggttggttgctgagcccgggaacggtccaccggcggttcggcttgcggacaacggcacgccaggcagggtccaacggcaacggaacacttcgcccaggatcggattgtacggcttcttcgcgtcgtcggttttgcgtgcagggtagaaggagttcaagtagtatttgaggacggcaaggaatctgaaaaattgttgattcaaaagcgaataaacactgtttctcagccgtattctcgtaggcgccggcgaaccttcgcctttttaaaaagccatgccaataaatggggatttggtcccggcatgtacgtctccgatattagtgggacaaccctaattcggattgtcaaaatggaggtcgaatttgcatttaagacgactaaaccctcctattaaacgccaccgatggcgtcgatcattgccccttcgcgcacatgcgcctcggcggagtgaatgttgcagaacaattgttgcgaaatcactccctcgccttggtcccaaagtgccaaaatgcgtttcagcttctcggattgctgaaagtgcgttggcatgtgattagaaatgtattttacccccaggcgaaggacgtcaattgggacggattggtcagcaaatagcagaagaaggacacctaacaaataaggggggagggacattaaatgggtaataaaattgccattaaaatccatttaaccaaattttgtagaaatggaaaatgtgaccatcgaatgacaccaaaactaattgcagaaaacccatatttatagttgaaacaaaccaacaaagtgacggagagtcggtgctttgccagccccttttgtcattagtagttaattacccaatcaaccaccggcggagagtacggtaagtgttcctcatcactcacaaattcccctcacctcctttttggtgggctgtgagtgggcgtattccgtgcaaatttgtgcctcctcccttctgccaatgcgctgactctccgccgcattgccccgttcttcggcgaccaccaaacgctgcagagaatggctgtattctgaaagagaacgaatgaatggccacacacaccgtagtaattaatgaatgataaatacatttttttcactcttggattattcaatttcaatttcgaaagaaataggtttccgattaaaaattcccctgcccttttattacgttttattgcgtttgggtccctcttctgctgttgtcctccttttccgtgccattgtcgtgtctccaaatgggccactttggcctcgtaaatgcgtcgattgcccgcattcactggcccccaatgcaattgcggtggcgcaaccgttcgcgcagttcgtccagccgaagcatggcgaattggtgccgaagtgcgtccagcaaagcctcgtcagagtggcgttgcacagcatcaccctcatcatcatcaccatcgcttggctcaccatctctacaaactcggaaaattcttaaattattggagccgcgtttccgtaagcaaaagggtctcccctacagttgccataaaacaaaagtgccaatttttccactttctttaaaattccccctcccctccaccatttccgctcttcgatcgtcttcatccttctcgtcaccgttgttgttgttgctgtcctcctctcgtgctgttcgccatgtctccagcctggccacgttcagttcgtcgtccgtcgttgtggtccccgtggtgttgtcatccgtcagaaatgcctcccttacaattagccaattaaaagcatttatatgttaaaatcaaccatttcaaatgagagaaatgacggtcgcaaagaatgtcatcaaaaacaacgaaaacataaataaaacaagattccacaaagtttaccttttttgatgagctaataacaaaaattaaaattcaaaaattcgcatttcgatgggtttaggtgttcaactttttattggaattagggtccggagtttcagaattggtcgaaatatatccgtgtggttttttcagatttcacgaaatcaaaaaataaacgatgatttccgttaattttcaaatgcgagtcaatggattgcctaaactttgtcgaataaataaaaatttcagaaaaaaatgtcagcgtttttgtgtccgtcctcaacccctatcgttttgcaatttgtcattcaaagcatagattctatcaaaggtcgcgcgaatcggtggaaattgcgctcagcgccgcgtctcccaatttgaagatggactccaagacggacagttcggcggaggtcgtgtcgaggcctgcaaatgggaaaacgaaattttttgtcgccaattttatttcgacagaaaggtaagtatttgattttgaaatgaaaaacccaaaatggtaaggctcactcagcacgtcactaccaacactcgcctgtgaatgcgatccaatcgttgacgcaacagccggcaccgatcagttccgagccgcggttgaccgtcccggcgaccaatggcactttggcgagcgaggcgaactcgcgctgcacctccggcggtgtttttgctgccaccaacgcaccgtttgaagtcatcgccgcgtaagagcccacctaaattgacgaagggttttttgtcggttcggcttaaaacagcggtgaactgcttgaattcgtggttcccaaaaacggatgaacattttattgtcggttcggcataaaaatgtccgtgccgccaatgttgtcatcatttttgtacaaccgtgcgatgccttccaacgcgccctagtggtcggttgagacagagtgccaacagttggccaaactttgcacgagcgtccgccaatttcccatcacgttcaagcctaaaatgaaaatttaataaaaatacgtgcaatatgaaaagaaatactaattttgcaacagattt

SEQ ID NO: 10415 - DNA, 2047 bp, Heterodera glycines
  unsure (1)..(2047): unsure at all n locations
gtacttgtnggaattccggttggttcggctgcagttggacggcagctccaagtcagtcagtgcggcggggaaattgcgacagccggcacaagccgcgccacggccagcatacgcgtcggcacaatgctcgtacacattgagcgccttgttgaagcactgggccaagcaaaattgagggggaacaaaataccnaatgtcataaaaatgggaacccaaaattttagagccatgtcgcccaaaaagatttttgccatgcccgtgccgtggacaaccttgatagcctcgaagcatttgttgtccctcgtcagttcggcatcccgtcgcacgtgtgccatcaatcgccaatttgagcgactgttcggcacggagctgttgcgcggttggcatggccgatgatgagggtgacatgccaccgctgtcatggcgcacgaaagcggctaatttggcactgagtgatgggaggccggaggaacgggcacagcccaacgaaacgccgagctgggcggacaaattggagttttcgcgcattagttggagatttaaagggttacgaacgaaaaatcacattttaaaacccgtgtcttttgttcgaaatttccccctctccccccgtcaaaaatggtactgaatcaaccacaaaaaatacctttttttcggtgtagctgccgcttttaattgcatgtaaagttcggcctaaacgtccatcccagtccacccacgtacctcgttctcgtcaatttccaactcaatctcttctcgccattactcgtttttgtgtgcctctgaatgaacgtctcccaatgccagaatcattttatgttctcaataaatgcggctttgaaaatcaatttttagagttattgagcttttcaatttatatagatcacaattaacaaattaatacctttgcagccttaaatttatttccatgtcaacaagatcatacgtgtgaaatcagcatttacatgaaacgagttcgcttagctttgctcccttgtccatcgtcttcttccgcttcattttcctccgtttccttctcttcctctccttcattttccgcgtttttctccccttccttttccgcatttttctctccttccttttccgcgcttttctctccttcctttttcgtctcgttgtcctccttttgctccactttttctcccttcttctttttgtcctcctccatttcctccacttgtccgtccttttccgcttcttctcccttttccttctttttgtcttcctccccacctttccctccaacgcgttccttcaaaaattaattttcttttcaaattaaaaaatttttgattaccaaaaaattggcatcctcaagagcatccacaacacttacagcgtccagaaaattttgctccattcgggacattttttcctccgattctgctgggcgctgacaaagcgtgtttcattaatggaaaaggaaataagttacagttctacctttgacttggtccgatctgccttgagcgcctgcttcaactgttcgttttccttctttaaatcctcgttttctttttccaacttaaccacacgatcatccaactcggcaacacgggcatttgcctcctccttctccttcttttccttttccaactcagccgacattcgctcgcatgaacgtttaaggtcctcggcattctcagatgcattaatttttttttgttggagaaaaaaacgcaatacaaccttttccagaaactttggttttttcaaaagctttagatttttcatttttaacttatgtgccattaaaaaaatcaaaatagaaccattttattcagaaaaaccataaggccataatattgttttttaaatttttgtgcattggcagaaaacactgaattcgttgatcaatatgacatttgtgcaggctttacgcatgataattgcccataaaatcataatttttttcgtggaactttgttaaaaccaattctaataaaggggttggggggtctgggaaaggatttgcgaagcccgggagggagcagttgactgctgggtaatagtacggatggtatga

SEQ ID NO: 10416 - DNA, 2331 bp, Heterodera glycines
  unsure (1)..(2331): unsure at all n locations
gcaaaaagcttggcggtgggcgttgggatggcgatgctctcgggtgcggtcggagccactgtgaccgcgcgggagattttgcctgctcccttgcgggcctgagccgttgctctcctcattgtgcgaccatcacagcccgggctcccccgggccgcccctgtcgacgcggcccttggtcgcgacacccaatcggcgcacgcccgccccccgcccgccttcgccccctactcgctgggtcacaagggcccgccacgaccctcggcggaggctggggatttattagcatttatttagcgtagaaatacgagcagcagagagtgtctctctcaccaaacacacactatttcttccacgaaatgggaaccaaatatatggaaaaggccaaaaagcattatttttttaaatttcgaattcaatttgaacagaaaatttattatcttaatgatttttcatataaaaaatttttagaaacctctaatttttagtaatcaaattcaattttaaaattctggacaaaatttgttaacaaattttaaaaagtattcagaaaaacttactgacaaatgaggttaaagcaaaaaaaaaagttcaggaatccgtccaaaatttttctcattgccaccgatgcaatttcgttttcttcgcttattggcagatttccaaaaatgatttccaatgatatttaaaaccgcggaaaatatgcctgttaaactgttttgttaaggtttaattttttgaatatttttcaagccaaaaggccatttgcaatatttcttttttgggaatttttttttaattttaagacccagaaactacctattcacctttatcaattgaaaggccacttaaatattattttaattattattcatattaacttttttattattttatcattaatgaattaaatgcttttgctttttccccccaaatccatcaattcgctgttacgcaatttccgtcaccacagacatcggtgaggacaaaaaacagcgcagaacaaacggtgcgcaaatcaaagcggctaattgaccggcgaaacgcattaactaattggccccgtgcgatggttacacttttggccgatgcttttatggttcagctgctgattcactctttctttcatacattcgtccattgttcgtctgtttttttgtttgtttattgtccattgtttttccgcgtaatttctacttaaattacttttggtatttatttatgcattataattttttcattaattttccctgcgaatttaatatttaatggggagaatccgcgcatttttgacttaatgaatgcaatttgatgttcattttcaaaacaattaaataatgaatgtccgttgctttgtcctaatttcgtcatgtctcagcggatttttggtgctcgtcgctttgcttatcattggccttctttttaatgtaaattcggcaaatgaattagtcaaaaagaaagtatatagaaagggaagataatataatttgttaattagtcaattttcgcaaaattaatttgaaattttttaaatatgtctaattatgtccaaattaaggagattaacacattttacgccgatgttctgctggaaatggacgaatttcgcgtgttggccaacaacgcctggggcgaaatgcaggcaattcagcagcaggtggtcaaacattatgccaacatgtgaatgagtgatcaattaagcttcaaattgattcagggtgaccattcgcccctcctttggttgacctcgcgcggaaaacgcgtcagccgaaacagtgggggcggcggcggcactttgaggataagcatcagcggacacggatacgagttggtgcagcagcagaaacaacagacagtggaaaacacacgtaaattaaatgattggcatttttttggaaaataataattaaataattaattgattgtcaattcagaatcggtgggtaattattacccaaaagccggcgggggaagcggcggttacgcacggcaacagcaagtccaagtggcaccgtctgccgcaggaggtgaaaagcaaaattttccttttccaaattttttgaacatgaattttctcttttttcggcttcccttatatttttggcgatgtgtcacttttaaatgtcctcaggtggcggctattccaatgctgcaatgagtagtcgcgtctctggcggtggcgaaacagcacagacggcgataaattgtccagccggccccccgggtttgcctggacacgacggcgagccgggcgagcacggagagcctggacatcctgngcaagacggcatgcacgngcacgaggtggccggntgcacacatgacgccagctgc

SEQ ID NO: 10417 - DNA, 2812 bp, Heterodera glycines
  unsure (1)..(2812): unsure at all n locations
ccgcccggcggctacgggcccccgggcgagcaggggccttccagagagccgggatggcatggaatgccgtctcggacacttgttcgtcattgtattatcattaggatgtataccccgagttttagcctggtccccctgggccacccggcgatgtcggattccctggccaaccgggaaaccccggacaacctggccttcctggccaagatgcgaatgacgggagtatgggagcggtaaccttcaaataattttattttttctttattttaattttagcccggccttcctggcccgcccggcatgcccggaatgcctggtccgatgggcatgcccggcacaccggcagggcccggcatgccgggacaacgcggctttcccggaatggcgggcaatgttggcgagcccggacgtgccggactcccgggaattgcaggacaatccggacagagacaggcggacggcggatagtcagttttttttaatttaaattttaaattttattattttttaattaaattctttctttcagttgtccttgcccaccaaaaaggaaacagcaacggtcaatgcttgttgttggagcggcaaaaaggagccttctcttcccgtagaaaatttcttttttgtttagccaatgaataaatatattaattattctttaacattgcttatttaatttgtttatcacccaattatatttcttttattaataaaaaaaattaaacaaatttctttatttttacttttatttttattatcccttttttgtcgtgtctgccaattaacgtactttttttatagctttaaacaggagcttaattttaaaggcataaatctccattggtctgtcaaggattgataaaaagatcttctgaaaaagactcttttcaaaagatgactcataaaatacgcagaaaagtgccaaaaaatatttaaaaaataagggcaaagttaaacttatttttattttattaaaaaaaaaaatctttagaaaggtctatccattaaagcggccttttataaaaaccaaaaatttcccaaagaagtttctcgaaacactattaaaaatttaacttgctaaattttgtaatttatgtcaaatgaagtccaaaaaggaaaattttctttacttgattttctcaattaacacttttagctttttctaaaattgtttttgatgccatatttatccattttcgagaattttaacctaaatttagcgaaaatgaatgaattttggggaaattttaccctaaatttagcgaatatgaatgaattttggggaaattttaccctaaatttagcgaatatgaatgaattttgaggaaattttaccctaaatttgaaaaagttgtgtacatttttatgattatctgcatataacgcgagttctgtttatgactgactatatgtataaatagttttggcatacaaatgcatcggatgaaaacggcacaaattaagaaatggaacaattaaaccgaatttgtaacgaaatcacagcaggaatttcgtcaagacataattggccacgtcaaattgaaatgggttttcgccaaagttggctttgattttggcatttccaaacccgcaaaaactgatcgttgggaaaagtttggcatcgtttgttgccgatcgaatcaaattatcatgagtccctaaaatctttgaaaatttatttattttttacataaatcactcacaaattaattctccatttttcgtgccaaagaatgcattggcattgtacccaaatccgaccacatcgcccgcgccatatgcaatttctgattgacttttgggcttctcctcgtcatgccgaattatgtcgtcgccattggcacaaaattgaccattgcttttgtacgcaatggcacttggcaattcgcataaattcacacccaaattcgcattgagaagtggcgaaactccaacaagaaagcaatccctatgtttttttttattagtaaattctagaaactaatgggtgcaccccaaaatatcgccgcccgaaatatcgccgagacaacatattgccgtagaaattgaaaaagaaaattaacaaacttagaattttcattaaaaaaaatcttagaaaatttttataagaaaatttgaagaaaaaaatcattgaaaaatttttttttggaaagtttttcgaaaaaaaacttaataattttcataaaatttcaaaaaaaaaatcgttgaaaatttcaaatttttttttatttaaattttcccataaaaaaagtttgttaaaattttttctttaaagatttataagtttgaaaaattttctttaaaattctgcggcgatattttgtcccgtccccaaaactattttatttacccgcaatcaatggcaatttcgaagtaagtgtaaagtcctggcactttttggccccattttgcctgcacaatttcgtttcccttcggtgatagcagaagcttttgcaacttttgctctccttttgtttgtgccgtttcggcacttcgctttgatgaagccgccaattttaaagtaaattgtgtccctttttggccccattttgctttggcagcctcatttttgtttgatgttgccgccggtgacgtgaacatggtcggcactttttgcttctgttttgcttgcgaaggttcaattgttctctgtgatgaagtcgacgcagaagaataagcttcttctattttcattatcagtcattataattaatatatttatttgattaaatttttatatttttannatttcaaagcgaaaaataaattctttaattntgtattttggtaactactaaatgcaagtctaatt

SEQ ID NO: 10418 - DNA, 5039 bp, Heterodera glycines
caattttactaatgtgacaattgtaagggaagtaattcaatgatcgtctcaaataattattgtaaatattaataaatatctggaataagaatttagatcacaattttgagtcttgggttttcaaacttttgggtatgattattttaaattttgtaaattttttcaattatttttcgataatttttttaggttcgatcgagcaccaaatggaacacttctttcttaattaagacacgtatatttttaacataattaagatccaatacgatcgactttaggatattcgtatacataggtaatttaattacatattgccaagatactaaaataatcagaacactcaaaactgatatgcttttcacaagaatcacagaaaaatcatattgaaggcgctggggccgaactgagccggtccgtaaataacatatataaaaaaatgctgaaatatgtaacaaaaaaaatatacaaaagccacaaaatatgtaccaaatgtgtttatttacataaaaaggaatccctagaaataaataattaaacatttgttgtttcttttctattaatcttttttttttttaattttaggagacaataacaacggtaatttttatgctcacaatcagttttttttaatttaatttaatttatcgagcaaaccaaaggcacattagtgctcttacatggtgccaaaaagaaaacaaaacaaataaatttgatcaaaataaaaaatacaaaatgaataccgtaataaaaataaatcaaatgttaaaaattcacaggtgattaaatatggaatgtaaaatatggcacatgaatattcctactcagaactcattgcttttagtaaacccctgaattcctttgccttattaatttgcaccgctaccactggaaggttattccagctttttactattctattgaaaaaattattttgagttttggccgtgtggcgctttacccgtaaaagtaaaggcctcctgagcctttctgagaaaaagaaactttttccagcatcgaggctggtgaaccctttgattattttaaaagctgttgtcaaatcattgatttttcttctttcttccaatttgtgtaaacccgtgatttttagtctttccccatattttttgtacacaaaaccacattttctaagtgcttttcttgtgaaaaatttttgaacacgctcaattttatctatatctttttttaaattagggttccaaacttcggtaatgtattctaattgaggtcgtacaaaagttttataggctgctgttagagtttttatttccctgcttttcaacactctcaaaatttggaaaattctaagatatgcgtttcgtataattttgctaatatgttctgaaaaattaagtttcgagtcaattataattcccaagtcacgtacactttctaaggtgattggtatttattatgacactaataactattgattgttttatgaaactaattaattattgatttgttaattaattaattaataattatttattatgaaactaattatttattatgaaacaaattaactattgatttgttaattaattaattatttattatgaaactcattaactattgatttgttaattaattatttattaggaaactaattatttattgatttgttaattgatacattaataattatttattatgaaacaaattaactattgatttgttaattaattgattatttattaggaaactaattaactattggttgttaattaatttattaatttcccacaaaaaaagctgccgccccgcccattgacggagctcgctgaatgcgaaagtgcgaggcaaaaatgccctcatcatgagtacgcttgtcttccggaattcggcgctcccgcgctaacctgttgtggcgccggctataagttcacttgcatggaggtgggcaaaaaaaatggcaaaaaatgccgaccattttaagtaccgtaattgccaccctgggaactctgtctcaggcaaatacggtataaaattttactttttcaccagtcggggttgggaccctctttacattttgcccactttcttttccccactgtgtctgacagttttctccatcttattaccaaagatgtacagtatagactgagataccgtaacatttttctaaatcgtaattaaaaaaaaattatatttttattcaactacactctgtccaactgtgaatatgattgttgttcaattttcagccgtcctttgtgtgggaagaaaaatcgccggtagggattactgtattctgcgtgtcaaattactgtgttttttacatttaaaatgcattttactgtggtccggtttcgtcttaagctcgaatatctggccaattattttttccacgcgcccgaatgcgtcggcaaaattttttgcgcctgccggcgcccgtaccttgtaagcccggaacgctttgttggcagatgctgcgacagcagcccgagctgtgcatgttgccagaaggtcatgtcaatctcacgctatcatgcttgcaatatggcccgattcgcgatcacagattccaagggatttgaaaagtcgaaataccaattcctggatctgatagttcagcttagagcttgacatggacttgggtccagaggcctggattttttctgaacctgggttttcctggatttttgtccaggaattaattataggtccagcctaaacatgaaaaaacttaggtttcttggacaaaattttagaattattattccaaatgacttatcttttttcaagttttcaaaaaatgattaaataaattaatttaaaaacatattattcttacaaattagatattttcgagatattcgtaagacaattaattgaatttttgaatagattgtatttgttttttaaacaaatttcaaaaaacgaagatcaaggcctggattgtaagaaatatgtaatttaaacaactaatttttattttgattaacttttttcatttaatttcctaattttaggacccattagtggtcaagccatcactggtatggaaatgctttaccaaaaaataaaaatattttattaatttatttgtttaaattagctaagctcaatacggatctcggaagagtgccagaagatgcttggacaaacacccaattgttcatgtccgcttagttttgaaataagaatgtggagtaagttgtcaggaaaaaagaatttcaaaaaatttttcaatgaatttttggaaaaaatttttgaaattttaataattcatcataaaatttttcgaaaaaaaatctgtgagtgtccagatcatttttgaaccatttttatcatcgtatagagagagatagagtatagtcaatttaaaaattatttcgtcattttgaacaaatgtatggccaaaagtacatcatcagaaacctgctggttttcactcaatcttgggccataacttttttgaacctcaaccaaattttcgcaattttgcagacaaatagataactcttagggctatcaaatgatatcgaaaatcaaaaaaactggttgcttttgcgcaaagttatagataattttttttagaaaatttcattctcgacgagccttcccctccccccttattatccagataaatggggcccaattatattctatggtctcgacatgcccgaaccgatctttgtaaacaatccgtcaccccactcgtgcgttgcggagccgggttggccggaatcggcttgctgcgccgagggcagtcgtctcgaatgttgcgcatttccagaaaaggagattttggttcagtttttgagtttttccaggacattttgttcagtttttgagttttttcaaacaaaaaaaaacttgaatttctacaaagtgaactggtgaagctttatagaaaacatgcttcaaagtgatcactctcatcacaaatccggtacttttccgaaccccggaaccgaccgaaatcaaaaatgcgaaatttttaaaaatttgaattttctgatttttttgttcgaatacggatttctgcgggcgctcagaatttgtcaaaatggatggataatgactctacagaattttttgccagtggatctatgaaataatttgtcccattcaggcattactgtattcatcggaccaaatgaggtgtgtatgtacaaattagagatcgcataactggggtgggaagtgatccggcccgaatccttgtccctcaatcccaaaagattttggaaaaatgatggggacgaatcccaagtcgggatcccgaaaaatttcgtggggtcccgatcaaatcccgatcaatcccaaaagatattggaaaaatgatcgggacgaattccaagtcgggatcccgaaaaatttcgtggggtcccgatcaaatcccgaaaatcccaaaagattttggaaaaatgatcaagaatcccaagtcaggatgcggaaaaatttcgtgggatttttgagctttaacactagggttggcccccgacgtcggggttggaaaattcggggttcggggtcttcggggttggaagcgtcggggttcggggtcggggttgccaaatcgttcggggtcggggttcggggtttttcaatttttgccttatgccatatagtcaaattttttttataattttagcttaaaaatttttattattcataataataattttatgcatctttttatttctttttatcataaatatttttgtatagaattaattaaaaacgataaggcatttttaaaaagaacaattttcagtgaaaatctgtaaaaatagtcaaaatttcaaatttttcctccggcgccgggcctccaaaacttattttttcttaaaaaaaatttggctcaaaattaaaaaattggttatttttggtgaaaatcagtttacaattcattctaattctctaattttcagaaatttttcgcggtggcgcttaccgacactgccggactcttgttcccgaaaaaattgttatttttcaaatcatcttttgtcgcggcgcgcatgttctaaagacttttggagaaatgtgtccggcggtgccgataggcg

SEQ ID NO: 10419 - DNA, 1098 bp, Heterodera glycines
ggggggggggggggggggccccccccccccctttttttacccatcaccattgttctcccttttcagtgcgtaaagcttcgaccaacacccaatgatcaatttccattacatgatgaaatggttgctgtgaaattttgtcctgaccgcgtttcgcctggctttggcaaaaagcattaccgcaaagtggactgtatgctgtacaagagtacaatgcgtcaacggtatgttgttggttgtcatacacttactgtacgctagtatactgtataataaagtaataataataataataaataaattgaaaatatggctggcgatgtcttccttacaaatcaatgttataaaaaataagtgttacaattagtatatattttttaaattaaacaaattttaaaatgattaaaaaagatttaataaaatttttgtgcacccatttaaattattcaatttaattacatttatcaattttaggaatgttgtaaagttaacgtaagttttttattattaaaaataatttataaactacacaatattattattataaatttgtgagttttttctctcttttttttagcgttgctgctttgaaataagagtaagtgataataataataactaactctgacaatcaaatatataaatccattggatatattatatcctattaaaaaagtgtgtggattttcaattttcaggattgctgtgggcagcagaaggaaaaatccgtaaagattgatttaaaatcattacaaatattatacataatatgttaagaaatgctgtacaccaccacacagcgaaaatgtatgttgatgattataaaaataatattatatataattaaaatgttttttgtcatccaaatctcgcaatcttgttatcactcgaaagcttaacatgtttagaaactttttctaagttattgcttcgcgattagacaattactaaaaaagttatacttaaaaactgcgaaaaagtcgaaattttgaagattttctaaataaaaatttttccaggcttgaaaatcttttcgtttttttgtaaggctaatagagcatgttaagagctttcgaatgataccaaaattggttggatttg

SEQ ID NO: 10420 - DNA, 2422 bp, Heterodera glycines
ggggacctctagagtcttgtcttttcagaaagtcatgcttaaacaactgctcaaactcgcgctcaataccctttcgcgtcttttgaattcgtccgatttgagttccgctttcgaccaacaagtctgcgacaagttcctcagcgtcgcttccctcatcttttgctggaactttcaacctaaacacctcttcctggattttagaattttgtaatttttcccattctctgttttcaataatttcctgtccattcttctgtttgcaattgtactttctctggtttcattttgattccttttcagattccatgcgtttcgtgcaaattccttccgccctccccaagattggcatgagctgttccaagatgcttcaattgtcactttcttcatgcaagtaactcacccccccccccccaatttattaccgttttgccccctttaaaccgctctttcctcttttagttgcacagtcgtgttcgttataatcagcagttgtgtcagaattcgttgacttgtctcgcccaattggcctctgcgatgggcgactctttgagtctcggcccttttgctttggttattccgcaggtcagcagcgaccttagcgagcgtcgtttggccacgtcaatgggcggagcggtggaaaatttgtctgcagaattgtcaacgcacgacttgtacgtgcggacattcagtcgcgaactcgtccaactcttttccgggtaaaaactatcatttcaaccaagtgtagtttaaattcttcaaaatactttattgtttttacttccatttagagagtatacccaatttcttttccaattaattcctttcgtctctcaggctggtccttgaccatgaaatggcttctctgtctctgatcatttacaaattgttgtcctgccaacccattcccgtgtttaaacgctttccagccgatctgttgcgcagttttgtcgagttcgtctcctccaacatcgtcactctcgtcgagccttccatgcaactcgctttggttttggcttctcctccctccttttctgtgatgcttttattccaaatattcagaaaaatgaccacacttaccacgagcccattggtcaatttctttttcgcgatggcgcactttgctccgtaccctaaataatgacaatgaattgggcgataaacgaatttgtccgcctgcaaactcggaaaataatcgagtgcttcttcaactccgttttttcgcctcctttcggaaatcggacaaaagtttaaaaagaaatgcttttaaatcctttaactttatttttttatttcccacagatttccgataacgaaatttttgaagagaatgaggaggaggaggacgaccagaaaacctttatggatttgctcattgacctcggccatttctctctccataccatcgattacttcacagatttcgtcattgggttgctttttacgacacaacaattaattaaattgcctttgtttttacagtgctttggtccagcggttgcgcgagttgtgttccatggacgtcagggcgtgcactaatgaccaactaatgacttggcaggtggcaattttcttattaacctaaacaattagcttataaaaggattacattttaggaagactttcactggcttctgctcataatcggtaattatgggtaattattgctcatttatttttcgtctttccttaagacagtttcatttggcaaccatcgtacagcaacatcggaaattaccctgaagagttggcattgcgatgtctctatttattccatttctctcttaatttttgttttcataggtctcaatggctacaaaagcggcgaattcgtcaaattggacgactcggagtcgctgttttgcgcttgcctctccaacccgccgttcgaccccgcgacataccccggcaaattggaccccgtcacactgtatggcactgagttttacctaatgattctgattttccttcagtattgccacacagatcctttcttggttagttttcgtttgtattattcatttttttatttgtttaatgtttcgttttcccttaggttttctttggaacaccaaatgctcgtcaaattgggccccggcgcttctctgctgagtcccaccctttgtgagacttccttttccaacttcaacaatcttcttgttctgctgactccgtctgtttattggtccgccgaatctccgcagaataacgaagaggtgaaaaacacaaaaccaaaccaattccatgttgtgacaagggttgagttttacaggacgaagacagggagaggaattcggagatcaaatctttgcccacaattccgagagggggcaatttgtcgtcccaaattattcaattgtcgctcgacaaatttgttcaaatattaacgaaaatgcccagcgaaaaaaggtggggaaactgttgc

SEQ ID NO: 10421 - DNA, 2329 bp, Heterodera glycines
tctcgaccctttgatgtcgcgctttttggcattatgtgccagcaaagggaattgctcggacgagtcggccttggccgattattacgaatgttttgccggcgttgctgagtctggtcaatcggacacagcggacactttgttcggtgctttgccacttgcatttccttggctttcattttgtgtttttgttagcctttttgttgcccgctttccaacattgtgttcctctgatcactgcccaccccgactctcgagtgctggtcgttgcaattctcgacttcatcaagtcggcgactgatcttctctttttccacggcatttactttttgttccaatttgtgccatgacttaaattttcgctttcagttgaccatggtgctgatttgccttatcaccaatttctcatcgatctcattaatgcctacaaggtgattgtttggttgagactgggaatttggtttttgcatttccattgtttagcaaacgcaattccatcgctttcgttccggtgtttttgtgctgcgcggtgacagcagcgaagaggagcagcagacgcaggatttgagctcgctgatcgaaatcctttgtctcttccactcgaaaacctatgtgccgcctctttctgttacggagtccgaatgtttggcggggagggagaaaatttcgatgcatggtaaacggagaagcatttgagattggtagatgaaaatgcattcgacagggttggagctgttgttgccgttgatgaccgaggagttgctgaatgtgccgcatttgtgcgcctctttctttcggctgctcatttttgtttcggacatcgccgccgagggaattgcccaaagtccgccccaaatgctcgacgatattttgcgttgtgtgaaagccgctctcgactactctttcggcggggacagagtccgttctgcgctcgaaattgtcaacggattggcagcaaattgtgtcgaagactccgtgaagaaaacggggaaatatgcgacaatgactgaacgtcttctggccttggttccggtatttttttgcgaaattagctgtcacttttcatttctctcccaagaaaatgtttcaattggccatggagtacagcttcgagttggatttgctgagtgatgcttcaagcgcacttttttccctcatccttctcggcccggtcctttttcatatcaatcaatgcacttgttatttattgccttcctaattaactttcaggattcattcaaagccttcgttactcatttgctcaacttaccatccaatcaagaaaaccgagagcgcctggaggaagcgtttagccaacttttgacccctttccccggcgttgacgacatttctttcccggtccagccccattctcagctgaaccgccgctttcagcgtaacttttgaggtgttttctaatggaagaaaagcatcgccaaccaaagaaacctttcacatttaggattttctgatcagagtcagcggttgtctttgcttaaactgaccaacactttcacaccttcgaccgttcagttttaactgttaagctttgatttgacgggaaaacaaaaccatctcgctttatatttgatcttttgttatgaatttcccttttgttgtttccagtcagggcgtatgggaaagagaaatgaccaaaatcggagctcatgattttcaaaaaggaagacaaattggcaaatctgtcagcttcggtcttggttttctacgccctttctctctcctgattcattcctttttctgattgttaccgaataaaatgatgggttccttagtggaaattgtgccattctttgcaaaatttattccatttacctttccatggtaaaatatttgtggtttcctttttgtttttgcttacttttcctagcattttcagctgtcaaaatgcggttgacatgtcaggcgatggttcggaaactgcacgcggaattggattatgcaagacattttccgaaggtgaatttgcacaatgtccgctgaaaatctaagcgaaggacgccgaatcggccaaaaattgttttttgatcaaattaaggcttatctggacaaagcgcaaaggcatgtccctatgaaagtgtacgacaatcgctttggcgctccgccggtcattcgttgggcgtaagtcgcgcagattttgtggcttcaaattcgtattattttccccaaattgtcagaattcgacccgatgattgggcgatgagaacgaaacgtccgtgggagtacggagaagtggaaaatgtgatcagacaggagaagatgtaccaaaggcaactgttttccacaaaattctaccgaaaaaatggaacagacc

SEQ ID NO: 10422 - DNA, 4450 bp, Heterodera glycines
  unsure (1)..(4450): unsure at all n locations
tggaatggctgtctgtttctttctttctttgtttgtctgttccgctacacatattttttcttcctccgtcattaacttcctatcatttttcaccttttcttcttcttcttctgctgctgcttctcttctgttccttctcttcgcatatttttcatttcctttcgatttgccttccgccgatcaattcattccccgtcgtatgaattacgttttctctttctcagtttcattttctgcccgcccgaccaatcatttccccccttttcccaaccatcggcaggggatcttacagatctttccatctcatcctaaattatgctacaaaagtgttatttctttcattccgttgattgagtgagcctttcttccgactcatttgcggtttctcctcctttttcttcttcatttgctgctttttcttcgtcaccgccgtattttcatcttcatcaaaatgtacgttctgatggaacatcgctctcccgagaggcgtcccgcccgctccgttcactccgtcgaacgacatcgtctgccattgctcaggggccgtgccgtcgtgcacagttcccacccatcctccccccatccggcggcaattcgttgtcgctactcaatcactccgcagatgagcagttcggcgacaagtgcactgctcggcattgaggagaaaaggaggaaaacatcgtctggccaacaaccgcaacagcagcagctgaggagacgacaatttgttagacagaacggaattatggcaacagacaatgagcaaaatgacgaggctaataacagaggaaaagcagcggaagagcaccatcagcctaattttcaacagaataagagtggcgagagagcgagagaagcagtaccgacaaatgatcagcaacggcagcagaatattagcaattggacacctaaaaaattgtcatcgtctggcccttctcgacttcggcatgttcaacctccaccaaacataaaaggagatcaaaatggaccggctgtttcatcatcaaaattgcagaaaacacaggcgcatcactacgatagtagcaacggttgtgaacgcattgatcagcaacaacaattgcgaattgcggttggccggcaaccgcttaaatacgccagcagtaaggtgaggccggtgaagacgacaatgccgcaacaacaaattgaaaaaggcggtgaatacggtgacaaagcacacaaaaatagggaggaggagaaggagaacacagtcagaaaacggatcagcaacagcacaccacggcggacgacgccgaacacaacgcgcaaagagttgcaattggcggtgacgccaaaccatcgtcagcaaagtgatgttgaggtgattatgatgatgcacaacgacggaagacaacacaaacagcagcagaaacatcagaactgtaacgataacaacacttatgagcaaatttcatgggacaattgcagcggaaacaatgcaattagcgacaacaacaacaacaacatgatgagagtggtcgtacccaccagggcagttgcaatgactgaatggccacctccgacggatgaagaaccacaacagcagaggaagcggagaaaggccatgatggaactgcagcagaaagggctgagcagaagcaagtcccagtcgcgcaacaaccttttgctagcacaacaacagaaagcatcgctggagcacttccaaatgggccggtccaaaacggcgacaaatttggcatttgttgccggcgaatactcaacgcttggcgtcgacactttgtcactgaacaggaaggggggtggcggacctttcgcgcttctccgtcgtggtgccaatttacgaaagctgtcactgcagcggtgtcgtcccgccttttcgggtgcccaatcggcagtcgttgatctgtttgatgcattacaaagtgatcagagaagggaagagagggagcgagcagaagcattgcccaacggacagtttgaaaggattcagcgcgaactcaaagcattcgcggaacgccgccatttggcgttgggcaggcgacgcaaagtgcgcattgcggagttggggctggaccaactgcacgcgcagttggctaccaaacaggcgaaggccgatgcttcttctggcactgtggaaggctacaattattccaccaaaatgtttcagaggccacgcaagaagccattgcacgagtactacaacgacgacgacgccgaactggagggtgaggcagtggggaagatgaaggaggacccaattagtttttatttataatctacctccaaaaagctaattttcaatttttaagaattcttgagcggacatgctcccattttttgcttttcaaaattcatttgtgatccaaactcatttgtgtcttgtgtctttagcgctggccaacaccgttgatccgaatgccccacaatcaaatggccaattgatagtgccggctcgaggcgactttccttcggccagtacgagtggtgcgtctgcgccgcctcccctgccccgttcaattgactctgtgctgtacaaatgggcaaacacacagccaaagagtgtggcagcggttcagttggacagcggcggaaaggcaaccgcaacattaacttattgtgagagatttatcgagcttgaagatttttgggatcggattttggcatagatatttttttttgaattgtctcaaaattcgcgaaataccgttaccaatatgccgttccattctcttaaattttgattgtagccaaattgctgagtcgtgccaacaaagtggcctaccaccttttgacacgacaagtgacagtgaacacgggcggtgtcaaagagcgtgtccatctgtgcctgcctgacgatagggtcgcgttggtgttccccaacagcgaacccattgcctttttggtcgcattttacgggtgtcttctcgccggtggtcagtttattgtaggaaattcgtttgaaagggaaacaaactcccccttttagttgtgcctgttccaatcgaagtgccaatgccgaaaagggacgtcgccggcctgcagcagttcggctttctccttggcagctgtggtgagtttgtcgtccgacttggctttggtgccaatgtttttctttactctttcctcctctaaggtgcccatgtcgcactcacttccgaaagttgcatgaaaatgctgcccaaggcgggctccgtctcttccgcctcggccgtcccttcctgctcagcttcggctccttttggttccgcctcctcctcttccagtgcccttctccattctccgtcgtccaccttcgcttcctccaacgccttcccttcttccacaacgggttccaccggctccggttcaagttcgggtgctcaacgcgaccacaacgcattcattcaccattccccgcctcagaacccaaacgatgtgaccgactttaaagtgcccacttattgatgcttttaactgcaaatgcctaaggagtaaatttccattttcaagggatggcctcgtctccattgggttgtcactgaacaccttggaaaaccgtccagggattggacactgccatcgttggttgcggatgaccacccggccatacattgagtacaccttcgatcgcgaaggttccatcaagggggtaagagaggaacgaacttggcattttgttcaattcacactctcccatttttcattgtcaggtggaatggtctcgacaagcaatgctcgcccattctcgagccattgggttagccgccggcttcaaggaaggtaatttgcgatgaaaacaactctcatcctaaacctgagggtatcagctcgaaattttgacccatttttgacttatttgtcattttactgatttcccatgcattccctttttatctttctttccgctcagatgagacgatggtttgcgtggtcgacttccgaagggaagtgggcctttggttcgctgtgattggtgccattctccatggaatgcgcgtccatttcgtgccctattcgctgatgaaagtcaacccgaccgcgtggctttcccaagtcacccgccattcggcacaacattccgttgccaagtcccgtgacttgcactggtcgctgatggcgatcggcgaccactcgcaacaaattcaactaaaatcacttcgttgccttttggtagggaatggagaatcgctaaaagttttgcaaaattctttttaaattttattttaagaactgttttccccggaagaatttaaaaaattattatcaaaagttagaaatttttcgaatttcaagaaaaatttttgaatatatttttagcgattttttaaaaaatttatgatgaattactaaaacttgcaattgaacatggttaaatatttgttaggaccaaaactttattacccttttttcattgtttttgattccanattatttccccccccccatcggatttgttcaacttttttttctaacccccttcccaaaggtggcg

SEQ ID NO: 10423 - DNA, 1022 bp, Heterodera glycines
cgggggtggccgaaggcccccctcgaggccgcgaagcggccgagtgagtaccatgggcgcaggaaaattattaaggaggagggttcattatttattgatttttgcaaaattaattttttattattttttgtgaaacttatcagaagcgccccaaactttgcagggatactgaaaggaaaagaattaacctgttttatcacattagcttgtcatcaatttttataaaaaattttcaaaattctgagtcttctatttttatttttgcaaaattaattcatattaattttttcagaaagtgttctgaaacgcaccaatttttttttacatgttaacaaggtcctcttaggtttatattatgaataagggtgaagaataaaaatttttctaaatgttttccttatatgttggttatttcgttcaactttcggtggggtgcttggaaaagtggaatcatgcgtacccgtccgatctgacaagttaagcaacgctggctgactattcaaaaggatgggcgccgtgatgaaacgaaaccagcactgcttaccccgcggcacccggcacggacccctgaaggaatggatttaattaaattctctccttcggggaattttttccattaggtcgtctgttagcgtttgattgctctagtcaatttttcaaattttttgtgaaatatttgtcgtgctctgaagggcgggggggggcagggccgaaggccccgcgggggtgggccgaaggacccctcgaggccgcgaagcggccgagtgagtaccatgggcgcaggaaaattattaaggaggagggttcattatttattgatttttgcaaaattaattttttattattttttgtgaaacttatcagaagcgccccaaactatgcagggatactgaaaggaaaagaattaacctgttttatcacattagcttgtcatcagtttttataaaaaattttcaaatttctgagtcttctattattttattttttttttcaaaattttgaagggcggggggggggggggg

SEQ ID NO: 10424 - DNA, 6189 bp, Heterodera glycines
  unsure (1)..(6189): unsure at all n locations
tatatattatttttttttggaaaaatgttttggaaaattttcgtaatttagttatattgaaaattttctaaatcctctttatttgatgaaatgccattataaatcagaatttctaaatcaataagaatattgtagtctttttattataatctaaatttttttattattatgagctttgacttttaaattatttagataataataaaaatattagtttaaatttggtatttaaatttatattttgattaaatgtaatgttattttaataatattctctcgcttatcttagccttaactacagctattgtgtcattcgtgtcattcgctcactgggcacatttattttcaatttatttttattaatttttagaatttttcattctttttcaattaggtttctgtttttttcattttatatttagcttttatttaatttttaaaattctttttgtattaattggaattttaattaatagcctttaaacactttcttttaatatttagaaatttagtaaatatataaataaacttcagtatggtaaaaataaatttattacatcatttattatttgtgcatttattttaatttctttcaacatgttcattcatacatgacaaaatgacaatataggcaaaattagtattttaactttttttccattaaataaattactttacttaactgctgatggttacttttattatttaattaatttattttgtttaatataattttagttttattttttattaaacaaatattattcttattgtatagttttacctaataatatttttattataattattggaatcattatgttaattgttaaaatggtgctagtgaattaataaactttaattctatttatctctgagtaaaaaaatttcgaaataagagaaaaaaaattttagccaagcttctcatttgttattatggtatggaattttaccaaatattttttttgctcttactttaattacatttaatattaatcaatgcgtatgtgtttgatatttattttactaaattaattccattaaagattttatttaaaacttttggaaaatgtataatcatttcgtaatgtataggaatgaataatatttgcgccaattttattatttttgatttttaattttattctttttatgttttacaatgtatttttaaatttcatgctgaatttcctctcgagaaattcatagatttttgtgccggtgaatattgccttaataagcaacattcataacaattaatttatttctttttattagagtatatttttcctttttctttaattaatttaatcttttcttttataaatttctaattttgagataattatattaagatatgcatttgactgattttgtattttcttaaatttaaatcgcttttaaaatcggttttctttttgcgagttattaagaaatttaaaagcggaacaacacatagtggtcttacaggcactccataatagttttatgttttggggaatttgaccccctgggacctcaaaaaattagtgaaatttgaccaatttcaaaaatcgccctaaatcatttgaagcgatattcacagctgaaaatgcagattcttgaattttgttagaacttttttaattgtctatctcttgaagttatttttgaaactgatatatatctaaaatttcttgatgaaatatttaactttcaatctataaaattaataattgcaaattcaaatttaatgatattcgaacgaattcatgttattatacgtagtgcgacatttgcagaacgacttttgtagaacgacatttgcggatttaagtgaattaaaaaaataaatataataatattaactacaatttaaatgaaacaagaaaatgattaaaaaatattcaaatatatgagtgagtttagaaaattaaaaatatataaataaaaaaaggatataaaaattaaataaaccacattatttgctcccaactagagcttcaatgttattaatttaattattcttaggatttttaattaatttctcattcaattctatataattattatttatctcttttaaattattaacttccgaattatccaaaaaatattattctccatttaatatcaactcaattttattttattataaataaatgctcaaaataaaaaaaaatagtaaactttaaaactttaatattcatttgaatttaaaataagatttattgtcgtaataataagataacagttaaatcttagagtatctgtttggttataatatgtgattttcctaaactaaatataattatttatttttttctaccttgaatccaactcctcatatagtttaacaaagtaaaaaaaatactgaaaagaattaaagaaaatattcaattgctcaattattattttataaataaaaatatatgttatagctgacaatatctatttattattaatcagtataattttattcttattttaatatgatatataaatatattagtaacactataaattaaacgtatggtcgattgtatttgacagctctagatgtattttctctaccaatagatctctcttgatactttaatggattaaaattttatcaaataataaaattttatttttttaatattattttttgaaacttaaactgcttatttacatgtttttttacttcacaaaaaaagtatattgaatttactctaaatcgttacagtaaaatgaatgctgaaaaattttgaaggtcgcggctaccttaaggtaaagactatttatttttgttctgatcttattttaataatataattaacttaaaaataaaaatgcctctgtcgcatgttgctgcgtggtaaccaaccatccaggaagcaaaattgaaaattaaatataaaattactttaaatctatggtttccatttctgaaaatttttaaaatttatgtagtacagaatatataaaattaaaaattttgactgattttttgaaaataaaaaaatgaatgtggactgcgagaagcaattactataatgaataattatatttattccattattttactcttaaagtaattaaaaatttttaatacaaaaacaaaggcaaaaagtattaagattctcataaatcgatcaactggacgattggtactcaaattaaagtgaataatggaaataaaatgataaaatataatttaaccgacctgttcagcgtaattttaaatttcattaactgccttcaattatgaaacacactttgaacattacttgtatcggggagcgcctttcattatatatgatagaaatttgatattttattttttgctggggtgtaaagagagcgagaaatgggtgaaagaggggtgcacattcatgcactatttctccgcagcgctcgtttctttaccgtaaaataatgtaatagttagtgtactatttctcccattgctgtttactttctttctattgtttgttgttgtttttttgaataattttgtttatgaaaatgtttttagaaggattttttcacattcaaaagtattttttttaattttagattgtaggattaaaatcgttgatcgtttgaacaataactctatttatgtaaaatgggtaaggtacattgggaaaaactcatttggtcaattaattaataatttaaaatcatataggtatttcattttgcatgaaggcactcatcaaatactgagaaagtgccgaaaaaatttcaattacgaaaccgaaaaccggggggggggtaccggttttaaattataaaactttagactttttaatataagccatattccagattttttaaaaatcaactccaaaaattttggctttttttgagtgcaattttatttatttttaaaaaatttctgtgagtccaaaaagtgaaatagtaaatgtatttatttacctaattaccatttgctaaaaactttaccgctctggacggtgcaatcacaatgatgatgaagcgcaagtcttgcatggagcggcccaaatttgtcggatgggacagtcgcgcaatggcacatggcgatgctgcaccgtgttcagtatgcatctggaaattgaatttaaaagtaaattaaatttcaaatctaattttaaaattaaaactttcagccgaattgaatagaaaaatgtttggttcaaatttttttttgaattaattttttttttttgtaaatttttgcctccaaccttctttgagttagagtttcttattggaaatgttttttttgttttgaaaatttttgccaatcataagaaaaacttacagcgcacatatccatgtctgatcatagtcaaatgtgccaccaacagtgccagttgtgcaaatgctttgcaccgtacggctcagaatgtggactgaaaatgatgctaattactaattagtagggctgtgatttctagtggaaaaactttgtttttgctcaattgttttgaagaaaggagcgcaaaaaacgcatttctgcgttaaaattttttcatttgaacgccatttttcgtcactagaaatcactattttggcgttttgtcacttaaaattagagaccggacaagaggatcggtcggtcggtttcggttaaaaaccgaaaaaaaccgaaaaactcaaaaatttctcggtcggattttttcggttaaaaaccgaaaatcgaaaaataccgaaaaaaaccgatcggtccgatctctaatataaataataaaataaatattaacataagaaatatttatgggtgccaaaaatcggttgttctacgagagactaaatttatgtattacgcttataaatttttatcaaagaccaaaaaaagtcaaatattaatattaataagagtaataataataataatctaatttttttttattaaagcattgtcagaaataaataaattaattttgaatttgtttctctttatattaaacacaaaaataacgttattaaaataataataattttattgctttttaacatgaagaatagttattaattttatttatttaacaaataaaaaacttttggaaaaaattaaaaatttaaattacatttgaaatatcaaataaaatatatattaaaaaattttgccgcagagggcaaagtggaccaagatggcatgtcctcaggccattttaaagaaattaaatttttgacaaaaaaatattctcaaagtcggcgagcattttcaataaagattggacgaaaaatcacaatatttaaatttattatatcaactaaaaatattttaaagactttaagatcattcataaattaaaattaaataatattcgggcatttatgcacatgtaggttaactttgttggcttattattgatatattttttattttttcctaatgtgaattattgtgacttcttaattaatcaataaatgaatcatttaaaaaattgcatttattttaatttcatcattaaaattaataattacaagccgtaataattcgatacattattattaaattaatattcaggcaacattaatcacacgggacaaggttaatactaaaattcaaaattatataaataaatgcaaaaatatatttaatcgactaaaaaaagttcatctggtaagataattatttgaggatagtgaattttatataagcttttagcaacataatatttatactaaaactaaacacgaaaactcaaattcttataatttttctctaaacattatttattgctagaaatggaaacaaacaatgaaatttcataataaggatgttgctattgtataaaaatagactaatttttttgttttttataaaaaaaatttaaaaaaatcgattattcaaaaacaaaaattattaaaatattttgattaaataaatattacattttttttgatttttcatgtctttaaagaaaaatatttaaataaaaattttataccatcactgagattaaataaaggtcaaaaaatgaattgaaagttaaaaaaataaaagttacataatctaaagatgagatacataataaatgagttaatttaatattattttgaaaataaaacattttaatgaagtaagtcgtgaatatttgatcaacttaacgaaattataaaaaaataattttatttttattttggaaatgttttataaaataatttcagttatagactatcataattagaatttaatanattaacaacagatttttaactgctgaaatg

SEQ ID NO: 10425 - DNA, 2764 bp, Heterodera glycines
acaaaaaaaaacaagattaaagtttttttaatttatcgcggggaagaaaaaacctagtccacctctcgaaaaaaaaaaattcaagaaagagaaatttaaaaaaaaaattttagcgaatttttttcaaaatgtccttgagaaaggattaaattttcacatgtttgtagtggggcgatggacagttgtgctgtttgtccgggtttgagtactggtaggtacggcagagcatcgacgtgggtggaattgatggatcagtaacagaatcggggtcaacaagcagtacattaactggaaggttgaggaggtaacaccgaaaattattttaaaaaccccatattaaattgaatttcaataaattttttttttaattttctttatttatgaaaattttggagtaattttaagtcagtttttagtccatatttggccattcttgagctttttagtccatatttcgggcattttagtccatatttgaagttttttagctggtactcaaaaaatccaaataaaaaatgcatcgtacatcgaacaaacagtgtcattgtctaacagagttacagtattcctcccctctgtcctaccgtccatgcgatggtagccgcactcctgcgcgtccaacactgtggccaacgcgttcgacacacgccatacgcatccccagacgcgcgcggacggtttgcgctcaacggacgctatggcgccctgccaacgctctgatcgatcgaaaaaggtcaactcaaagccgggcaacagtgcggcagtgacgaactcggcaccggtgatctgtgcgcgatggaaccgaatcatatgggaaaaaatggacggaatgccagaggcctcgccgggtgggaatttttgaaaaaacggtcagtaaaaaaaatagaatcggtcaaatttggaaatttcgtttttttcaaaatttctgatcacatagcacacattgattattaaactgatccggaaatggtgattcataaaactaaagacttgggaaacggaattgttgccggactaaatccaatggaattatcgcgcaattaattgtgaaatttacagattggattctacacaaaatccggcacggaaccccgtgccgcaatcaatcgccacttaagaattatgccgaaaatggaaattaaatgccaagaatcattgtatttagtttaatagagtgcccacatggacatggattcgttcagtcaacaaattgctgccgtagctgaaatagtgaaacgcatcatcagccggtggcgcttggtgggcttgaacaaccgtcttctgctcgtccgacttttcttgaatttctgccaccatcacaagcgctttaaaacgggaatttgaattttatttgtcataaaattccacgatccaaccaatttaagactaataatttaattttttcgccatcctccaaattattattttttttaaattgaaaaacttgagatttaaaaaagcagactttcatttagaggaaataattgggggaaaagcggaccgtatttttggcatcatgaaacacaatcaagcttattaacagaaaagtttacctattattgttattttttgctattcgccctttttatgaatattaatcattttcaattttaatagggagggaaaattaaaaaaaaaattgattgacaaattttgaatttggtacattgcccgattattctcgtaccggcaaaattttgcgtttcttatgccaccacaaaacaaaaacgaacgaccgacagcaacacaagctaaaacaattacaaatgagaaaaataagcaaaaaaaacataatataaaaaacagaataaactgcaaaaaataactcacaaacataaaaaacaataataaatggaataaaaataattgaaaaagaatttaacaaaaaaatacgaaaataaatagcccaaatttcggagatttcgacaagtggtggtacaacacaagaagaaatattgtacaaaaaaatagaatggaataatataaaagctgctaaaaacaataataacaaaagaaatgattgattgattggatatcgaaagaaattcacagtgtccaccgaacgtactcgcccgtccggcggcattcaatgtgaaaaagaaatatgccaaaaatgtcaaaatgattgttttttttgtaatgtaagtataaaggcccttcctctacaaaaaaagagccagcatttattaatatagcagacttttgaaaaatacagcatttaatgctttaagcttaatttaaaggaaagtaagattgcatatattttgcgatccgtcaaaatgccaagaggcagaaagggaattttttggaattttgaaaatcaaatttacaatttttttccattttggtgggagagggtgggcaatagggcctgtatatatgtgtgaacacttatataattaaataatgatcgatcaaatatgtcatcagtgctcacaatcagaggtgatcatttagtatctcaatgatttgatcagagtttatcactgatcaccaccatcctcggcctccattcttgtcgacgtttttgatcgtcgttcgccgccggcaacaaaatcggtgacatttggcaactgcacaccagtgttggcgtcaaacccgttctgttgttgttgttgatgctgcattgtctgatgatgatcatcattttctgttgctgctgaaaaaaataattaaaaaaaatcgacagccttggccgggtgttgaacccaagagcaaaacattaggcattctttaaaaaaaaattcggagggggggggggggg

SEQ ID NO: 10426 - DNA, 1481 bp, Heterodera glycines
aatgccgaacgtgccttgttggatgatgccaaatggtgttggtggtggtgttgctgcctcttcatggcgtgcatcattcgctgttgttgctgatgatgatgcttgtactgttggcgttgctggcgccgttgttgctccccctcatggtcctccccatcttcctgctgctgctggtgttgttgctgctgttgacccatgccgccaccggcggcaccgccagccaaaaagttgttcacagccaaattcagttggtcacttggacagtccgcgtgggcgcccggcggtggcgccacgggttggcccgtgtagcgaaagtatggcattttcaggtccaacacattccgttggtggtgttgctgttgcgccgcaccatcgtcgtcattgtcgattgctgccgccgctgcatcggtgtacatctccaactccatgtcgtaagattgtctgaaaaaaggcagattttaattatttcttctaaaataaggaaaaatgaattaagtatacaatcgtaaaaaattggcgagcagctcgttttttcctctcccgccgcatgaaaaaaaaaccaaacagaattttttcaatgaaaattcatgagaaataaaaaaaaaatttctagcaattttttaactattttttccaaaaatcattgtttttttttcttagaattttccaataaaaaggtatttaaggttgctttttaaaattttgcgctactcaaaaaactcctaaatttttttttatttttcgaaatatgaacgcgtacttgtcgttggccaccatttccagactgccccgtacatcttggccggccagcacgagcatgggccgtttgatcaggcagcgcacttggtaccaatgggtcaacggttcggtgggcgccgtggacagccaaacggtacgaccacttaaaaaatttttaaatgtaaaaacgaatttaaaaaaaaatttgaatttcccaaattacttggtgccatcaaatgccacatcgaaccaggaggcgagcccgtgcacatggcatgaccgtttgacattcatctgcaaggattggttggtggtatgtgaaaatggtgcgtaaaacggtgtaaatttgatatttaatttttttacccattaaaaaaatttcaaattttcatacagaaccaataaaaatcaatgtctattaaaatgaaacatatttattgttcttttccctcccgaaaaatgtaaaatggaatttaaattttttttcaaattttgatgatttttgaagaaaaatttgcacactcaaatgaaaaagggggcgggggggggggtcaaccaaattttttgcgaaatggttcagccatgaaatttacgacctttttttgttgctttttaataccgtttttttcgcggtgcgcttttttcaaaaaaaaaattttttttgggggggggtcaggtggtgccgctaggcgccgccggaaattttttttgaaaattcagtgcaatgtgttaacatattttca

SEQ ID NO: 10427 - DNA, 1006 bp, Heterodera glycines
aaaattaataggaacattaggggtcgtcaataatggggggggggggagggccttggtcggtttttttgtcgctgctcttaccaccaccggctgtcggacagtttcgtccagcgctggctctgcagacgcgccaagcgcaacaccgtgaaacgtttgctgggcccaaaaggcggcccgctgctgctgctccgcgtacagcgcgtcgtccgtgaacagtgccaagtgcaaatcggcacgggtcggaaacatacgacctaaaagcaatttatcactggatttactagttattttttaaagagaattattccaaaaaatcgctagaaaaattttaaaatttaaagggaccaaaatgcaaaaaataaataaaacatgaaaattaggcgctggaaaatgcaattttctaaagcgggataaaaaaaaacaaattttccccgatgccgtctaccgacttctctgggacgctttaacgactttaagtgttatatttaaattctttaaatataaatgtccttttgggtcggaaaaaattgctaaaaaaattttctcccgcaacaaaaatatttaattttttttttaattagtggagaaaaatttttttgagcctatggaaaaggtccattttgcactttggtgcttaccccagaaaaggctatttttaaatggtttttttatcttaacctataaaaagctatttttaagcaattttttaaaatatgccaaatattccattttttgttgcaattcgatttcctaattaatggtgtgcacatttgtaaggtatgatttttgaaaaagaaaattattttgaaaaaaatttactaaccgccagggcgaaggaatttgcgcgcgaacataaaactctccaacatccgctcgttgaccagcatatagcccatgggctcggatacaatgatatcgaccttgaaaatatttaatttttacgactcgttaaaaatgtttttttttggggggggggaaatttatttaacgagaattctcgaagaat

SEQ ID NO: 10428 - DNA, 5696 bp, Heterodera glycines
tgcgcgatgcgcggccgcggcaatttgaatgcgcgatgcgcggccgcggtttttttctgtgcgcgctccagccctgctcctcatcgatgagcgtttcgcttctttttttttgcgggtcccaaaatattgattcaagggaaattgattaattagcgaatgcaaaaaaaaaaatttttttgaggtgcatataaaaattgcagttaaaagatttagttaaaataatccctcctcttctgttcttctctttcgacctacgacaatttttaatgcgttaataaaggacatattacaaaagcgtgaatgcgttttttaaatctcggtaataaattctttgtaaatcactatcatatccgaacttttcacttggtgaattaacaattaaaaatctggtattttaggttctccatccagtaatcaaataaacattaccctcgagaccgaaaattataatgcgtttaaaatttatagaaaaattttttaacgtacatatactctctttgttctttttttgatcctacggtatttttaatgcggaaataaaagtattggattttatatttttgtgcaccaatccaaagtaattaaacaataaaacagtgtttaaatagaatataaaaaagaaataaaaataaaggttttccatttcctttataacatttaaaagttttcatttcctactaaaagtgtgtataaatatatcataagccttatttattttgggcccacttctacggtagggtgtaaaaaaatatttatcactctattttttcgactcaccatgaggcaggattttcatagatttacgtataatatctagtataatatagccaatttatatttgaacaaaatttcgaagttttattttgattcaaatttcgcgaaagaaaaaaaatacgaattgaaaaatgctttttattcgctttttaatttttgcaaatttttaaatcagcagaggaaaacgtaaaaattaccttagacaagaagccatttgatgaaaagctgaaagaaatgtatgaacgagcatatgagaaagtgttgcaagaaaatgcaataattgctgaaaattattatttcgaattgaaatttccagaatttatagattttaattgtgccttctgtggctttattaaatcttttctattatttccaatttcgaataaattcatatggatttataatatggaaaattccgcaatttataataataatattgaaaatgcaaaaatatttattaaaaataataaaagcatctaataagtttaagttttttgattaagtgtgttttgctacataaaaagcgttattaaatattttatttaaatatttttgtgcctttttattgcctattttgcgatttttttcctgcatttttaagtggtgcctatttcgcgatttaaccattatgcgttgaaatattttcagaataagttagtcttgtaccgaggagtatggctataatatttgatgcgtttattacttatagaaagaagagttaagttcgataaaaatattgtaaatataagcctaaaaataggcataattaaaagtggtataaaaacataggaaaactcaaaaatgtttttaagaaaactctgtgattgaaaactcattgaaataagtattgttctcagctgataccctgtcccagtatttgatgcgcttctgatcactattcgagaaattataaggaactggtattcgctgtaattaaattactaattacaaattttggacaagaatataacgtttagtggatcaatttttagaaaattttcaaatttgtaaatatttcaataatgctcagtcctaaggggttatttatcaaaaaaatttaacgtagaaatgctattttttgagcccctttcttcatagtataagcgcagaaaaatattgcaaaatcattctatttataaccctaataataatcaccaaatttgccctcctccctttcgcaaatgaatgagaatcagaaaatacttgattgacaatgtttgtaagaaaatattgatatcgtttcttttgcgcacttcttcctgaaactgtttatctgaacataccgtacttgtttttcaacccatctcgaaaggagtgttctaattcagagggggttggttatatttttcaaccttcattttttcaaaaaatccaacaaaaggtgacgttttttaagctttcgcaaaaatacagaatttttttttcagtgattttaattaaaaatgttattttattttcaatttcggcaataatttcagtacataaaatattttcaatggtctgataatttgtaaaatgtataacaaaataacgtatcttcagtcaatggagtctgcgattttggcgtttaatcaaatcgcccgtggcttttcccaattcccgccaaattctatctggattaaatggtgcatacctagttggtcttgggtggtgggcacagtgcgtatccctcactgttgtaagtttgtccggtttcctaaaagtaccttcccaaatttcttaataattagtgccgtaaaggaacttttccaattttaaactgtgccgaacattttcatattaatataagtattgttgtgattaggaataaaatgatggaatattaaattttaacacattatgtgaagtgatcagaatatacgaatgatgtgagtgaagctaatgataatgacaatgggtgtaaagaagtgatcagaagagaacacacaaaaagcgtacaaattatgccgtggaaaatgtggcgataatcaatattaattaattaatttgacgaaaaaagattgcgtaattgaccaatcaaattacaatataaagagcattctgttgacaatgtgtgaatgatgacacaactaatttccgctgtgattatttggagaaaatgtgagcgaataatggcgagacattttccgaattttagcacatttcctcgtcaaaattgttatattggactgatcgagaaattatcgaaatgttttttttctgttatttgtcaaaaaaaaacgttccggaatttcgaatttatatttttaacggcatggttgaaaaaaaactggcctgcactaatgaattttttttgcttatttgaaatttttttaaagaaaacttagggttgatcagtacacatttgcgtttttaaaagttcaataaaaaaagctaaaaatttgaaaaattccatgtcgattctcaaaacaatgattttgacatggaattgagagagaacagccagttgtagaaaacatggattaataattaattaaattctgtgggtaaaagtggccacgcacacaacacacaaatacaatataaaataaacaatgtgtaattaattaataatatgcacacaacacaaacaaaaagaactaattaaacagcaacagaaaaaccatgtgccaaaaaattgaaaatggaaaatttgtcaaagtgttgagaaaaatgaaaaatggaacacaatcttggcgcgctagctgatggcattccgcgccatgcccctcattaggcatcattgattcgggtaattatggcggcggctttttttctttggtgtcattcgctcgtcggtggtggtcgctttggtggtggcacggagggcggcgttggaggcgccggcgcggaaccaacgccgtgctgctggagcagcaacgcggcggcggccgactgcgcttgtttggcacgaaacgcttgcgcattgatcggctcctgaacggagggaaaagcggaaattattttaatagtatactgtatgttttttactcaatctcggtacggtattaggcgaaaacacccaccaaataataatcgctctccgggtcgttcgggtctgtaattggttgctgatgatgggggattacggtcgttgcggttgccgctgatctactagccgcagcagatgcttaaaattcacagcagtgaatagagctatcatcatttttttaaaaagtttttcttagtctttgttggcagtctaaatttcctagttaatcgacaagcagtgaaaaaacccacgaaaaaattttcaaaaaatgctaaaagatattacaatactaatttgtatcttaattacagtatgtatgtccatgaaaagaaataggcaacatcctgttatgtaaaacaaaaaattttgaaaacctattcacaaaagtgccacgaattattggagggggggaggggaaggggtattcaaaacttatggaatacattaatttgtctttttctttttttgaaattttggggtcattaaaaacaaatatgtcacaccgtcagagccgcgactttgcgcgctcattgggcgtgtcgcagcggcagatgacgaactcgccgcgtggtggtgatggtgatgatgctggtaatgggcgtgatgatgaccatggtgctgctgttggtgtttgactgctcgcgccaccgctcctccgcccccggcaggcgcgggcgccgttgtggcggcgctcgccgacgaattggtggtggtggacgacgtcgagcggttgatcgccgcctgtgccgtcggcgggtggttgtggtgggggcgaacctgttcaatgaacgggcggatcagttttggttttaagcacccgaatttcattttcaatggatttgaccaatggggtagaagagacgggaaaatgcaattatttgaacaaatatgcaacaagtgtcttttttctttttcaaacaaactataaatttcttagttttcgaactttcttagttttttttctacaaaaaaaatctctttttttttgatatcttggaaagacaccgatggaacgcggcactcacatggtgagtgcatgccttaatttagaaattttgatgctcaattagtacttaatgttatttttgtacttgtaggtctgcttcctatgcatttaaacttttccgctaaaaattattaaaaatcaaatcaaaatttttgttgagctgccaaattcgaaaaaaaaattcctcaaaaaaatttcaagggaataaaaaaaattcataagggattttttcgtttatttttttctaaaatttgtttcagtaagattttacatgattaaaaaatagatattttatattttttttctttgcggtctttggcgtgcatcggtgtttcaacttctcgagaccgtgggcaaatgatttgtccggacaaaacagcacatactttttctgctgtgttccccgcactgcccccgggcgacgcactcggcgatttggccgtgttcaggtccaacaaattctgcaactccaccacattaccgggacccatgtggaccatgtgcttgaagttggacggtccgctgatcggcagctgactacgacgatcagttcgactgagggaaaattgtttcgtttacaataatagtcatttttttggtgcggttttgattactccttccttagacatgtgtatcagggatggcattcgaggccacaaaaaatttcggaaatcgggattccgaccccaaaaatgaaaaaaaatccttcgaataaaaattatctaagaattatattaatttattattacaaattttaaaaatattcaattttttggcattacgattttggctcgtcctttgcgttgcgcattgaaaatttgcgacggcgcttcatctgctgagatggcaaaacagtgccggcatcagtggggccgccactttggcgccgattggcctccgcaacaagcgatggcaaaaactgttgctcctcgtccgctaaatgtt

SEQ ID NO: 10429 - DNA, 2801 bp, Heterodera glycines
aatttttaaaatttcccccgccggcgcctatcggcaccgccggagcccttcttccccaaaagttttttggaaaagcgctccgaaaaaagtgatgtgaaaagcaaatctgaatttctattaatattcgatgatttagtccaaaaatgattaattgtttgaaataattgaagaaaatttgtttgaaaattttcattaatttaatttattataaaaaaccaaataattttgtattattttcacttgatataaattaaaatttgaatttttttttaaatttttaaaatttttttgaatttttaaaatttcccggttcgtcccggttcccggtttttcttgcggtcccggtcccggtcccgaaaaaaaatcgaggtcccggtcccggcttctcaggtcccggcaagtcccggttttggcaaaaattcccggtcccgtggcactctagttttaagaaacgacccagcacggcccccttttaatgcatcccgccagcccctaaaaattctttttcaaaatatcattattttctcttttttggaaattttttgaaattttgaaattttttcaaaattttcaaaatcccgcaatcccgcgctcaaataaatatgggaaatgaatttttgagaaatttttcctttatcagggatgtgtatttttaaaactttcgggtcgattcttaggagtatatttttcgtttttattgcatttttgtttggtgaaaataagtttttttaaaattttttttatggtttttaggtgctaaaaataaaaacctagaaaataggtgtgaagtaaaaattttttaaataaaaataactaggtattcttgttttaatagaattttacaaataatttcttatttttttacatatccctgtaaaaagttttgaagaattaactttatattttttgaaaacttgaatatttttggtaaaaattctgtaaacatattggctaaaatcacaaaatttggtcattttttcaaaaaatctacatttgaatagtcaaaaaaaagacaaataataaagcatttatttgtaacatatttatatttcccatgatttttttaaagtacaagcttgtattttcatcaaaaaatttgaaaaaatggcttttactggattttttcaggacccggttcgacccgatacccggacccggtttaaaaccttggagccggacccggcttttctagacccggcaatacccagagccgatttttgcccaaatacccggactgtaacccttttctttgttcgcattcaccggttttatttttttattaaaatttataatattcccaattgctctgaatcatcatattccattttcattatgtaaatcgaccactattattcattttcgttgactgaaatattttcattcatttgctttttgaatgtttttctcattttatgtgcattttcattatttcttcatataaaacaattttattactttttgttttttaatttaaaaattataagctcctcagccccgccctcctttaattttcagcgaaaacattcagtgattgaaatgttaattggagttttgaatgtttttatttaccgtaaatccgctatttgaatgcccgggcattctattgttcaacgcctccaaaaaagggcatttaattggagggggcattctaccagagaggggcactgtattgttcaacccctcaaatctcggaaattttttttgcgagtcaaaaaggggtgaaaaccatttttctaaccggttttatagtgcagagcatgaatatgagtattattttacgttttacaaatttttgaattttttaaaaatttcgaaaatttttcattttggccctagggaatttggactcgtatttgaaaattcataactcatttcaaagtggatcaatttaagtacaataaagctttaaaaatagagaaaaataaggagaattttatgaatttattttaaatttctatcatcaaaatgaaaatttttttccagaaattctggaaaaattcgaatttcagacaaaaaatcagaactcggttctcaaaggatgttttcgaaaattaatatactcaaaaaacccgcaattttttgctctatagaactgtatttatttcatatttctactatttttttggaaaagattagaaaaataaaattgatttgggaatttgggaccaaaggggggagggaccacatggtttctgagtgggaaaatttttttcacccaaatttagctgaaaaatactttttataggtattttagggtgttgataacgaatctgtaatcagatttcgctttcggcatcgacaaacccccagaatccctgcggatatacttgatccctcctggaggggggcattttattggagaggggcattctaccagagaggggcattgtattgttcaacccctccaaaaaagggcatttaattggagggggcattctaccagagaggggcattcaaatggcggatttacggtattccgctttttctttaaacttcaaatttctttttttcgtgacaagttttgcgatgatgacagccccgggaagcttatctaaaagaaattcttttttgaaattcgttaccgctctcgacttgcctgcttgtacttcttgccaaggtgtgaaatcagttcacgcacgtgggcctcgcctcgtgtctcacaaatcacccggacgcatacagaataaatattggccgcaagccatgctctttcgtgaaaaatgtctttgatactcgcaccggtttttgcgatttcgtttgtcagctctgccattcctgtaaaatttggacggggccatcac

SEQ ID NO: 10430 - DNA, 953 bp, Heterodera glycines
ggggggggggggataaagtgtggattttgtaaatccattaacacaataaatatccatcaagggaattaaatatatgtttatataatggatatttttacagcgattttttgtctttggaatcgaatttttaagaatctgggccaatttttgaaaaacgaaatggtggtcaaacatttccgatgagttgtccaaaaactaaccaccatgccatgccgtccgtgcacatccctccctactttttaaagattttatttttatacgaaaatttttttgtatggatttccaattttcgggtcagctgtaagaaattctgatgccattgttcaagtattaaattttaattaaacctgagaaaccgttgcaccgaaatgctttccaaattatattaaatgaaagaattgacttttatttcaattacacattttcatttcagcaatcctcggcactttccgtctcacttttggtccattccgtttctgtttgccgacgatcattggtaaatacaattttaggcgtcttttcatcataattccttaatcatatttattttttagcttagggcattaaaaatggtattcaatttgtcataacttttttctaatatgtcctcatctcaggcccgtaggtcctcattaacttattttttcactctcttaaggcattgtgggaacattcaatgtgtttttccttcgccttatcaacatgggcggctttgcctaaagccctaattaaggtgggcaaattaatatttataatttcgattttttatatttcactccggcacttttctgattcggaacgggccaaatcagccgtcaataattataggatggcataatttaaacgctttcaatattttaaaaagatttatatcctaaattttgaacttgttttgttggcttttacttagccagcattaaaaattgaatgtgttttacgagcatttcacatga

SEQ ID NO: 10431 - DNA, 2702 bp, Heterodera glycines
  unsure (1)..(2702): unsure at all n locations
tgaaattcatttcttaggtcccaactgtcacaattcctttttattttgncaattttaaattttgccattcaaatttttcttttttaaaggttgaagttttgcgaatgattgacgatcggatggtcccatttgtggccattttctttgttgcctatcacttattcgtcactttgattgtgctcagtctttttgttgccgtcattttggacaatttggaaatggacgaagaattgaagaaggtcaaacaactgaaggccaaggaagcggtaggaaagaaactcgaaatatgaacggcacccaaattaaaaaaaacagaaaaagacttaaaaccttaaatcacagctatatttttaagcaaatttcttttcagtaatttgattttatgtccaaaataaacgcatttttaaaaagtgctttacaaaaaatgcaaatttattcaaaaaaaaaaacattaatgtggcaaattaaaataaataattgctattaaaatgaataattttcttttcaattattggaatatggctatgtgaaatctgtgcacctaaatgcctttagatcagcagcatgcgcaccattttgccttggcgtttgcgcatttttgaaaagtttcccactcggccacaaatggtacagctgaagcgggtggacaacgaatttgcgacaccaaaagtgcgcgactcattcaccaaccaagtgggtcaaatttcgaagtttcattttcctataattttaaatttttttttgttttagtttgtatggaaacagaatgccgacgaacagcgacttccgccgattagtacggaatttgccgacaaattactaacacgattggatggtactgtagggaacagtggaaaataaaccatgaattatggcttggtgaattggtgcccacttacaaaaattgagattatgtttatctgagatctataagaattttacaatctcgagatctaagaatttaccaatatgtgtttttaaagtacccataaattaaaatggcacaatacattaagaaaaatttcggtatttttaaaaattgtcatgccgaaatgatcagaaaacccaattcagaggttggacatcgtcgaattttgtccaaatttgtcaatgtgaataagcatcgcttttctgcgcaacagcaacaactgcaacatcagagaaccaattgcatttatcaacgtcacattggccaatgtgcgatgcgattactgctcaattcgatggtcaagtgggtttaattatgaaaaaatttcaaatttcaaaaatttttcagaaattcgtccaaaaattcggccgtggccgcgttgatgggctcgttgcatcatcagccgacgagtgccaaaagtcggcgtcaaaagccgatgagtttcttcgagcacattctgaccgagaacggcgacattaaccgggcggagggaccacctcccgccggcggggcagggcaacaacaaaaacaacaacaacaacaacagactcaaactgctggtggcacaacacagcccctgcagaagcaacagtcgacggcattgcttggaggtgatcagagaaagggcagttataataaattgggtgatgatcagatgcgtgatcattgctggattggggagctgggacattatagtcgggaatatcgtatttatttaattcgaacccccggggctcaattttcaaccaccctcaaaaggggggttctaattaagagggtttctaattcaatagatgcttcggtgaaattttgaaaattcataggtataaattagcagtagaactcttttcaaaatattgcccaaatgtttgttaattgtgcaggtggcggcaccggtgccatttcggcaatcggcagcacgcgcagagacttgaaacagggccaatttgacattcgcgcactacagcacaagcagcaaatggccgaaatcactaggcacgaaaatgatctattcatttaatttgcattttttctgatcagaccagttaggaagggcaaatcacattagacattttttagatatgctttggtcatttctaagacgatagtcaggcatctaagttatccgttttattagattagatcagtgatggtattcgttatgcaaggacatccttgaattgtgccctttcacttgaaaattttaaaatatccttaaattcaagatttccttaaattgagcattaaaaaaaacttaaaacttaaattttcaatttgaattttatactaaaattttttattaacttatgtcattatttttaaaagtagacattttttagttgtgatttggtcatttttaaggtgctgatcagacgccaaaagctatctgtctaattagactagatcaactagtatcgattaattctgaataaaaaaaaaattattttttaattaaaattgtaaaatattttataaattttaggaatcggattgaggaggaaatgcgcgagaatcacccttactttgatcggcctctgttcataattgcccgtgattcgaaactgcgccggttctgtcgtcggtttgtgcacgcccgctggggcttcgatgtcggcgctgaaatgggcggcgaagcggcggcagtggcacaaatggtgccggacgaacgccgccgctggcggtggaaagcggncccaacaatacagtaagaaaatgggcattcagcagcacatcataaagatcattaattatacgctaaagtaaatacaaaagc

SEQ ID NO: 10432 - DNA, 2579 bp, Heterodera glycines
aagtaaaatacaaaaactttttccctgttgaagcagtctgatcggtctgatgccctacttggactgggccatggttgccatcactttgttgtcctgctggtccatgctgctcgagtcgccgtggccaacgacgggcgaaaatttggtgatgttcaatttctacctgcaaatcccggactacctattcgtgttggccatgagtggtacatttcaaaatatttttaaacatcagtataagaagttttttgtatccgtgtatttcatttcatgtctcatcttcctcaagaaaaaatttaaaaaatccataaaaaacaaaaacgtactaaatttttaagaattgattaaaaaaatgaacagttgattttttgattgaattgtaaatattttctttaaccaaaataatcagtttacaattttcaatgacttaaatgccaacaaaaaaaaagatttaaaaaagtctttacaaaagttttaatttccaggcttttgtgttgtgcatatttctctttaaagaataaaaattataagccgaaaatcttttttaatttcgaaggatttcactaattataaaacttataaaacaaagtccaatatcccctcatttcaacattcaaaaaaggtgaacttatggcaaaagtgatcgctgacggactgttcttcacgcccaatgcgttggtgcgcgactttggcggagtgatgaccgtattcgtctacctgaccagcttggtcttcctgttgctgatgcccaaacacgtggagatcaattcggtggaacagtttctgatgatctgccgcgcgatgcgtccgctgcgcatttacacgctcgtgccgcacattcgtcgcgttgtagtcgagctgttccgcgggtttaaagtaattaaatttgttggatcttaaattgattcaaaattatggtatttctacgtttttaggaaattttgcttgtgaccattctgatgattgtggtgatgttcatctttgccagtttcggagtacagacagtgggcggaaggtgctaatattaataatttgttatttatttattaatacgcattttaatcattctaaatttgctcatttaagattggctgcctgtaatgatgtgaacgtcacacgccaagtaattaaattgaaaatggctctaaagcaaacattcatttgggactatgaatttcacttttataggttgattgcacgggcatgttctggcagaaaatctttgtcaccagaatggaggtgtacggtaagaaataatttttgttttttagcttaaaaaccaaaacattgattcaatggcatatattttgttcaaaatttaaatgtttaaattgatgttttttattactttaaaccaaaagcattaaacttttcaaaactaaattaaatttgatttatttcaaggcaaaaacagtgacacgcttcatccaaaagtgcttgtgccacgcgtttggtccgttaacataaaggaaacaaattaataatttgggttatttttgaaggacaaacccgcgaaatttcaattttgatcacattggcgcggcaatgtaaaaataacaatatgtaattaaattaaatattgttttttatattttaaaggttagcactgttcgaaaccttgtcatacaaaggatggaatgtgatcagagacattttgtgggcacggcaaggccctgtaaaatttggcaaaaataatgcaccttaattactctcattaattgggttttgcatttttcttcagtgggccgttgtgttcatccacatttacgtgttcagcggttgtatgatcggattgacattgtttgttggcgttgtgattgccaattacaccgaaaacagggtaaatggattttatcatatttcctccgatattcacaaattttgaaaataatcttgaaacatttcgagcggctaacaataagaccaaaaaacggttgtagggtttgcccacgacaaaatattttctggtttcggtctgtatacctagaaaaccattctaacatcggcattttttcccttttcagggcacagctttgttgacagttgaccagcgacggtggcatgacctgaaggctcgtcttaaaatggcacaggtttggtgccaaggctctcattttcatttatcgcatttaaattcttcccaattttcagccccttcacatcccaccaaaaccgtccgaatccgccacatttcgtcgcaccctttacgagctgacaatgtgccggctgttcaaccaattcttcgccgccatggtggtactgaattcggcaacgctgattctgccgtggaatgttgaggaggaggaggacaaacaccgattactgtacattgtcaccgcactctctgccattctcaatatgcttttcgctgttgaggtcaaaatattctcgatcagattatttgattttaaaaaatcactttcaaaaaattttattagatcaaccaaaagagaatttttttcctgctgttcattatcaaaaaattaaagataatttgtggagaatttgaactttaattttaatttatgcttttttgaaaatattgctattttatcccttttccgaagctttgatcaatcaaa

SEQ ID NO: 10433 - DNA, 2166 bp, Heterodera glycines
  unsure (1)..(2166): unsure at all n locations
tttaaaaaatcatcaatatgatttgatgaaaaattatttataacttagctcaaaagcaaccaaatttttaattttttgagttcctctagccataacttttttgaaacataacgaaatttttttattttgtagattgatagagtataattagggctatcgaaagatatcaagaataaaaatttggttgctttttggctaagtatagataattttcataaaatcatattgttttttttaataacgactccgcccccttgagtttatgtcgataatttttgtagaaccccgtcaaaaaactcgctgggccataagttgattccagaactctatctcgaacccctggcctggaaaaatctacataaattcagtactaactttatccgatcgagtcccatgcaaataatgcgcaagagaagtttgaaacgtttaattatttatcaaatggcacccatatattaaattatgcatgtaaaatcaccattttaaagcaaattcaaaattattgtgataatgtttccacatttaatgtttcttaatgcaaattaatcctttttataatacacttcgtaagagggaataataaaatctttgaaaataatataaagttttatccattactgagatacaaagaaaacaattataatatggtgtatattgcgtttttctatctattaatgttatgctagactaattcatgatcagttccgaacaagatcattcgtttgacctcataaattaattctacttccaccgtaattaattcgaacacttcccgttggcgttctatcaattgaaaaactgccaccacaattaatgcgaccactttccattttcgacttcttaatggttgcacttccaccacaattaatgccaacatttttcattggcgactccttcatatttaaacttcctccacagtttaactttagactttgcgctggcgattctacaatggttaaacttcctccacagtctaggttgccaatttccattttcgacttttcgatccgtaaagatccaccacagtcaatcccaatacttcccattggtgactcaacaatcccaatgcttccaccaacatcaatctgactgctttccattttcgatttttcgatccgcaaagatccatcacagttaagccgaatatttcccattggtgactcatcaatacttaaactcccaccacatttcatttgcgcattacgttctattggtgagtgagttacatttaaagatgcatcacattcaatgttagcacactcaagtgacgaattatggatatgtaaagttcctcggaccgaaaaattgtaaaaaacactcgtcgatcgaaaattaaagcctccacttgttgaccaaaagttctttgcagcggcatccttttttacatcaacgcataatatgcgaatacagtcatctgccgattggtcgatatataaatttccatcgcattcagcgtgaatatgtcgcgtttgcccaacggttatgttttcgcgagaaaataacgataatggcacactgacaattacatttcttatgtttttgtcttgtataatttccagatactgctctgtggccctgttttgataaactctcccattcacactcaaatcatgcccttcaacaccaacattaacattaggtccgtcaactgagtaaatttgtccatttatcgaaatgtgattgtcctcggtgcgttgttgacgcaatgcatgagtcaaatctgaaaaagttaaataataaattacagttaacaagaaattgaaaaaaatattaagcttcggctggaattacccataccagagcttattgcgtggcctattccatcatttaatttctattgctttatttcagcgggggtatatcttgggcactatttgattctgctgccaaataggccaaccatccggtgcccagaagatatttccggaaatgatactttttctcgtgagctgactgttcgatattttaaataagataagttcctatgctagatatgcccctaataatctatttattttcataactattaattttctccatttttatgatgaaaatttcatgcataaatttccttttctattcctccatcttctgagtaccaaaaaattaacaacctccagtattgctgcgattatanagcccttgtgaacttccnatctcctgagt

SEQ ID NO: 10434 - DNA, 1446 bp, Heterodera glycines
  unsure (1)..(1446): unsure at all n locations
ctgagtacctccaacgtttcgattgcctccaatatntaaaccaaatgtccctcctgtcggcatctttcctatttttatgcctccaatcatctgagtaccaccaacgttgcgatttccaccagtatttaaatgaagagctcctcctggtggcattcctccaatttgtatgcgtccgatgtcttgagtaccaccaatgttttcattgttttgattgtttatatgtgtaaaatttccaccgattagctctcctctcttttgctgtttctgtttattcttctgtttttcttcccgtttggtgtctccaaaagtgggttttccatcatgcttgttatgtccagtgtttatataatcagagtttcccccaatcggaatttctggcaaggagacactccctgaaatttggtgaccaacaacattcgtatgtaaacgtgcattatttccttgatcatctcccgccgcactcagttgaatgcctaaaaaagttaaaacgaaataagattatggcaagcaaacttcgtaactgataaaacatttagcccgttaagaactcagaattaatagtggaaacctcatcgagaaaataagaaataaataaaactaacttcggcctgatgagccgagaacgggaattcgttcctcaattcgattgatataattgatataaccagtggggactgcatttttatataactttccgtcgactaaaagatccgtcccataaagaagaacatcataatcgggtccttcagttggatatttcctgccatcaatgtcagcataatagcggatatgttgttgtcgaattatgtcaacgtctcctgcttccattatcggcaaagctaaatgttattaccacaatggaaaaatctcgcatatttacgcatgtcgattttgtagtaatgccgattagttaaattaaatgatattaaatagtttgtgccaatattaaaataggttataaattggtacacctaaactaaaaaaattctccaaccctggaaagcaataaaaaacttattcataaaaaatattttatattgtctaaaaaggcagggggtaccatcagtgtattaccaaaaatgctactgatcaacgtttgcttgtgcgataaatttgggccagagaagcgaggatagagcggaaaataaactcaaaaatactaaattatttataaaatatttccgatacgtttgtcagacacttttggtcggcagctcgtttcaccacttttagaggtgagtaaacgatttccaatgtttccattaatgatgcatcccggtgcctcttaaatattgattaacattattttttgtgaatcaatttctctaccaatatcaagatgattccccggtggcagcacaccacgatcttcgtcattgataaggagatgttcctccttttccgaatcaataataagcggatgttttttaaccatctgaacttcaa

SEQ ID NO: 10435 - DNA, 4433 bp, Heterodera glycines
tttcaaaaaaaacaccccctaagaatcgactcgaaaattttcaaaaatacacccctaagatatgaaaattttttcaaaaattcatctccaaaatttatttatttattttcttaacatgaattttgatttaaaaaattatttattcaatactgatttggcataattttttgaatacattttgtaattttacaccccctaaaatgaggttttttagtgcctattttccatttttagagccaatttttaggatttttagagcctaaaatcacatctctatttttcttcttttaatacacaaacattattcttttttattttagacgaaaaatgataaaaaaaatagatgacaataaaataaaaactatcattcaaaaaatattgggagtatactcagggtgtcatagaagaatcttggaaatcagaacttcagaaaatcagatttttgctcaatatcaaaatattttgcaaaactttattatttctattttattcattcaaaaatttaccaaatataataaatattttcaaccaagcattaccaattctaacattttggagaagaaataagtatatcaaacaaaaccagacttttatttttcatttttagtgcgttttgaattaattttgttcaccaaagtccaaattttgcgattttgaggacagtttttaagggggaaaaaagtttagaggattcgacgttggggaaatttttttggaaattttggctctatttgttaataaattttcataaataattgaaaaacttgtggaaatattttttgaaaaatattaaaaaataaaattgcgggattttaagtcaatcccatccctggtattaacaaaatttttgtgaaaagtaacaaaaaatcttcgataatttctagcgagatttcatcattagggggtgtatttttaaaaaacgaaagaaaccggtatcccagttttcggtttagatttttggcccaaaaagccggttttcggttcggttaaaggaccgtgacctaccctacaaaaaaggtcatttgcggacaaaatttataaacaaatacaacgaaattttacaaaaaaattttccctggaggcgcctgttgaagcagcggaccatcaaaacctaaaaaattttactcgaaattctaaattaaacatttttgatgaaatctgccaaagaagcaggcaaaatttatagttaaaaatccttaaatggtaaattataaaatattaaaaaagtaataaaaatattattattttaaaaagctctacaaaatcacaaagtctttgtaaattcacgtgaaagcgtattataagaaaagcagcaatttccgcaaaaaaggttttttctatgtttttgtcaataaaagccacgtccattaaggaaatgaaaaatggggtatttaagcgaacagaaaaaacaaaaatgacatcacatatatttttcattcattaattaaattaaatatattttttgccatgtcttctctgctgctctccatcttcccaattgtgtttttggtctgttgcaatgcaatgccaagtaaatgcaaataaatttaaaaaaagtcatgttttaaatatctaaagcattcaatgtaataggcactttttataaaattatttaatttaaattccaaagatttcccgtgctgcccgggcagtcagcaagtggttgctgtgatgtccaaatacattgacactttctcttctgctgctgacgagtctacagtatgctcaaccgctaaaagtactgtggatggaataaaaaatgaactgtcctctcgcggcggatgccaaaacggaggagaagcacaaattgtggatgaaatcgatcgacagctgaagagttcaacaaattagaaaataattaaatgaattttgagagaatggtacattttaagaaagagtaattaatttaaaaatattgaccaacttatctcattaagacattgcgaaaatggaaatcaattatgaggacgagtgcccgtacaatttgggctttgcccgtgccatgttcgacttggccgctgctgctgctggccatgcggggaacggcacagaatggcaatacatgaaagtacaatttgagcaggaaagccaagcaatcaaagcaattggacaagaaaagaactttgaagttacggatgtgcacattggagtcccaagcaaaggcaaataaaaataattattgaaattgagaaattaataattttctaggggtttctgcacatcaaaatgtgccgagtccgagccatgtgattgccaaccgtggccaacacagttcggttggccaaggaaagaaagaagaaccgttgtcatcggacttcgatttttgaggacaaacaaatcaggaggaaatagaatagaaaaccattttgttgacatgtcgaacatttatttaaagtaataaatatttggtaataaatagggcatagaattatatgcatatgcatatttttttcctggactgtgggaggcctgaaacgcacgaaaaacatgtttttagcttggttagaagcttctaggccgtacttccatatgcatattttgcataattatgcatatttcgcgatttatatgcatatttgcatattgtgcatattttggcatttcgtgcatattttatgtgcatatttgggcattttttcaaaatacccctattagaccggcacctatcaggtaaattggcttttttgacccctaaagaccgaaaaaatttccgaaaaagacattttttagcaaaattttgtcgatattttgtcatttttggtgcatataattctatgcccaagcaacaaaagtaattttagggtttttttttggagtcaaatatcaatgtccatataaaagcataacttttaacatgaacaacaattaaactagggttggtttcccccgaacatctgaaagaattgttacgtaaaataaatttaaattgaaattaaataaaaagaaaacaaattagaagataaaaaataaataaatgaaaaaaagttggcgactagaggtgggagagaagcgcattttatattaatgtcaacacactgcattttcgtattttataagtggaaacaaaaataaatgaaattgaaaaggcaatattgagaaaatccaggtaagagatttattgataattaaaatgttcaaaattaatgtatcaaatattatatttttcgtctcctaagcaaaaagttaatttcagtgcaatcgggatcaaaaaaatatcagtttttaacaatttttttgcggcccatttttccaaaaaaaacctttgggaagcggggggaggggggtaggcccgccggcagtgccgataggcgccgccagggaaaattttgaaaaattgagtgcaatttattaacagcttttcacgaaaaaaatgaccaactcttgagcaaaccttatatttcttgataaaatagtgtcaataaatttaaaaattatgattgtatttaagaaatcagaacaaattttggtcactaccccaaaaatcagaacatttcttataaataataacagatcacatccctgcctttacaatctcagataaatatgtaaaaatgctactaaaaactcccaattttcatttatggcgatatgttgacttaacaaaattaattaaagggccctgacttttagtgacgaaaaatctcaaaatagttaactaaaatagtgacgaaaaagagccaaaatagtgaaaaaaaaagtgcgaaatagtgaaaaatagtgacataattttcggcaaaaaattaagcaaaaaataatttttactcactgaatgcagttgcaaatgagtaggactgggatttttaagggcaaaaaaaagctaaaataagtagctaaaaaataattttttaaattaaaaattcttgtcaagaaaatgaatttttgagaaaattgtttatattccttaagagtgatttttgaaaatttttagctcgcttcttaggcgtgtatttttcattcttattgcattttttaagaaattttccaaagaatgttgaaatagtgaaaaatagtgacaaaacgccaaaatagtgaattttaacacttaagtgacgaaacaccaaaatagtgatttctagtgacgaaaaatgacgttcaaatgaaaaaatttaaacgcagaaatgcgttttttgagcacctttcttcataactagggttataagtagagtgccacgggaccgggaattttgggcaaaaccgggaccatgacttgccggggcctgagaagccgggaccgggaccttgatttttcttcgggaccggtaccaggaaccgggaccaaccgggaaattttaaaaattcaaaaaaattttaaaaatttttaaaaaattcaaattttaattatttttttttaaagtgaaaataatataaaattattatttattttttattataaaaccccaaaagttaaagctaattaaattaatgaaaatttt

SEQ ID NO: 10436 - DNA, 899 bp, Heterodera glycines
gtgaaggattggcaaaatgagtaatggccaaatggtcagagatagagatagagagcgacacaattttaggagataaatgatcgccaaatgcaaaagcaaaaatttgaataaaagccaataataaatgatttggtcggaatggtcaaaaacagagtgatcgattgttggcgctcatccttatgccgatcagtttcactgctgctgttgctggttgaccgtcaacaaatgcgctgcattcatatgcatcatgtctcaaaatgtaaattaattatttcattataggttattaatttttaaaattctaggttgcttatgaaaagccttgcatttggtatacttttaaatatagcctgtgaaatttcaaaaaaaaactagctgggacacaaaaaactgatggccaaaacctcaaaaaactgaatttttctgctattttggcactggcactcaacaatcttttttcaacctaatatactttttcgaaattttgcaggctaatatagagcatttagacctatgtgtttttttatttggtttcataagaaaaagttataattggcagagccaaaagtggccccgacccaattaatcagctttttaggccactaaaaaggttgccgaaataaccggctttttccgcaaaaaatgccattcggcgcgccagggacggccccacttacgattgcacatattgtcaaggtcagtcacagttgaggtggaagccatgcagcacaattcgacaatgttgttgcagtggagtttgagaagatcattctgtaacgaattaatgagtttgaaaaattttaatgaaaataattataccccaggaaggtaatactcgagaatcaggggctccacaaatcaaaaaaattgttcagttatgaagatcaacccgggatttt

SEQ ID NO: 10437 - DNA, 3532 bp, Heterodera glycines
aaaaaagcacaggttaatcttcataacagaaaaaacactcccactggtggagcccagattctccaattttaccagaggaaggtaattatatattttttttaaacctacgtaattcccgtcctcggctcgcaatcccatttgtcctaaattcttgaagttgggcaagcgacaatttccgtttgcgatctcggccaaagctgtaaataattatttcaaattaattcgttttggattaattattacaaaagaaatatttttaatacagatgaaatgattttaaatgcctcaaaaaggaattaggcataaaaatttttatgtgccgaaaatataatttgataaatattttaatttgttgataattaaaattttaaataaattcaaatttacaaaaaattaacaagtgaaaatattttaaatgtgtttaaagtatatttgggtgaaaatatttgaaactttatttggctaaatcaaatttaaatgtactaaaaattaatgaaaaattattcaaaggtgctgaaaaataaactgctaatttaaaactatgccaaaaataactggtaaaattattacggaaattaaagagtaaaaaatgtaaaaaaaattaaaggtgaaatatttaaaggtgctgaaattacttttgggtgaaattatgaaagcatgtaattaattcctaaaagtgatgcgccatttttggttaatgtaacttaccgttgtaaagactttcaatggcacctctgcgcacgtgctgaggaagcaaattgaagatggtgttcagaatttcttttgcggcgcccttgcattgttcttcctgaaatttgtatttttaatgctaattttttgatttttaattaccccaaaaattagcttagcattttctcacccgttttttcataattataagccattgtgccattcgcttcagtaaaggacgatcaaattttcgggacacatttaaatttgcccattttttgtggaaacgaataaaatgaacaatttcaaaaactaattcgtatggaaggaacttgtttggcatttttttttggtaatgttttggcatgtttcccttgaaagtttctttttttgagcgcagggccgagagattcatatccaattggcatgacaaaaataattgaccccaaaagttataaataatatttatggtggtgggaaagtaattatgagactgctttacaatggcatttcaaaattattaataattgaactctaaaaaaacttacatagaattttttgtccccctcctgttgcggttgttgtgccattggaaattgaaagtgcacggccaaaattggaattcaaaaattaataaattggtttccaattttcttaaaaaaaaacaaatatcccacagcaaataaaaatgactaacactcattcgttcgacatttaaatttgccatcactcctacccccgacggaatttccaccccgctcccctcctcccttcctccgcattatccatctttaaaacaacgaacaaaaatcacacttaggtaaccattacaagtaacatttcccaccgaggttggcacaactcagtctcgcaaaactcggtcccagccaaatccaatacatttggccaacgttgagaaggatcgtatgatcaatcgcctgaacttggctgggaccaaagcggccgagccgagttgtcccgcttcattcccccatttccatcccttttctcctccactttcccatcccttttgaacaacatatcacttaaacgatgtgtgcagattcttttgatcaaaaatgagataagcagacaaaaaattgttttgtgattttaaaattgaatgcttgctgaagagcaaaaatggctacgatccgccaaaatggggtttacgtggcagagacaaaatgaattattttccaaataaaataaaaatctcaggttgttcacaattacacacattttctccctctgctgctggtggggcttttcggtgccaaaccaaaggcgcggcatggaacagcggccaaaaggcttaaaaattttaaattttaatcgcacaattagttgagaataggatttaaaaatatttttcaattaaaaatttgtctttttcttcgaaaaaataaaataaaaataggggttttaaggattttttaaaagttttttctttttaaattcataaaacttagttttttggaaaatatttacattttttcgagaaaatttatttgcatcttataaacgcaaaaaaaaatatataatttattttataaaatcattaaatttaccaatgatgagcccagccatcatcaataccattcctccgccgttgccgtggcgaatggtctctaaattttttaaaaatttctgtactgcccttgaatttttttggtccttgaaaaaggttactgtgtcgtttaaaaattaattaaattatggtccgaacttttgaaaatccgggaaattttaatttcggcgtatgtccttgaaaagcccttccgcacgaccttgaataaacaatccagtgccgcatttccctcctcaactcactcggcactggcgccgacgacggcacaaacttggcattgcccatttccgtcccgttagcaccaaaacggcaccggcacttccaatcagtgccttccgccagcttagaagcgctccattcggcacgatgttcattcacggcattcggtgcttctttggcacacgcctttttcttcgcatcagccgggaagcatgaccagcggttccacaccaatgcgcctcaaaatggtgattaaaacaaatagaatttgaaaatgtaaaatttttggcattttgttgtccgagaattttcaaaaaaaaattggcataaaaaacgtggttacggcaatttttctcgagttttttttaaatttttctttttgcgaaaaaaatgatttaaatcattgttcaccatcattcgctttgcagaatgtcgcgctacatttcattgttttttcgcattcagtttcttccttcgtgttcagcttttcattgagttcgccattctccgattccgtgcgcaatttgcacttcatttttgctgaaattttgaaatttttagtccttgaagaaatgtttgcttgtccttgaaaattagttgtgttcattttgttatttttttatttctcttcgtttttagtcatcatttcgttttagaaacgatttttgggtttgttcccggcacacggcggggaacagaccccaaaaacaaaatttattctctttgtccttgaaatatgtccttgaaaacaaaattttactgtcagtttccctggaaaacgagttttactatccatgtccttgaaaacgaattttacagtccatgtccttgaacaattttacggtctgccaaagttgccattccgtctttgtccttacgtggtgctggcgtcgtcgtcgtcggcctcaatgccggatttgggttcacaacgttcgcgttgtccatctcaacataaacggcgcccaattggcacgtgcatgtccaattgcggccggtcgtgggaaggccaaattgccacgctcattgtcagtg

SEQ ID NO: 10438 - DNA, 927 bp, Heterodera glycines
caatttggtgccacttctgtcccaaatttgcttgttggcatggagaaatgtgatcacggaatagtcaatgtaactgcacaaatataaatgttttaatatattatataatacaaaagtttaaaattacgaaatctgaagttccttaaagcgaattttgttgggcagcgaatggtccggcaattgaaaatccacccaattgtcatcgatccgtacagacagtttcgattctggtccaatgccctcgcaaattttgatttttcgccaaattgtcaattcgcttttcccgtcaaaatgcgtgtccaccaaaacatcgaaacggtcagaaagcaatgccaatttgagtccgagttgagcatggtcaaaagatgggagaatgtccatccaaacgtcgctacaaaaaaatgaaaaaattagaaaaaaatggaaaattttgaaatttataaaaaaaattccttaccgtctattcattttttgctgcaattagcacactgccgttttgacaattaattggcgacacaatcagaataaatatctttgtctcaggaatccaaactgaaatggactaaaaaattgatttttattcaaaaatttaagtatttctagctttattattttttccattaccctgcataaagtacaagttagtgaaatggggcgataatttatgggattatctgtctctccttttttgaagacagggataagtaagggatgccatcaggcgatgtcgaatttcttctagggagttttttcaataaattccaaatattatagacattaaattcaatgtctgtgatctgattagggttttcatggctgagtaagtcattgtacaaaaatgacttttgaaaaacatcagccaataaaatacatttttgttcattccgaaaaataatgtgcccttgttcatcaatagggaacggattt

SEQ ID NO: 10439 - DNA, 2191 bp, Heterodera glycines
aattgttgatgatcaaaataattttatttttaattaaaaattctttgttataaattatttttattttttattttcttgctattattcgatagccctatgtgtcctctatcagcctgcaaatggccaaaaatattcgaaaacctggtctcttgggtacttttggccatgactttgctgaaacttgaccaaattttttgaaacttaggtgaactaatagagaactctttgggctatcgaattatacaaagaatgtttctaatttggttgactttgacaaaagtcatgggtagggaacggatttctaagtttttgcttattttttctgcggctttaactcgacgagaaatgcacgaaaaacacattttttgttcgaaaattttgtgttttaacgcacttattcgaacttagaaatgcttattttggcgtttcgtgcttaaaaatgcttattttagaggttcgcccttaaaataagtttttgtacttattttagcgttttatgcttattttcgttcttatttcgcgatttttgggaaatttattaacaaaaatgcaataaaaatgataaatacacccctaagaatcggccaaaaaaatttcggaaaaatacacccctgagaattgacctaaaaattttcaaaaaatacactcctaagaatccacccaaaaaatttcggaaaaatacgcccctgagaatcgacccttaaatcctgaaaatttctaaatgtacttcatttctaactgcaatcagtaaataaaattgtttgacttaattttaactaatttacatagagaaaacagcaattttaacaaatttcacctctacatttggaattttttcatgcttattttcgcacttatttcgcgcttttttcgcccttatttaagcacttattttggactttttcgcgcttaaaaatccgttccctattcattaacacaccgagtcaaaaaacgagacatgtgtcaataaagagagagtgcagagaaaaaaacatctctctttttggcgtactatttctttatctgtgttaatagagaaaaactgaatttacttcattgcttacaaaaagcttctcctcataaagagctttcgaatgataccaagatggaccaatttggttggtaaaaacctccaaaaataatttttaaaaatcgtcattttttaattttttggacaaaaataaataaaaatattcatgttgcacaacggactcgaaccaccaccctttgtccctttactatcttacaaaaaccacttcgccacacatgcaaatttttttggaactgggaggccaaaattgaaacggtgtgttaattaaatggcaaatatttttgtcgacaaatcactgtgaaaaactcgacagaaggaatatgtatgcccaaagaaaaagcaggaaaaagtgaggggagagggggactatggtgggccaatgtgtcggcgatgtttggccaatgagcgaagtcgagcggacgatggaatcagtgccaaaagtgggggaggggcggggcaacagacggacattccaacattagctccaccgataagatcctccaacccgagaacagccaaaactgggggattaacaaaggacaagccaccggattaagcagtgtttatgctacaaaatcccaatccaaaaaggattttattagattttatgtccaaacaaatttgttggagaaaatgtgttgaaaagttccaaagcttaattgatccattggatataagagaagagataaaagatttcattagattgaccagacgaagtcacaaaaagtgcataaatttatgtcacaaaaaaacgagtcgaaaaaaaatgtgaaaagccatatttccaaacttagccatttttcaatttttaaataaacattcagcaggaaaaacacccattataattttaaatggtgtgtacaaatcacagatgttatttattgtaacaaatggttgacaacaacagcaaaacaattgaaaagaaaggcatttataataaagcatggatcgacttattccgcccaagcagctccgccccatccaaaattgccatgaccaaaaccccccgcagccgcgccggcacgtctgcgcggctcctctctgaggtacggctcgtcaaagatcacttcgacttccaccgtcaccgtgtcgtccccagtgagataccatccgtgtcagcagacatcaatttctgagaat

SEQ ID NO: 10440 - DNA, 3194 bp, Heterodera glycines
ctacaaaaatccgcaattttttgctctattaaataaattttaattcatatttttatcacttttttaagaattgttataaaaataaaagtgattttggcattcggaaccaaaggggtgagcataggattattgagttgaaaatttttttcgcaaaaatcttccaaaaacatgtctttaggggttatttgggccgctgatcacgaatacgtgatcagattttacttttgacatcgttaagccctcagaatccctgtgtgattggggattctgaggcatcatttttgggggggggcgaagttcggatccgatcggtgtacattatttttctgtgcattttttgattacttttacatgttttattaattccaaatattttttataaattatttaaatttatttattttttttaattaaagaatttcattatttattttttgaatttgtaaaaaaattaatttaatttcaaattaaatgaatattcaattaataatttcaaacgttgtttttaattaataactaccatttttttcattgttttattcatttaaaatattttttattttattaataataaattacatttttttatttgaattaaattttttttataaataaatgttttggtttaaaattaattatttatttattttaattaatttaatattgtttgtttaattaaatgttttaatataaaattaatttcttatttatttttaaataaaagaaggaatttattttataatttttaaaaaattattaacacattcaatttttaattatatttttttataaaaccatttccttatttatttaattttgaaaccatgattttacccttttaaactattattgtaccattcctacaatttttgtacctactaataactgttgtactcttctaatcactgttttgcctcttctgatcactgttgtacctcttctatttcctgttgtacctcttctaatcactcttgtacctcttctaatcaccgttgtacctcttctgatcactgttgttgttggacgcgtgcggacgcttcgcgcccattttgttggactgggcgggtgcttagcgcccgtttttaaatagtgttggactgggcggcgctatacgcccgtttttaaatcagattttacttttgacatcggcaagacctcagaatccctgtgtgattggggattctgggacatgttctgaggggggggcaggttcgaatccggacggtgtaacatatttttctatttatttttgagttatttttcaatgcttttaattaatttgaagattggttgtaaattttaaatttttttttaataaataatttcattattattttttatctgtaaaaaataatatcatttcaaatttcttaaatattcaatgcattcgatttttattctttaataaaaaaacttttccttatttatataattttaaaccatgttgaacctcttcttatcactgttgtacctcttctattcactgttgtacctcttataatctctgttgtacctcttcaaatcactgttgtacctcttctaatcaccattgtacctcttctaatcactgttgtaactcttctaatcatttttataactcttctaatcacttttgacctcttttaattgctgttgtacctcttctaatcactgttgtacctcttatgatcaaacgggcgcgaagcgcccgccagagcccaacacaatttaaaaacgggcacgaagcgcccgtctaaggcagcgaagcggccgagaacacccacatttagaaaccgggcgaagcgcccgactgaggccgcgaagcggcttaacaagctaaaaaacgggcgcgaagcgcccgtatgagttcaatgaatttaaaaaacgggcgcgaaccgcccgtccaaggccaacaaaaattgaaaaaccggcgcgaagcgcccgactgaggccgcgaagtggcctaacaagctaaaaaacgggcgcgaagcgcccgtcctgaggccgcgaagcggccatacaagctaaaaaatgggcgcgaagcgcccgtatgagttcaacaaatttaaaaaacgggcgcgaagcgcccgtcttgagcctcgatgtggactaaaaacccctaataattttttaaaaattcaaaaaaacctctccaacaaattcgatcaatttaaatcacttcacagcctaggtagcgaagctcccaaagcgcgaagcgctttttcccagctaaatagccgacggttcacgcacccgctagtttatattactctacagaaaaagggggtttcgtttctaaaacaaaatctccagttctagcagagggagcgccctgaaagtagtggaagggtcttacaactttttgaggcgcatctgggaaaactataggttttcctctccggtggccaactgagtcccggcggctaatttctcacttttgcttgcgtttgaaggcccataactttttttctaaaactcgaatcaaaaaatgcccgctgcgagggcaccccgccaaagtgtcctctacatgctggtattttttattttttttatagagccaccccctggcctgcagaaaatggcaactgaagcgtgctcaaaaagtacacttcagtaccaggcgaataccgcttcggggtttgatctgagggaaaggtgcccagcagacttattgtagagttttggaagctcgattttctgaaatttaaaaatttcgaaaattttcaaaatttttcgagctaggcctaaaaaacggttttcgggtttttgaattttaggattttttaacgatttttcccagagaaacggagaccacttccaaaacatagtttttcgagctctatcgactggtatttttttcggaaaaatttcgattttttcccggaaatagaaaaaatttttggcctcagcgggacatttgagtcccgggcccataactcgtcagggattggttttagccaaaaatcgtcttagaacatttttgtagagaattttaagctctatcgaacggtgtgctatatgcccggaaaatttcaaaaattttcgagctaggccccctagaaattttcgaaaatttttttaggcttgaaaagggtggtgaaacatttttttctggggtaaattaaggtgctgagctcgaatttgacctttgtttttcgtttcatgatttttgggaaattttaaaaattctttattttttggcaattttttggccc

SEQ ID NO: 10441 - DNA, 1111 bp, Heterodera glycines
  unsure (1)..(1111): unsure at all n locations
ccgtcctaaggccacgaagctgccgaaaattcagaacaaattaaaaaacgggtgcgaagcgcccgtccaagcccaaaaaaattaagaaacggacgcaaaagcgcccgtctgaggccgcgaagctgcaaatgtcgcctttaaaattttgaaaaaaacataagcctattaaaattttgaattttgaagccgagcatgcactagcaacgaagtccttttgcgcgaagcgctaatctcaacatccaatgccttttcaagtacactgtctacaccgtgcaatcactgcgcgtgcaagtcaactgcctgcaccgcgcccccgtcaattcccacacgctagtttatactactatagagaaacgttgcagttcgtttcaaaaaacaaaatctcccggccgaaggccgggagcgccccgaaagtagtggaagggtcttacaactttttgaggcgcatctgggaaaaataagggttttccgctccggtggccaactgagtcccggcggctgatttctcacttttgcttgcgtttgatggcccataactttttttctaaaactctgatcaaaaaatgcttgctggtaggaaactaagttgaagtgttttctaattttcaaaaaaaattccaggcctctacctatacttggaagggctgcagaaattggcaacttttcagtaccaactttttccagttcagtccccgttgaataactcattaggctttgacctgagcgcagggtggccagcagacttattgtagagctcggtgagctcgatttttccagattttaaaatttcgaaaattttgaaaatttttcgagctaggcctaaaaaacggttttcgggtttttgaattttaggattttttaacgaattttcccagaaaaacggagaccacttccaaaacatagtttttcgagctctatcgattggtaattttttcggaaaaatttcgattttttcccggaaatagaaaaattttttggcctcagcgggacatttgagtcccgggcccataactggtcaggggggttggttttagccaaaagtgccttagacaaaattgtagagctttttagctctatcgaatgntgtactacatgatgtaaattnttcaaa

SEQ ID NO: 10442 - DNA, 5659 bp, Heterodera glycines
  unsure (1)..(5659): unsure at all n locations
tcgctaattttactgcaggctacncaattggcaactcaattgtacatgtgctgaacgaagaaatgattaaaatgccggaagaaaaactctacctcttggcaattctcaaagtttgcgtgattcctccacgaaaatgatattcctgtcttaccagttagagttgatgacaggctcggcttccctttatctatgaattgtactaaaattcgggatacagtggatacaaaaaaatgactgtgaacaaaggaagtggttgatttctaagctaagcttgtataacaagtgcggcagattttctttacgaaattaaggccttttgcagaatttaataatggatgaaccggatttcttggggagtatttggacaatcgttcattagacgtaataaccatcgatgatttgaaggtgaagcatgttttgattacctacgaaaataagaaagtgttttaaggagcccgaatgttcaaacgttgttgtttagatgtggataacttaagctgcacgtttgttactgcttaaagctaagcagaagatggtgatatagccggggtgtcaaatactctacacagacacttatagtcttattttctcacattcatgcaatgcttgtctgctatgacgggacgacatcttggccagttcactgatgagtatccttactacgaaatcgtataattctgcagtgttgagcaaattatgtgacatctccaaaaaaaattattaaaccaaatattcttgatgatggatctataatatcaagctctatgcaaaaaaggttatcagacttatgttgggaaggattttataggagccgattataagattctaaatcttggtcattcattgtaactatttggatcaaaacatattgtaattgtcttgttcaccattcattgtatctctctctcaaatacacgcaaatgtagcctttatttctcttttatatctcaaattgtttaatcatttagtcattttattcgtttttctataaaatttacacataattaatggaatgaggatgaaattggcaaataattaaacactcgaagttgtcattttcaggtagaaaatgcataattatgcgaaataagttacaatttgtgaaaaattaaggattagaagatgcaatttttaataaattatcgaattggtcgtttttatattgaaagtgaaatttgaaaataattaatcaatgggatgtaattttaggtgtaaaatgcataatttaatagaaagaagacataattacagaaaattaggaaattgaagatacaattttaataaaaattaaggaaaaataatgagttacatcaaggaattactcaaaaaagtgtaaaaattatacatattggtgtggttgcgtgagtctagttgtttaagcatgaggataagtgtgttatagagtgtgttcgagagttctcatattattatgtaacttatataaaaattattaattgtattcttaaacacaaacaatgttcattgacaattcaacgtaaatgaaaagtttggattatcaccaaaataattcataatgttaatacaataacatttacaataagaaataattaactaaccgaaaatgaacccattcccatcctacgcgattgacaatttaataggaaagtttttaaaatatcataaataaaaatttgtgtttcaatgataccggttagcgagagattaaaaattatttaaattctaggctatgcaggaggcaaaagaatacataaaaataagtatagtaggtatgatcgttgtcgtagacagagacttttgaagtattggctactggtggaccaagcctaatggggcattggctaccggagagcctagccttatgaggtatggatactggtggaccaagcctaatgggcattggctacggagagcctagccttatgaggtattggatactagaggaccaatcctaattaggtattaactaccggagagccgagtattggctaccgaaaattcacacattttttctttttctagtttttatacatttctaaaatccttaaattccttgacttctttcacacttcccacttataatatgttcaatgcttcctcattaaattccatcaaatacccctgccttctcatccaaaatggcgggactgaaaaacaacccttggtgagtaactactaataggaaataaccaaaagacttaaaaaagtaaaattaaaaccaaaataaatatttaattaaaaaataattaactccaagtttcaacttttgataaaataaaaatatttcctagtatcctggtcccaagcctattattttgtttttaaaaggaaaaattaaaaatacaatcttattaaaagaataaaatttaaaataaatcacatatttaatagaaataaaaaacaaattatcttaaatgttaaaaaaacataaaacaatatttcaattattagcagactaaaaaattagtcgtagatattaaaaaatttataaattaaatcgaaaaattatttaatataatgcaaaaaaaataatttgtaaataaaactttacatcagttggtttaaatttgtaaaaagtgtcttcataaacaattacgacctaccttaccttcttggttttttgaatcagcataatgatggattcaattaaaaaataatgtttattgtttagagttaaattaaattactaatttcttacaaaaattttaaattaatttatgtgtatcagttgaaaaaattttaacataatactaagaaaaattgctttattttaatatttttaatttatttttttatttatcaaaaaacaataaagttttaattgcattctgtccattgaaacggggcggagtcgttatttaaaaaaccatcattatgattttatgataaattatttataacttagcttaaaagcaaccaattttttattatcatataattcgatagcactaaatatgctctacaagtttacaacaaaatttcagaaaatttcgtcaagtttcaaaaattttagggccaaaaatgctcgaaaaatactcgaaaaacaaggtttattgagttcatatagccataacgtttttgaaactgaaggaaattttctgagattttgtaaaattgtagaacatacatagagctatcgaatgatatgaaaaaataaaaatttggttgcttttaagctaagttataaataattttttataaaatcataatgatggttttttattaaccattaattttactccctttccaattcattcaaaataatgtttctttaatttatataaattatccgaattaaaataaaatgctattaatagaaaataaatttaattaaaattaatattagacatatagaaaaaatgaacaaaattctttagaataaaaataaaacattcaaaactataatttagagaagaaacaaataagataattataaatatatgaacggaaaattaaacaaaaatccaaaaccaagaatattatttatgtatttatccattatataaacattaaacgccaaatataatttttatgaaaatgttgaaaaatataatttaaattattagatttaaaagcaatttatctgcttatataaagcaataataaaaaattattttaaaaaatagaaggagaatctcacgataagtttaattcatataaaggaattttgtaataaaaatttaaaatatttcatcaattatattttttaaagcaccagttgaattttctagattataaaccacaataatgtttaggatagagtccggcgggatcgtgactcccgcgggagtttacgggattcccgctcacgactcctgctttttcggtaaacgggattttttacgggatcgggatttttacgggattcccgttcgggactcccgtcccggaaaattttgaactcccgatcccgctcccggaaatttttttaccggactctagtttaggataaaggattagcgctgttatttcctaaaattaattaaaaatcaatcctttctaaattatatgaatatgaaagttattcatttttaattcattatctaaataattaaattgcgtacttttgatgctcacccactgtatttagtctttccccattgaaaacacaagctatgtatccttgccaggagaaagttgaagtaaaattatttgaagcaaaaatgaaagaagcaattaaaacatattcttatatttttatatgagtaaaaatattcttcttttgtttctttgctctagacaatacaacattttaaaacataaaatactacaaaagcaatttaaaatataaaaaaaaataataataaaattaattcttctaggttcataatttttaaaaccatttaaatgttgtttaaaaattattatttatatttatgtaaatcgtataaattaccaaaattgaacacgaaaaatatctatttgcaaaatagtcgattttcatataaatccaaactgctgtgaaaacagcgtttgtggaaatttattgtttttcaaattgagcgtcagtcaactgagagccatgaaactacgctaatagcaaaactaattttattatattaacttttttaataaaaatgattgtattttttctaaatgatttctaaattaaatttaataatttcattataaacatatacaatcaagtgtttgattcactttttatgaatcaatgccacgaataatgcagtaactaaaaagaataaaaaatgaacttttttcaaaaattaataaaaataattatataattttattttaaaaagaatgaagtgaagcgatatataatcaaaaaatcattaatttgtaaaaaataaattttactgcgcataactaacatgaaatcggacacgtcaagaagaaaaattttaacgctttaattactgtatttgtgaaataaaaaataagaaaataataataaacatgaaaaagaatttgcgggtcaatgcttaaatattttaattcataaattcaacaaaattactcataaaggaatacaaaagtgaattgcctaaaattagtaaaaactttaattaatggcaaaataacaatttacaaatacaaaaataaaaaatatcaaattctttaaaaaattaatgatttattaaaaaaaataataaaaaattaaaagaactaaaaaataaatggttttgtaaaccgtaaataaataatttttaaaaacgatgtttataagaaataataaatgtttttaaatgataaattaacaatatttattaacatttcaattattttatttaacatatacaagtctttaaataaactcctgcttaacattgtgcgaaaagagaaaaataataaaaaaaacaattatttcgtttaaaaaatattaaaaaataaggctaaatattcagaaaaaaaaacatttcaagggaggatagattgcgaatgaactctatgtgccatttgtataaaaaaatcgagaatatttaaaaaataaaaatatagaaaaggtaaaaagggagaaatgttaatatttaaaacaaaatttaaaattaatgatgaattgtttttaacaaaaaacgagaaattaattaaaatttcaatctatttcagactttcacactcagaatttatgaagaagggaaacaagaataaaataaaaaaaaatcatagctaaaaataaataaaacttttgttaacaaaataaaanntaatattatag

SEQ ID NO: 10443 - DNA, 4693 bp, Heterodera glycines
tttgcttttcggtgcccgcatattaatcagaacaaatcccttaaacttgcgtccaattgtctgtttttgtgaccgcattttctattccgttcagtttattactaataaatgcccagaattatttttctgaaaaatatttcttagccaaaaaaaaaaatttttaatttaaattgggatcccggcaaagatggtgcgaatcggtattttgggcatggaagttcggagtctgatcagggacagtaataggtcgagaattgggaacccctcccccggggtaatgaggtatttcaaattattttccaaaccgccaaattataaatccgaaacactccaatcatcattcattttttccattattttattttattttattttttgaatttattctgacattttagttaatctcaattttatttgttttatttaattgacatggaaattgatcagctaaattttcacctttttccttcaatgttcgtcttcttcgcagttctgaccaccgcatttatgtgattaattaaaaaactattttatttactcgcaataaaaatatataaaactaattgttttatttgctcaaattaatttttagttttggcgtcggcggatatgaaccgatgaaatgtttagtaagttaatgttttccaaatgggatgttcgcttcgtttgcgcttttatttatttatttttaatttttagctttttccaccgcttcaaattttgcattttgagcattctcatcgctcttaatttattccttcttttagcattcatcaaaaagcaaaatcgaccattttgggtttaatgtgtgcgaagtgctcaacgaggacggaacaacacaatcgaatcagccaaacaattcagcaatatttttccacgaggtgaaaatgattaaaataataataaataatataatttaccaattttgatttattaatttgttcagtttttgccggtgatgctgcttatccaagcggcacttttctatctgccaaaatggacgctggacaaattgcttcaaaaatgtgagtgattttatgaaagggcaaaaaaaaaaaaattaatacaatgaatttaaatatttttaaattattgtttataaaattcagcttgtttgttggcaattgccgtggcacaatttgccgtggttaacgcattgaccggccgagggcaccgctggtggggcattgaaatgggaaaatcattgcgcagtggtgatgaaatacaggtggaaaattgaatggaatgactaatttaagaatatttaacctattttttagacaaacccggacttacaaatttaaatgtttttgtttagcaattatttcaaatatttcggaaaatttatgtttattttcaaagtgcataattttatctaaataaatttttttaattccaaagattaaattgcaaaactttatcaagttgtgagtacatagttttgctttatgtgcatttatttgttcattagttcgaccactttcggcactttggtttaaattttaattagaaagttaaaacaccgaaaaagactctcttaatcactgcacttttgcccttttaaggatttgcccattttcccccgtctgatcacttgtgactctgtccttgctccgaacgtgttcatccaatgccatctgcgcatcacctggttcaatgagaagattttctcctcatttggtaaattataaattccattttcactttttctaattaaataattaatttgttaataattcccattatcaatttgcttctgttttaataattgccattttttgctcttttgtcaggtggtcacttttgtgcgtctcccttttgactctgatcactttcgtttctgcatttattcgggtgcaattttatttaaaagattttattttatttttattttctcttttttcacagtctctctgcaattggtcaaattcgccccacaaatgcgccaatgatgaggcaaactgtgtttaattagtcggacattaataataattgaccaatttttttataatttaattcacccaaaagcgtgcatttattgttttaaattttaaattatttctactactttttagccatcatttatactaccaataaaatcgtttaaactgaattcattaaaagtttcgtttattcattagacacaaatttcttcattaaccattaagataaaaaaatataaatgtactgctcaaaaagctcggtttcgaactcgactcgtgaaatgcctagggtttttaggtgttttgttctgatcaccggaccaattttgggcgttatacttgcaaaaaaaaagtagaatttcctgcaaaatcattcgcctgactgcttaaatagttgtagagaataatgtaatcaatcgatggtgccgaaaatggatgagtcactttgagaaaatggcagtaagcgaaatgggccacggaacagcactcactctctgctgctgatcagttggagcgatcactcaccgttttactctccccaaaaaacgcatcaatcaacgtaatattcattcattttaattatcattaccattttcattttattttattttgtcaaaagaatgtccgtccgccgttatttctgcttcgttttgctgttgtttttccagcaaaatgtaaaaaatttaatgcttttttcacccgccggagttcgcactgaaattttaaaatgacatttaaaaaaagaaaggataattaaaaaggaggtcaagcatcaaaaaagctttgaaatgtattccttattcaaaatgttttataattaatttcattaatttatcgctttcccccctttcttttactcactgaacactccgcccttcctgtaattgaatggcacttgcgtgtcgcattgttttcggcaatgtttttctttgcccttcactggcaaattgccagcgcgggagggaatatcgaagaaccaacaggcacctattttatcgtgctgagtcgatccacaaaaaaactcagtgtgggcgatccacaaaaaatctcagtgtgggcgatccgaaaaaaactcagtgattattggtcattttccggaagcctatcgcaccactttcgggcaccaaaagtgcctgatccggaacccggaccggcccggttaagaacaattttttgttcagttttttaagggctatctcccaggccgggtccggttcttaatccattcacttggagcccgtcatgggtcgggcacatctgccggaggaccctcagcctcgcccccgaccctgtcgatggccaacccaagctaagcttgccggtaccagcggcttttttgtacatctcgatgagctctacaaaatggtatcaatggcgtcaggctatgtctactacaaatgaagaaaattggcgagaagtgatgtcaaaaattgaaaaatttaaaaaatttgaaaatgacttgcgtcccgccgtacattagtgttaaccgtacggcaccgtgttttgtgaattgaataattaaatttatttatttaattttatcgatcactgagtttttttgtggatcgacctagcaccctattttattaatttctttaatcataacacaacaattttatataattagtaaatatttctagcatattaaaatcccggttccggcttttccggttcgtggcaagtccggtcccatttcccaaaaagactcagtctccccatcttttgtccaaaattttgtaagaaaagtgctgtaaaaagaaaatataaaactcctaaaaaattgcacattcatagcaaaaattaaagtttagtcaaaaaattaaaaaatttttgtttaaaaaattcaaatattttcaaaatataaattttttggtgaatataatgaattaattataaataaataatcttaaaggacaaaattcttctaaacaattttaatccccaaaatttttttctccgaatatcttcagatttaatgaatgtcattcactctctgattttaccaggataaggcttaaaaagcatttttaggttggtttaaaaccattagtatgacttttgtatccccattttgccttttttggcatttgtgccgaaatgaatttttaaatttcttaacggaatacaataaaatttaatattggagcctcaaaagatgactttaaccaaaaagatgactttaaccactaaaaatgatgggtggatgactttcttaaaatcaccactaaaaccaatttttcttaagaaattttgcttttcgaggtttttctaatcaaaacaattaaattgttcctagggaaaggctttatatgtgcttttaaagagaatttgcgatgatttcaaaatttatataaatcatttttaatttcagccgatttgcagttgggaaattagttaaaaaagaattcaaaattccgaatttttgctctttcatttcgaaaaaaactatcgaatttttcttttatttttaccttatttaagtgaattctaaattctttaacaatccttgttttggttaatgataagttaaccaaagagaataaatgcattaaaaattgactatttaattgctttcaaatggagcgctttcgcttacgaccataccacgttgaaaacacgccatcccgtccgatctggcaagtgaagcaacgttgggccttcttagtacttggaacggagacgtcctgggaatcgaaggtgttgtaagcttttttcttttttaattttcatatttaaagaaaataacttat

SEQ ID NO: 10444 - DNA, 1953 bp, Heterodera glycines
tctagagtccgctcaatatccgggggaaaactttgggcatttcatcaattgatgcctaaaaatcgaatgtgatcaaatgaaagtgcaaatcgacagcccatcaaccgactccttttctctcagtccgctcgcactttctttcctcccatcatttgctgctgtttgtttttgccttcgtcgtccacggaatgcggcgctttgcctatggcaatatatatatatatataattttttttaattcaaattaaaatcgtaccccaaagggccatattaaatccgtccccgatcagatagaggaaccagaagagggcaccggcggtgctgagcaatcccacgatttgctggttggacagccgatcgaaaatcgggtacagccaatgaccgctgatcagacggacggatataattctataaaaaatgaaaaaaagcattcaggacaggataatgggaaaatgccaaattccgttagattcaaatcggctgacattccaacgtagaaaaggaaaagtgcgacgacaacagtggagccaatcttccgatcgggtgcatggtgacaagtcagcaaagtgtcaaccaatacaaaagcgacgggggccgtgtgagacactaaaaatggggggggggaatgcaaaaagaaacgaaaagggataaagcaccgtgattaagccaatcaggcaccagcttggccacccaggcgggcatcaccaactcagggtcggccacataaagagccctaatgaaaaacagaaattcaaaagagagtgaatacagaggaataggatagagcgaggaggaaacagaagagaaacagagagagagcgagatagagagagagaacggggatgagagagagcgcgagagagatcaggcaaaacgagaaagacactcaccaaaacatcagagaacttgcctgaaattaaattagctaaaaaaatggtctccctctttcatgaatctatcaactgaatcaatttcaaccacatatatcaaaaggtcagtgtttgtttccggagataaattttgccgatttccgctgaccattccgacgggaaatgcggcggtggcgtacacaaagtcgcaaatgcggtggagccgactgcgccgccaatagctgggcacgtgggtcgccttcacctttttgtgctgttcgccgtgcacaaattcttcgttccaatcgaacagcgcacagacaaaacaaagcaaagcgtaaaacgattggagagactgaaaaaggggggaaaaggcgataatccaccaaaagtattaaacgcatctgaagggaatcccgaattgataaaaatcagaaaactcatcggaaaatgaatgctgattaaaaacttaatttttggaaaagaaaaatatttgcaactctttttgcgtgtgaacaacctaaaagttagtttttccttaaacaaattcgttaaaaaatctctgaattctttatttggctataatttcatctttatccaaaaatgccaacaaaattctttacgtttttgcgttgattttttcgagttcactgcgagactcgcattattttgtccttcaatgacccccccccccccgaatttaccaaattcagcatggacaacatcaccagcttctccacccaccagacgacgcccagccgcggcataaagcggacatcgtaaaacaacgcactggcgtaaacgccgagaataatgccgtagatgagcacacggaaaaggcccatttatttgagggaaacgaaaaaaagcaaataaaaataaaaaaatagaaaggaaagtaaattatgcagaaaaaactctgtgatggagaaaagttattcgagacaaagataagtagaaatttataagtgagcaaagcaaataacgaattatttgagcaataattaaaaagaaaatatggcacattaataaaaagacatcaacaaaatgactagacaacctctttcaattagatacaccatcc

SEQ ID NO: 10445 - DNA, 1164 bp, Heterodera glycines
cccagcagctaaattagcctttttgatcccaaaacccgaaaaatttttcaaaaaatcattttttcgccaaaatttctcgagaatattgaataaatttaaattttcttaaaaattaataaattatgtcaaaaataagcaaaaaagcgaaaatttcgcttttgttgttgattttgcgctaaaaaaattaataaattttagcttttatgttttttttcttttaaaatgattgcacgtaattgccgaaaaaattcgagaccaatttccgaatgttgaccgactaattgcaaaacgaaagccgtctttgtcaaagcgccttaccgagtcaaaaaatttggaaatgtatctcatatgcaatttcaaccaataaatttgaagaaattttgcactcaattttgaaaaatttatgtccatattttgacatttttgccatttatttccatattttgagatttttgccattttatgtccatattttgcgatttttggtccatattttatggccatatttcgcgattttatatccatatttttggactccctagttattacgtacaaatgaagccgggaaaacaatggcagtagcaataaaatggaatttgggcataaaagagcgtggccgaattgagcaaattgcgacaatggcagccgtcgtgtggtaaagcaattggatgagctgaaaacagcggcatttttaataaatatctaaaatatatagataaaatagaaataaggcgataaaaccagccccataaattaattatttttaattttgaaatcaaaaataaagggaaaaggagcaatttgcccaattttaaatgatcaattaagtttttccttctactagtgcaacaacaattatgaacaaagaggaaaatgcagtgtaaaaaatgccattcggtgggtttggtgtcttcgtccctttgccttcggttgccatgtggcaggaggggaggggagggcgtgcggactttgtcacttatttatgcctttatcgattaaaacgtcattttgtccatttatcccgtcaaaaatagtgccacaccaaccgcacaggaaaaaggaaagacgtcaacaaaataagggaagggaatacgaaatgaaaagcggacagagaaattaatgggactcgcatttctattgaaaatttggatttttttgtgactc

SEQ ID NO: 10446 - DNA, 1709 bp, Heterodera glycines
aattgtgactcactggaaatgaaatgaaataagaactcaagattttctttttgttgtcaaaaaagtagtcattaaattcattcttcaaatccgtcccatcgttcttttgagagacaattcgaaaagttgcaggacatttgcaactccaattttcgtctaaatggaaattaatcatcgttgtaattagcattaattaacagttaattcgcaccttcttttggagcatcgaaaaaggttaaagcccaatcaattctgatcagtgcttccccatttccttttaatttgtgccaatattatccatggataaaaaatggaataaaatttttaaaaaattatatttcattttgaatgctctgcaaatataagaaaaatcgatattaaattcctatttgatctatttaaattaattattttaaaaagctatcggtcgtggttcaaggagtgtgtacttggttgcaatctcctggtgtatcattattgttcacctattccaagtgcgccataaaacttaatttcactaatttctaaaacacatttataggcatttgaaaatgtatgtgaaatctgtcccttaaactagacaagtaccggtttgtttttaattagctccaaaaaatctcacaaattttttttttttttttgaatgatgtgtttggctccacattcctttattcgatgtatcgcctcgattcaattcttttttggtataattgcacagatattgtctaaaaatgaccaaatttaaggattataaattatgccagaatagtcaatttttggtactttacggttatctatgtccagatttaaaaaaaaaaaatttttttagagaataatttgttttaggggttttccgggtcgggaaaaccgattctgacatccatttaaaccaattcgaaataattgctgagaatttgtgaattgaatgcgtaatactatgcatattgcattggtacttctgtgtacgaaacaggattggagtttgatatttgcctcttacagtgtggccaaatgcgttagacagcgtccgctcgggcgccttttttggacgacggacccgaagacaaacgccgggcaacggcgacaaatcggagggcgcagtgtgcaacatgcacagcgaatgcttaccaggattagcatgcaaaatgagcggaaaagcattcttcgagtatttcgaaccgcgaaaatgcaaaccgttgaacagttaaaatgggcggaacagaaaggaaattggcggaagagaagacaaaaagcgaatatagaaacagtttaaaatgatttttaaattatttatttatttgataaatatttttgagtttaattaaggcataattaaaagttatcgaataaaagtcgaatttggcaaataaaatgccgcagcattttgccgctcaccaccacggctttggcaccattcttggctcgtttcgcccctcctcctctttctttatgccgttctcttcctccgctcgttttccgggaatggcatttcgtttctcctcagtttttgtgccataaaaattgccattgtcctgcgcattgttcgttttgccgtttgcttcccatcgctttccgtccacattttcggcatttgtttctgttccgtttctacgccgtggttccattctcagcttcatcttccagtcgctctcctcccattctctttccatcagaagggatccttcccccccctgaatatttttcccctt

SEQ ID NO: 10447 - DNA, 1431 bp, Heterodera glycines
  unsure (1)..(1431): unsure at all n locations
aaaaaagaaaacttgggttcctctatgncatttatttgcattttaccgcaaaattaggtcatttggacaaattctgttaataagttttcattattaaaatacttcatgtttgttaaacagctaaattttattgtttttgcgctattaagacacaaattttagagacaataaattatcagaagatgtagtcaacaaatttaagaaatgcccaaattgcaaaattccaatcgagaaaaatggaggatgccgtcatgtgaatatatcaaatattttatatattatagattagatagataattaatgcataaaatattaaataatccttttccaagatgacttgccgctgctgcaaattcgaatttttatattgctgtggcaacaaatacaatccatcatacagccacgattcatcactccaaaaacatactttattttgccgaagaaaatttgagcgccgggacaactgagaaccagaaccagtgaaagtagacatttgagaaccaaaaaaatgaaaaaacaaaattacctatagttaacattattcgatttgtctataaatcttttttatttttggtactaaacaaaattaaataaattgggtattttaactagagaccgggctctggagtcggagagactccgaatcaggattacatttcaatcctggtcccgatcaatcccgatgaatgaagaaaaaaaagcttgggacagatcccgaggttctggaccctgaattcaatattaatctgatctcgcggcatcccgatcccttccggtcgcgcattttaaccctttatatgctttcaacaatgcttacgattgaaatattgaaaacataaaaattatgtgaaaaaaaacatttttcgaaaatatataggcaaaaattttacgctattttatacaccaaaaaaatataaagctatcccataaaaatatacatatgtaaaaacatcaaatatgtctactggccattgcaaaattcgtcatcacggaataataaaaattgcgacatcttcttggattctcttctataacttcttttttcctttttgatcagctcttagcaactgagattaaaaaaaaaattaaatttaagtttaaaaaaacaataaataataaatagggttataaattatatggattaacatattttttctgctcatatgctataaagaaaggggctcaaaaaaagcattagtacgttaaagtttttcgatttagtgaaggtttttaatccatataaatctatattgttgggggttttcgggaataaatccatatttcgccattttttcgttttttgtacatattttgcctgccaattttggcaaattttcacaagacaaatgcaaaaaaaaggcgaaaatatacctctaacaaataaggatcgactttttttgaaatttagaagaatatacccccaaaaagcga

SEQ ID NO: 10448 - DNA, 1965 bp, Heterodera glycines
taggattgggcccccgaccgtcggggttggaaaagtcggggttcggcgtcgtcggggtcagcaagttcggggtcggggtcggaccaaatcgttcggttcggggtttttcaatttttaccttatgcctaatagtccaaatttttttattaatttttctgaaataatattttttaatttccataataataattgtatttgtttttatatttttttatttcttttttatcagaaattttgtatagaattaattttttttcacaaaattttaaattttttattttttcggcgacattatttttaaaattactgtttattttttccgttataaataaaaaaattactatataaaaaatattatggtagcaaaaaaggcaatttcgagaaattacatttcaaaaaataaattatatgcaataaaaaaagtgaattttattcaaaaaatgatcaaaaatttcttattacttttttgtttttcaaaacatttttttcgcggcgcgcattttctaaagacttttagggagaaaggggtccggcggtaccgataggcgcccgggaaaattttgaaaatttggatagatctgttaacagattttgtccagaaaatgctaaatttttgcggttttgagctaattttttttaataagatttacgaatttttgggcccgatgaagccgataggcagctccaggcggattttgaaatcaagctctattttctaacatttttcaccaaaaagatttatgaatttcccagaaagttttgttttttctcttgatattttgttaaaagtattttgaaaattgtagggtacattgttaaatattcaaatttacgccattttcggattactgtatttccactctatttcctttctctcgctttcataaatacccatctcttttcactcatcaattgacttcgcttttcattattctattccttgctcttcgctcgtcattactccgactttttattatttacttctgacaaataaatttattagttttaagttgtgtccacttttggacataacattttggcgcagtcagctaaagcttttttattgcttttgattttgattgacagtgcattcggtcggcaaattttcaattctttttctttatttcttttttattattattattctctaattgctataatttgggaattcgcctgcagatttattagcatttaatttctccgacctaccttctcccgtaacacatcggtttgaaacgttacggcgaaagcataaccctctgacgctaagcaaaccgagaagacttgcggcaacggtcaagccataaaaagcctctgaacgcactgttgtaaggaaagccacatttgggaaagtacaagtcattgcgaccgctgtgctcacctcatttgtgcaacttccatatcaaaggtcgtttattgattttattcactgtgcgtggcgaaccctcccagtatttgttggcgataaaacattccctctcatttattcattctcattcacaaaaacattagtccgactgaattgcacttctgctcaaaatggccgtgacattggtcaaatacttcaacatttagtcaagaatcagacggaggcttttcaagcccttctccaaaatgcccaaacaaatccaaattccgtcaatcattccactatttattcgactatcaatagccaacttggccaattcacatataatccagaattggatttaacttttcaagcatggctcgaccgttttggcccgttcattcaggtggatggcaaggaccttccagacgcaatgcaagtgcgactgctgcttggaaagctcggtcaggaggagtacgctcgtcatgcagaacgtgtacttccaagactgccgaccgactttacattggcacagacaattgataagctcaaaattttgtttggggaaaccaaaagcattttcacacgtcgatatgagtgttttcagttagttcaca

SEQ ID NO: 10449 - DNA, 1638 bp, Heterodera glycines
  unsure (1)..(1638): unsure at all n locations
gcttgcatgggcctgcaggggtcaaattcgaaaaattaatcaattttatgaaatattagattcatgctaaataacaccgagattctctggcagtattttccttaaaattattagagaacggaccgggccgggccctgtatcggtttttaccggccccggaaaatcgacccggcgattttaggaaaaacacgggttcaggtttttgagaggccaggcccggcagattcggaaaatccggtctcttataataagtattccaaaatcccatttcttctacaccgtccgaccgtttgttcagttattcgacgtcgcggaagacccgcgtcgtgcgcgtgccctcgtcgcgcggacgcgtgccgccgcgcgaggccctcgcgcgtcgcccgtcgaccgactgatcgaactgttgcgtcagggcttcgccttgggctattcaatggcgggcggcggcaaaaacggcaccggcgaatatgacgagaaaagcctacggacactgtcaccgcgatttttgagtgtaacggcggaggatgacccgacgaagaataaaacggtgggggaaaatggccatttttgggggagggcggcaaaattaaggggattaagtgataattaaaacgtgttgagctttcaccactaatgagttagcgaatcgtcaagactctcgagttataccagcagattttaaagacgggaaaaatttggggtgggagtggaggcgtcggcgaaccgccgggcccttttggaattgtccaaggctcttaaccgatgagccagccatccaacctcatgccgccttctctgcttgaatactgtaattctcccaatatttcttactgtagattgaccttctttccccgtcactgttttcgctgcattccgacggccaaggcattgagaagttgaccagcttgcccagcctggtccaggggttcagcagcaaagaccaacagcagtggttggatctggtcaatcagttattttttaatttagggatcaccggggagaaagcctataccgctttttggggcctaagtaccgagtttcttggccaactcactgtccataattttggaaagaaatcatatgcgggtttttgggcatagataccgattctcggggccaattctctgtcccgaaaaccgggaaaatttttggcataaaatgcccacaataacggataaaatcagtgatggcaaattaggaaattttatttaaacatattaattaataattattatggacagataattgaagcagcgggcgttggggaaagtgtcgaacgcattgaggaagttggaattgaaaaagaaagctgagttaattattggaaaatgacctcaattaaggaactgttcaacggcggggtgcaaaatgtaatgcgcgatgcttggcgagaacggagcacaaatcgggaaaaatatgagcgcgagatcagagccaaggacggcacgccactgtacttcaccnagaagaacgtgacgtaaagtgatcgaggatagaatggacatgaccaagaacgggaatgactcatgggaaatgccgagaattaaaaattaggggaagcaaatccacatggacagcgagtgatcagcattgatcattggatagcgtaagaaatagggatgactgttgctgatc

SEQ ID NO: 10450 - DNA, 2640 bp, Heterodera glycines
caaatttccatccaaaaatgccgtgttttatgaaaaaatgccatattttcaatgccgatttcgaaggtgcgtgaaatgaacaacaccggctacgccctgctctccaaggaccaactgcatctgctgtatgggcccgagtcgccctataacaattcggacgtaataaaattaccccaaaattacggggcaatcgaattcccgcaattcttggattgattctcgaaactaattcactgctgcttaaaaaggctctgcaacgctttgttcggttgagtgacagcgaaatccatgccggcattgagagggatgtgcacgcgttggccgagttggagtccttcaaagttcggcaaaaggacgttgtcctgtcgcccattttgttcaccacctttctcctggtaaatgtccaaggatgaatggcataatatattcctggcaccacatatatctaaatggcaccaaaaggcggcaaaaatgggtaaaaatgaaactcgttattggccattcatatcgctatgattcgggatggggtaccagtacgaattggcttagtacgagttggatttcgtccataaaaatggtaactaatgggtgcaccccctaaggcaaaaggtaaacggaaaaaagcatttggctgtgcggccaactcagtctcgactcgatctcgggtcaagaaatgtttctgtttttgccatttaaatctgagtttttgggccaatataagccgaggattttatcggcttcttctttttggctaatccccaactttctctctgttcagactttctccgccaagtccacaattcttctgtcgcccattctgttcagtccggtcattttgtcccccaatgtgcttggtcccaccattctctccccgtggctttttgtgccggtgattttgtccccgcgagcgttgtcgccggtaagtcaaattcgagtaattgtcacttttccatttggggatggatcaaactctcgagtctctatggccgggactctcgacctgcctcaagtcatattctcgccatttttttttgatttgcttcccactcaccacagactgttctgtccccttttgtgctcgaccccatcattctgtcaccgttcgcaatacatccgatcattttgtcgccgggtgttctcaacgccatcagttcgaattttttttattgggaaaattccaatcagtcctggattctgttcacagttgaaacttgtgatccggagatgtcagttttttgctcccgggaagtcacaatcgctgaataacgaacgccctttttgttttgctgactctcccctttcagtactgaactaatttcctcgccattttacccttactttcggtgccgaagccgtttccccgccatttatcccttccaattcagtactgaacccatttccccgcgattttactccttctagtttagtaccgaagccgtttccccgccatttatccctcccaattcagtactgaacccgtttcctcgcaattttacccctcccaattcagtactgaacccgtttcctcgcaattttacccctcccaattcagtactgaacccgtttcctcgcaattttacccctcccaattcagtactgaacccgtttcctcgcaattttacccctcccaattcagtactgaacccgtttcctcgcaattttacccctcccaattcagtactgaacccgtttcctcgcaattttacccctcccaattcagtacttaacccgttcgtgctgtccccgttcattttgtccccgcaagccttcaccccggttattctgtcgccaattgcgctgtcgccgttcataatgaacccgagcatgggcagtccgactattctttcgccttttgtgctcactccgtccattctgtcgccacaatttttgtccgccctcattctgtcgccgtacgcactttcgccggtcatcgcaaggtcaaaaaaaattggaaaagccaaaaaagaagaaacccaataagccatggttggtacaagatcaaatgaacttattccagggtcggatctgtccttttatcagaaatgtcctgattttaagggtccaaatctataaaatgaaaatgtcttggtttgtcagaaacgtcctgattttgaggaagcgaccaaaatttgaaaattgttaaatcgataatctgaggcgaaaaatataattatttaatacatttttgatcgataatttaaaaaataactgacttgaaacaatttcgcaaaatgttctgattttcgacccaaaatctgatttttttaggcccggtgttctgattttgaaaaaatttcgatacaagccctgacttatgctaaaaaagttctattaggatgttccatatttatatttaacaaaagtttaattgttttcaaagatattgaaaatcggtacgatccaaatgatgataaatcccaaatgtcacgccatgtatctcccatgtaattaactaattatccctacaaattcagtccattgaccgccgtttctgtgattctgtcaccgagttggctaagctgatgtgccggaaaaagttcaaaacaaatcccatttaaacagcccaaaaaatgaatttatacattatgcatatttctatttataaatttttatttgtttcttttgcgctttaaaattcaa

SEQ ID NO: 10451 - DNA, 5050 bp, Heterodera glycines
tagtgtttatgccaggagtgtcattcgtccttggatgccaaggacgtccctgctttagggcgtcgatgattgaaaattttgcaagatgtccttggaaaacaaaattggaaaaataaaaattcagtaaaagcgttgccaattgtctcaaaatggcaaaaagcggtgaaataaaaaaactgggggcgctatatggaaagtcaccgatttgaaaatttttttcactttttatgggaaaaattttttttaaagcgtttcaagaagagacaatgttttgaaaaatgtttggctgtgtacgcaagaccaaatgatggaagaacagttgaagtatttgcaaatagaagaagacatgctttagacaacaggtgggttgttccccacaacctatacctgctgaaaatgtccaagtgccacattaatcttgaaaaggttaatagtgttagttcagtaaactatttgcataagtatgtgcataagccaccagacagagcaagattggaattagaagagaaaagtgaccatgatgaagttaaagagtttattgatgcgcggtatttgcccgcaagaagcagtgtggagaatttttgaattgcctatgtatgaccgaagtcactgtattatgtctttgactgtacatttgcaaggagaacatatttgttattttgatgagaatatggatgaagaagagattcgtgaaaaattagcgaatgggtcagagttaatgacttattttgaattgaataagacaaatgttttggcaaaaactctgctgtatcatcagataccggagaagttttgtttcaagaaagtaaaatggactgagagaaagacacattttaatacaattggccgaatggtaaaagtatcaccggctgagccggaacgatatcacctgaggctattgttattaaatgttaagggagcatgctcctatgacgatttgaaaacagttatagatgtgaatggcaatgtaagtttgtgaaactttttcatctgcatgtttggaaagaggtttgattagaaatgatgaagaatggaaaagagccttagaagaagctgagagttttgagatgccttggaaattgagagagttttttgcattgattttagtccattgcaacccggccaaaccggaggagctttggaatatgttcaaagactcaatgtctgaagattttagcaggaattttagaaaagaagtagctaatgctaaagcgtatagagaaattgcacttagcattatgaaggctggaaaaacgcttgccgattttccaaccatggaacagataaatgttgatgatgatgttgaacaaatatttgatttggccgaagaattgaatttgggacaaagaaactatgctttgatgtatgatgaacagaggaaagttagtgatgaaattttgcatagagtatggaatcctataaattaacccgcgttctactttcttagtggaccgggtggaacaggaaagaaacatgtgaacaaggcaattgtacatatgctgagaggtcagaagaagaaagtttgtacaatggcttttactggcattgcagcaactttgctacctgccgggaggacattgcacaatagatttggattagcattagacatgagcaattcaaatattgggccaagatctaaagcttggcaagagctaaaagaaacagatttatgtatttgtgatgaggcgcctatgataaataagcgcgcaatgaggactttagatgagaaattgaaagagattatgaataatggaattgcatttggtggcaaagttatgctttggacgggagactttcgtcaaactcttccaattcagaaacatgccacgagagctgaggtagttaattcaaccttaaaaagaagtgagtattggagattggctaaaagacataaattgacgaagaatatgagagctcttgaaacagagcaagaatttgcgagaaatttgttagagattggaagtggaacatagaatagtgataaatgatgagatatagttgtacggcatcaattatatttatcaggatgtgacccccccccccccggcaaatgcctttctctccgtttcactatttgcttttctgcactatttcgctgtttctgctcaaggtccaactatttggtacaacacacagctggtaataggtacactctttaatcgttcattattataatttttgttgctgtccgtgtgtaacttcgtcagcaatgttctttgccctgtgtgaacaatgtatgaggcgacacagatggagtgcctcttatttcagatccaagcactttctctatttttttcttttatttaaactttattattgttaacacttaacagtgccagtttataatttatcaatattcaatcagaatgtaaataaagaatttacctatgcaactgaaagttaaataggtatagacaaagggcaattggtattacacacaccgattcaattttgatcccctagttcaaaagtaaatgcgtgtgtggcgaagtggtttttttaagaatgtaaagagacaaagggaggtggagggcggaggttcgagtccgttgtgcaacatgaatatttttttatttatttttgtctaaaaaatttaaaaaatacaatttttgaattggatgtttttttgccaaccaaattggacaatcttggtttcattcgaaagttcttgataagaagaagatttttctaagcaaatgctaagcaattgatgagttagaaaaaagaataagcgttcgattttaaaatctgtctgaggaaaaaagttatgctgttcgaagtaaattcggtttttctctattaacagagacaaagaaatagtacgccaaaacgagagatgttttttttctctgcactctcttttcaactcgactagccttactttttggatttatcgccgccaagcgaacatagccaatatggaagtaaaagaaaatcccttcccggttcgtatcaatgcattttggtcaacttttcatcaccggtgcttgttctgttgccaagtcgcgaaatagatatatttttcaatgattttttttaattaatatttatttttgttccggatttttaattatactgtatatgaaattttagaaataatttatgtagacctatattctaggtttttattttttagatcctaaaaaaatttaaaaatcggttttaacctatattttggcgttttgcccaaaataattaagaaaaatataagaaaaaaaatgcaattcaaagttgcaaaaaactgccaaaatacctagttagttccctaacccgaactcgaactcgaataaaaatcgaaattttgaatttttcaaattatgattttttgttcaaatttagattaggaaatcggaattgatcaaaatagttgaaagattcgtgatcggggaccccaaaaaccccagagaataaatttttatgactatcacaaaaaaattttgcaaaacaaaagggtcccgccttttgaaaaaatttccaaaaacggccacttttaaagtagcgcccattttcttttgatacctattttcattttgtccatattgcgatttttagtccatattttatgtcaaatttcgtgattttatttccatttttgggaattcttgttataactttagctattccgaaattctttaccaaaatgtaaaaatatttcaattataattataatttcttcactacatttattgaaacaaattacaggtttaatgtctaatcaacaaattattagtcctagctgccaagctcttccttccagagagcaagctcttttcaagaaattaattgtatgggttttccatttcttttcatgtagaaaaatttcagaagtgctatgaacaaaaacagtacaaggttggcttaagatgtgcaaaacagattatgtcgaatccaatttatgcggagcatggaggttatttaagcgaaaggagggagtcgaacaaaacagtacgaatttaagaaacacttgcgatgaaaggattgattctaaattgtatggggaagcacgaagaagcgcaagaaatagtgaagaagggactgacggctgatctgaagtcgcacatttgttggcacgtctttggactgacccaacgcaccgacaaaaagtacgacgaagcaatgaaagcatataaaatggccttgaggatagagccggaaaatatgcaaattcttcgggatttgtcagttcttcaagtgcaaatgagggatttcgaaggatatcgagtcagttgggtgccttttcaacccatttttgttcccatttaaggactcccgctacaaattgctcgagttgcgaccttcaaacaaaatgggatggattggttatgcttcggcgtatcatttgcagggcgaatatgccatggcgttggggatcatcaaggagttcaagaaaaacaacaaggtgattgtccttatttttataatattcccttaatcttagaaggaaaaaattatttgcacttaatgatgtttttagccaacgtctaatgtcgattatgagaacagcgaaattttgctttacgaagtgatggtcctaacggaggccgggagaatagaagacgcattgaacaaactcgaggagaattccgagctgcataattgaccgactcgcttaccttgaacaccggggtatcccgatttccactgataaatctttaattttattacgagagatttttaacttaaaggattttaagatacttgtactgcttacgttcgttgcgtattaatttaggttctcttttggtgaggttgggtcggtttgaggacgccgagaaggagcttaccacacgattgcttgacgggaaccgagactgtgtgcactgattacggagcgagattgaaagagtgtcgatcgagttggcgtgaattttttcttgaagattaacgagaattgatcggctctgagtgcactttgatggagcgacctttgatgagtccgaatcggattgacgatacctgggtttttatagaataactttgttcgtgttcaaacgaaccctatctttttggtatccattcgagaagccccaaaaagtgacctcgaagaagg

SEQ ID NO: 10452 - DNA, 3883 bp, Heterodera glycines
  unsure (1)..(3883): unsure at all n locations
tggtgccaccgtctgcggtcgtgacgatgtcacagcacgtcccaactgctgactgctcatctgccgttatggctttggctattggcaactccacaggacaaggccgcagatgctttgaacaaaactcaaaaatccatccgaaggtttcaagacattgtggtcagcaaagcggcagtcatcagcagcagattaacgaatccagcacgaaccagattgtgtggtcagtttaaactcgctcacttcaatgtgctggcagctgtcctatgtgctcttctctgtgtcatcataagccaaactgcttggtttttcacgttaccagcgccgcctccgccagaccgacgatcggcaacgccatcagcgaaaacaacaaccggctggagcagttgtgaattaacatgcaataaaactggagtggacattttcataccgaacggaattgttaaatttctcttgtgctgtgccgatggaactagtgccttactcaaatcggcgtaaaaaggactgtccatcatttacccaaggagcatcttctctttgactacgactgcgaaattggtggagcaagctttctcgttttcttcatcatcgttcgagttgtgacactgatgtgccatgtttccctgctttggttcctccagcatttcctctccttgctcattcgcccattttgctgttttcggacaaaggagccaacatgaagagaaagacgtcaaagaagccgtagccatcctcgactttttctgaaacttcagacagcaatacttcttttaaccctttgcgcctcaaatcaatgcattaaagcattagttgcctccatcactgcctctgctgagaagtccaaaaggtttgactcagtgtgccattccgagagcccaacaaaagccactcttccctcattgggtctactagtacgccttcgactttatcaccctgaccagagagcacttgtcacattggaaatcggcattcgctcgctgactttgccttatctgtctccaaccgcagttatggcgcacaagtgtcatcagggcggcaacaacaaggcgttccgtaatgtcattccgaacgaaatacaatttacaaatcgcgccgatgccaaccacttcgattgcctctcggacgacacgtatgttcaatgtgcctgcctgactatgactcagcaaaaaataaccgccaatgccgaaattcgaaactcgcatcagcatttataaacccagagaagtgcctaatctgctgcaccgattatagttttgacctttcttggcaccttggacgtctctcgccatgccatttgtgaggggagggctgatcagtcagcacaattttcgccaatcttttacgtcgctttttgatccttcgaccttttatacactcgttcattttcaaagaaattggaatttgcaaattattctgccattggaggacaattcacctttcggcggttgctcattctcagtgactcgttacatccgatcattccgccaccttcgaccttttcgcataatccgttcaaacattctccccaccaattatgagtttgcctgagaaaaaagcggcgcttaaacgagcaaaagacgatttggcgcaagccgaaagacgacactctcgccgccctactcccgccgtgcccaaccgccctcgtccccaactcgttctgccagccaaccgctctccgattcgccgtccaactcgacctgccccgcctttgtcctttgtcgccccaccgccgccgtcagctttcaccctcgccagcgccggtctgtcccgtcatgcgctcgtcaacgccgtcaccgcaaaatcggccgctcgcccgtcgccgtctgctgtccccctcgccagttcgttccgccaggcgccagtcaactccgtctcctcatcgtcctccgtccgtttcgcctcgtcgcccagccgtgcctccgccttctgtcgatccaccgccccccaaaaaacggttttcgtccggtcaactgcgcacattgctttgtcaacaatcggccaatatgccattgagcaaaaggcgttgatcgggtggactgaacagagaaagagagaaattggagaagctctggaccaggctttatttttgatagttaaaaattaacgatttgaagcaagttgcaaaatatttgattttcgctttaaatctgatttgttgagctctggtttctaattttgtgaaattttcaatcgaagccctgacaaaggagaggtacccaagtgaccgtgggacttccgaatgaaactttcagggtaggtagattaccccccccccccttttgtattataaaattttttttatttttgctaaatgaagcttctggccgagatatgaagcttttcctttttgccttttcatatcattttcaaagaatgtaaagccagtgtgagcgtcgtggcctggtggttatgtcttccatcctttttttcttcttctaaagttcaattccccaaccctgcaaataattattttcacatgtgataattttggtagaaatgagtgaagcaaaggaatttgtcacaccatgcacatctgatcattataaattccgaacaaaaagtgatttgacagtgatcaggaaaaattgttgggaataaatatttaatgggatgagaaaagttggaaaattcatcattttgtgattcaatgtacccccccccccttatgccaagaatatcgatgaaatgaccgaaattttggagcacaaagttggaaatggattaaactttgaaatttaacaatttcatcaccatggtaaagatttacatgcagatagatcatcaaggacaatgcgatccgaaatttttctgacaattgacttcatgttctttaaataaattaaaagtcagatctgtttttgggacccagttggacatttctaccaaaactatcacatgtgtcaaaattaatgtgaataaaaatgaaaaaaaaataatgcaaaattattaatgttaaaaagattaaaaactattttggatatgaaaaaaaacaaaaataattatttgcagggttgggtaattgaactttagaagaagaaaaaaaggatggaaggcataactaccaggccaccgacgctcacactggctttacattctttgaaaatgatattgaaaaggcaaaaaggaaaagcttcatatctcggccagaagcttcatttagcaaaaataaaaataattttataatacaaaagggggngggggggggggtaatctacctaccctgaaagtttcattcggaagtcccacggtcacttgggtacctctcctttgtgaggtaatatcctcccctcccgacttaaatggttaatttctttacccagtccatatcttttttgcccagtattttaaaacattgtcgatttaaatggtttacattagagactcggtgtgggactggatcccgcgcgggattttgcgagatccccagtcaacaatgccgcattttttgaaaaatgcgggacttgaggttttagtccatgcgggatcccgtcccgcagtcctgcaaagttttgaattaataataaaaaagaattcatttcattttccaattcatcttcattagagaatgtcgggtgtatgaataaataatcaaatcaaaagcgattatcttagcgttttgcagggcttcgatctctgttctagtcagaaatgttctgttttttggtatagtgacaattttttgtctttataaatccatcacaaattttgatttttttattggtatagttcacaaaactatcctgcgttttaaaatttaacccaaaaattggcaatttgtgatgtaaatgtgtttaaaaatgagctaaaatttcaaaaaatttgctgccgccgcctccgggccacctattcaaaaaatcttttaaatatagcgggcagaaaacaaaaa

SEQ ID NO: 10453 - DNA, 896 bp, Heterodera glycines
aattaggccgcgacgtacagaaaaatgccatcacagaccctttgcggatgagctggactgattgatgtgtggtaaaaatgaaggatctattagtaaaataaaatttgcatccaaaaatactaaaattcaaaatttcgccacttgaaatttattgatgcacaagtaaatttttgttattttgacgcacatacgtaggaaaatgaaacgactttaaaattattatcagaaaattcataacggcacaatttaaaataaatatataaatttcaacaaaactgttaactgatgtagtataaattcatatttcattttctatgcacattatataaaaaataaaatatctacaaaaaataattaagcaattccaaatttgaaaagggattcgaaagtataatataaaaaaaaattctcagaaatacacttatatatttcttttcgttagatgcagtcaaataattcaacataaatatgatcccactttaaaaagaataattatattaaatattcttttgaatttttaatatttcttattgttggaatgcagtcaaataattcaacataaatatggtcccacttaaagagaataaaccaacgatttaaaaagtcaaaattatcaccctatttaaattattaaaaaattttatctggaagcgccatctccaagccaatgccaatgcaggagccggagatagcagcaacgatcgaaaaataaataaaattaaaaacattaaaatccaatttatcgataaagccaaaatgagagaaaattaagccaaatgataaagggcacgtaaaaaacattagttaaaaggttaagaaattgataagccgaagaatgaaatagtctttaaaaaatgacaacaatttgtcaaaagggccaatgttggccctcgaat

SEQ ID NO: 10454 - DNA, 2182 bp, Heterodera glycines
atcgattccttacttaatcggtaaaacgggagtgcgcccgtaagggtgtccattttggtgttaagtcgggccacccggtggcccggcgacccgcaccgatgacagtgtcaggcggggagtttgactggggcggtacatctgtcaaagcgtaacgcaggtgtcctaaggcgagctcagagaggacggaaacctctcgtagagcaaaaaggcaaatgcttacttgatcctgattttcagtacgaatacggaccgcaaaagcgtggcttatcgatccttttgaatgtgtaaagtttccagcaagaggtgtcagaaaagttaccacagggataactggcttgtggcggccaagcgtccatagcgacgtcgctttttgatccttcgatgtcggctcttcctatcattgcgaagcagaattcgccaagcgttggattgttcacccaccaatagggaacgtgagctgggtttagaccgtcgtgagacaggttagttttaccctactaaagacctgttgctatgatagtaatcctgcttagtacgagaggaaccgcaggttcagacatttggttcatgtgcttggtcgatagaccaatggtgcgaagctaccatctgagggattatgactgaacgcctctaagtcagaatcccgcctaggcaagatagcaatattcttgctccccggtgtcgggaggcactacttatgcgccgcttgcggtgcagcacaaatgccccagcatctggcccgatgtgcgtgcttaattgctcgcacattgccaaagccgtagcactcgtgtgccatggtggaacgtcggggcgcaaaatcacttgtatacgacttgactactggtcagggggttgttagcagtagagcagcttttacactgcgatctgttgagacttagcccttgatcggatgatttgtcttctttttccccctttactttttgtgccaacaacattttaggtaaaggtacatgagaagagaagggtctctcttaagggagtcaaatgcctcgttaccaccgttaagtcaggtaggcaaatgcctcgtcaccattaagtcaggtagccaaatgcctcgttgccaccattaagtcaggtaggcaaatgcctcgtcaccattaagtcaggtagccaaatacctcgttgccaccgttaagtcaggtaggcaaatgcctcttcaccatttagtcaggtagccaaatgcctcgtcaccctgaaattaggtaggcaaatgcctcgtaaccatgaaattaggtaggataagttcttgactttgctttttttccatttattccaatcgactagtgctttaaggttttgtctttaactttgctttttttccatttattccaatcgactagtgctttaaggttttgtctttaactttgcttttttccatttattccaatcgactagtgctttaaggttttgtctttaactttgctttttttccatttattccaatcgaccacgttaatcattctctatacatttagtgccttatttcatgaaattatatataatttaattttaaataaagaggctaatttttacagaaaataaatagacgctgactaattagctaacatttataaagaaagtagaaatttgattaaatgcatatacaaaatattacttttttaaaatttgtataaagttcctagtcgtatgtgctttgcgttggttggttggcgtgggtgagtgtggtggttgggccgtttttgcgatattgtggctggaaaaaaaaatgcgatttcactgtggggagcgcggccgtctgggttcaagtgcttgcttgcgcttgtgctcggcattgaacggtgatggctgctgctggggtgccacctttgtcgtggcctcagtttctccagcgtttggcagctgtcgaaatgaataaaacatgcagctcgtctgtgtgttaaagaaatttggcgagttaattgacttgtgtaaatgtggcctaaggcacaaatgctgtggggaactcagcactggggatgctgaacctaaagttggtggtggtgttggtatacgagtgagtggcgtattgccatggttgacaagccctatgagttcgtggatcggaactccttgcctgtggaccagtgtgcttgcattcgaaaaaacacgagggataagcgcccgaaggccttttggcctgaggaagtgtcctaaccggaaa

SEQ ID NO: 10455 - DNA, 4176 bp, Heterodera glycines
ccattttctcaaaaaaaatttcccaaccccctagggattttgaaaattttcccgattctcagtgtattttaggtgttccggtcactaggaaggagtgatctgattaagttagtgtaagattataaaataaacgcattaattaaatagatgataataataataataataattattattattattatttaaaataattatttgcttttaattttttaaataattattttgctttaatttgatcactttgcactttttcgtgcttcgcccaaccttgcacttttcgtgcttcgactcagcacggtttctttttggtagttattgagattttgttcgtttttcataagtgtctttatatttatttaacaccccaattttggaaaattcgtaaaaattttttccgttgccatttcgtcttgtcactgttagaatcttaatattttcagatttgctacgtacagttaaaatttcaactcgatcggttcatgggaagtggtcaaactaacaaaaaataggttgtccttatattaaattaacacagtgtataatcataactttttatgctgatcaaaaaagtccattgtttttgtgggtttgaaattaactggtaattaattctccgagcacagaagtcatagcgacattaggtttttgcattccgtagcaaattttatgctctttgtgttcctcatattcgtcttacattaaaattttttccagcccccttagaatttttttctgaaaatttctggtttcaagcaattaatttttcatttcagatcatcatgcaggagtgatctgatcacttttgtgcaatatacatttttgattcataaaaagttatgcttacatgacattttgagatttttaaatagtttctagaaagttgtagatagtgcgctataattttattggcaaagataatagtttgaatatttttttctttcctcaaaattatgaggaagttaatctaagaattaatttatataataagaaaaaaacagtttttagccagtttcaattttttattgcatcataaattcgaatttaacaatttttagtgcaaagaatatccaacagaaaatgatttcttgcaaatcaaaaagacatgttttacatttatgttttaataaagattaaatataaataactcagcaccatcactcatccaaatacattcccgaacatttttacgaataaaatttcttcccagatttagcgtaatctaaaaaatcaaaatttaaaataggtttatatgacaaatcgcaccgatcaacagttggcacggtttgaattgtacggtcgagtaaatgttcccgtagcgctccatttgcttgatcaaattttgcgccccgtacaaatcgacgaagcggaacggaccaccccaaaacggggggaagccgaggccaaacacgctggccacatcaccgtctgactaaaacaaatgttgctttgaaaattatttttaaatgcaaatattttaaaattcctttaaaaaactaaaaaattttatgcaatcaattaaaaagtgatcagcacaaaattccaaacttttggaccaataaaaataaatgcattttctgcaattgaaatccattttttaatttaattgtagttttaacaattgcccaccggtgatgaaatgatgccctcctccagacaaatcagcgcctcgttgacgaaacgcgacaccacccgaatttgttgatactccaccgacgaagcgccctcggacgagctcagtttgtagcgtgccactatttcctgcgccttcgaatttggcactttcttcgactttttgccaccatcggcagaataggtgtaaatgcctgaggaaattgaaaaattaattattggcaatgcattcgaatttcatttgtatttgcaatgaggatttgatgaatttgaatatcttagcgagattgaaacattgaaaatattttgattgatcacttaatttttagagtgaatatgattttgttttggctatttaaattgtttgttttgcgaaataaaggcaagaaatccaaaaaagcactttgagtgggaaaaggaagaaattgagtgttactatataaagcaattaaatatccatccaatttttaaataaatcaaatctccaaattaaaaaattcaaaattaagaatttgttccaaaattcaagctttttttaagcttttcaaggagggcggtggaatgaatggccttttattttccatatctcccagtgaataagggcattgtgcaagcatcgaaaaaatgcagctctcacctgcacccgactttttgcccttgaagccggcctttgtcaggtcagcaagcagttcggaggagccgccttgcacacgggggccaagcgctttgcccaaaaaggtggtcagatattcgctataatcaagtccaatctaaaaaaaattgtttttttttttcaaaaaacaaattggtatgtgcctcgtccgccagggtggccatgccgacggagaagccgaattgggtggtgattttgtccacttgttgcggcgacacgccctcctggaacagacggactacctcattaagcattgggctaagacagcgggcaacgaaaaagccagggccatcctgaaaagaaaatttttaaaaaaatgaaaattacatatttttttcaagattaagtatttaatgtaaaaagtctatttttaaaaaataatttttcaaatcatgcaacccgccttgaccacaacaatcatcttcttttggtccaaaccgagtttggcggccacggcaagcgtttcatgggatgttttgtcagcgatgatcacttccagcatttgcattttgtctacaggcgaaaactgaaaaagggaaaccaattcactatttcctaaaatatatccctcgcattaaatagagcccgcctttgaggtaggttgaaaaataaagtcatggctctattttaggaaataaggtaattactattttaataatctgtgtaaaaaaattgactgtgatgcatggaaattgatggaagtgaataagaaaatttataaaatttaagataaagaaaatttaattgagttgttctaaatttgattttgaatttttcaaataaaaattaataaaaggatatttgtgatttgcttcacacacatagttcatgccgatgacccgctcggggcattgtgcgaccgctacgatgtcgtggatgggcagtactgaagtgtttgtggcgatgatgcaatggttgggcacaaccttttcaagctgaaaaagcaattcggtagaaaaaaaagactaaaaaaattattttatttggtaaattgattagaataagaaaattaatttataagaaataataaaaacacatggacattccaaataaataacacttgccttctttatgatttcgtgctttgattcaatctcctcagattctgtctcgacaacaaaatccgcatttcgcaatttctcataatcatccaattcctgacaaaaaatgtcatcagaaaacgaaaaattttcagaaaatttgacaaaaaattgagccaaaaataataaaaggaaattaagttttttctctatattaaaaataactttaaagggtatcaaaaaactaaattcatacaatgtgtcatattttttcatcttaccggtttcagattggcgagaaaaatttttttttcagcagcggtgatcaatttgcactttatctgaccctccatttgggaggtgatttgcttcagtccgccgtccaatgtctcctggtttgtgtcgatcagaatctgtaattgcataattttcagcgcgtataggtgccatatttgggatgtgttcttttatggatattttcatgatttataatttaaaattttattaattacgatcaatttataattttacgtggattatacgagaaattgttttggttaaaaaatgattttaaataagtttttggttaatttaatatattattttcaaaaatgaatttgatctttttataaattctgtgcaagtgtgcgaaaaccaaaaaataatttttgaaaacgaaaacaaaaatgtttttttcacgaaaacgaaacacgtaaaacgaaaaaagggtaacacgaaacacccctgattctgtgtgtgacttaccgttttgatatccttgtcaatgctcacatttgcgatgccagcgcccgtcaggccggcacctatgat

SEQ ID NO: 10456 - DNA, 1176 bp, Heterodera glycines
  unsure (1)..(1176): unsure at all n locations
atcaataaaaaattnttccctctatcatttcatgtnntaatattaattttaagacgctgctgaaacttaccccgtttttgcgcgcctcaccgtatttgtcacttttgcactcagtttgcccttcagcaccaaatctcattaatattgtaaatgaaaaaactaatgacaataccttttgaaagtccgatgagcgcctccgactgtgtcgtttgggtgagatagccaaacgcctagaagcgggataagtatctagttatgcctttttggcctgattgagggccccccccggcccccnncccccgctcagctaacaatgagccctaattatcatatattcgcatacttaaattatgaacccacctttgtttcctcctcgtagccctcctgtgtgccgtccacgagcccggtgcggacaacgtccaaaatgcgcaatggggccgggtaattgccatgtgttttcttcatcactttgtcacgtgccattcgcatcacctgttatgtaaagaagtaatttgtaattagaagttggttagaattattttttaacaaggaaatattcccaaatttgattcggcagcgcctgttcggcactgatggtcctatgccttaaaaaactcaaaaattaattaaaaaagtcaaatgaatcactaaaattgtataatgtgtaacattagaaattgaagaaataatatgggttagggaatgtgtaaaaaaaaattaattatttttattttaaatagatttatttatacattgcccagcaacggtttgcgggtcagcaatgcgttctgcactcggcccattaagggtggccctctggtgattttcattgtgccggctgtgagctgttcacaggttgaaatagcaatctgaaaaaatgattagggtgttcattactctatgtgagaaatattgcgcataaacattaaaatatgaaaaaacacagcaattattaaaacccttaaaaatgtacaaaattggttaaaataaatatttatatatatgttcattttttagcaaattggcatgtaaatcactaaaaaaaatttcccagcggcgcttatgggcaccgctggactcctcccccagttcccaaaatctttttttgaataaagcgcgccgcaaaaaaacgtgtaatggtcccgaaaaaaatccaacaatgctgtataaaaatat

SEQ ID NO: 10457 - DNA, 4094 bp, Heterodera glycines
agtgagtgaccgaccctgtgctccactgtgaatggatttgccatttctgcgttgatcccctctttcccttcagtgccattcgtccgatccctgcggcaatgccattggcaccgtttcctcttcttttgccgactctaccgacaaaacgctgtccgtcgacagcttcagaagtgtgccgtctggcgccgttctcgctcttccttccccttctctgccttgctccactctcttcaacgtgctcagcttcgtctcttcccctcaccaactctcttccctccgtgccgcctttcgatcttctctcttccgctcagtcgcattttcctttgcttttcgcctttggggatggctgatcaaaatggccacttctgatcaaaggtgcgacaaatgcgatattagtcattgctttgctcgacggatgatggcttccccacacaaatttacttctcctccactctcgctttctctctctcctccactctcgctttctctctctctcctccactctcgctttctccccccccccctccccaccccctctctccccttcactctctcattgtccctttctctttgatttacagtgtttccgatgtgatttggcactttctatccgcccttccgccttcttcgccccgctttccgcttcgtcctcaccctacgcagctttgtccgctcgccggccctctccccattcatcggatggtctctctcttccatgaactgctccgttccctcgccgtcctttttcactcttcggcggagggatcggagccgcgctttaagtgccatcgaacatctcaaatgagtgggaatttggcattttgcctttttttggcatttcgcatttttcagcggcgctttgtttccgcgcttggacctttcagttgaccgaccatgaacaggtcaaaaagtggcattgcttttttgatgtccgatgtttaaagccattattttcttctttaggaccttttgccggtcattcgttcgcttctttccgtcgttagcaatgccctcagcacttcttctgacactcttttgaccacagaatctgtcaattcgagggcaaaagagtcgcatgacgagcagaatttgtgccaattcaaatttgacgatttgagctcagaggcgcaattggacgcgtcaagccgcgcgcaaatggtcggctgtttggtggacggaaattgtgacactttttgggagagtggggaggaggagagggggcgcacggagcggcgactgagggcggcaaactttggcccgggggcgctgctgttggcacttttcattgacaatgccaaggacgaggggttcagagtgggacgactgagcatcaccagcccagggaggcgagaagatgaagcagcccggggggatgaagcagttcagcgaggggacgatgaagcaaaacacttgctggacacttcgttggacaaagttcgaatgcattgccgattagtgctaattaccaatgatggcctacaattaaggaattttccggatgggtcaaatgtgccatcgatggacgaaaaagcgtcgaaatttgcctttgggtattttatcggtttattttatgcatttaaaattcctttgttggccagggcgatgagcttggctgccgtgtccgccaacttcgcattctcggctttcgtcatggtccgtccgccgttccccccgccgcccctccgccaaaatccgtctcccaacaaatgcttttcaccagcggcgctcaaagcgacgcattcgctctgttccaactgttggctactcaagtgctttgtgaccgaattgcgcccgaggggacggaggacaacgcacttagggagacggtgttggacatggtcacggcacgggggcagctgatgcatcccctgcagcaatttgttggcactcacctcgccaacggtattcaaaggtgcgaattttaaattacattaataattataagtaattgctttagggaagtccaaagccttcgcatccgccgcaggcgcaatttctcatatgtcaacgctttgctccaattgctcatgcgaatgaattcagccgctgctcagccaattgttcacgcgtatgatcatcatctgctgatggcactttctgatttgtggctgttcgcttccgaagccgtgcaggaaaaagcattgaaagcattcgaatgtttaatcaccgccggcgacggagggcaaagggaaggaaaagtgccggaagggactgaaatgggcgtgttggccgaacgattgttggttacggtagtcaaagtgttgcaaatacaagtgaaggaacagcgagcagcagcatttgggactaatcgaggcagacagcaactgaccaaacacacaattggggtgagcaattagacagtgccaattggccatcagtccgatcattttctgatcggtccttttccattggtcaagactctcgcctgcgatgtgccaccgcactgggccatttctgaccatccgagtgccgagtccgcccgctttgtcattcgtttccttcgctcacttcgcccttctccctggcgtgccgccctccgtgcccaactcgcgcatttcgtgctcagtctgtgctcctccttccacgattcgctttccaagagcaattcgcttacgcattgtgtctgtcgcgcctctttttggttgtctgtcgccgctttagccgcaattggcggcatcgattggctggaggaagtgcccgagtatcagagactgaaggtggcatctgcggaattgcgctttcgttttcccaatgcttttcacagtcagctgcgactgatcgcactccgtcgcccctctgcgacaaccatgacgacggacgcacgcgcgcgcagttgcgctgtcagacatgcgccctttcgctgtgccgtgactgtttttccgttttgcatttgagccgacgaaaccaatgccatcgcgcacaaccgattggtgtcggcattttgggagtgttgacaccgcgaatggacttccacgagggctgcaacagactccggctgatcagcaccgaccagcatcatccgctgctgctcattctgatcaacccgaacagtctgatcggacttgtcgaattgggcgctggcacaggcaaaatcagtggcagggcaagcggccaaatggtccccggagggtttttgagaagcgatgaaacaatggaggaggaggacgaatgcccgagcggagatcacaaattggccgactaaaagtgccgattttgtggggctacgctggcaactgctgaacaggtgccaagccaagccaatggcaacttatctcccctttgattatgccgccttttactcctttagcggcttaatggtctctgcgagttggaggagtgccatcagaaggacactttggcttgtcagtcggtgttaagctgtggccatttatgccacggcattcgggaagaaattcaatgtccgccttgccttttatgctcttccggtcggtcatttgcaaaattgcttcgtttggttccatgttcaaatgccttttcagaccaattccatcaggacgcggacgacctttgctccatttgtttctctgaacgccttggcgaggcgccatgcgtacagctgaagtgtgtgcacttttttcactggcaatgtgtgcgcaccgcacttgaaaagcggtggccggggccacggatcagttttcgcttcatgcagtgccccctctgcaaggaaaatgtgaagggaaagcggcgggggcggggggggggggggcgaaattggcacagaaaatgggacggaatttgggacagactttttagtattgaaaatatcccatcagatcgatcatccggcctttgctgacttactgaaacccttgaaagaactcgagagtgacgtgaagcggaaggcacggatgcgtttggaatacgaatgcggcggcggttggggcgcattgcccggcacatcggcggagagcactcggaatgacaggtcgacaattatcgaatcattgtgcatttttgatttaacgcaactgatgattgctcattagcgcccttttggagaccgccttggataaatacgtttacgtgcaatgctcgcgctgtctgaaggcgtatttcgggggagaaagtcgctg

SEQ ID NO: 10458 - DNA, 1340 bp, Heterodera glycines
ccctttcagttacccgatccggagccgtgccctcttcgcattgcttcgcatccgccaacgggcgaaggtccgttcattctttggcatttggtgccatttttggtttttcataaattccaattggcacattattattatgtttatttatgttttaatttaattaatttcctttcttttctctcagaatttgctttgggctgtggcatttgtcgcaatttgcgcagtttctgacacttcgtttggcaaaattccctgcatttcgtttgccggttttccataatttttctatggcattcctccaatttgtcgatgatttccatatttctgcattttaatttattttatatttctttaataaaaataaatatatgttgttttggttaattaatttttaattttcttcgtcatttgcttttttcccttcattattcgttaattaatcttccgttttgcactttgaattttaattcttttgaacaaatattctgtgtaaacaggcctaattgataccatttttttaatccgtcaattttgtattttgtgccaattcttttggcattttcaccgtctttgggtgtcaatagacaattggcccctttttagccattcttttgccatctttcgcctaattctgctaaatttttgttccaataattcgctttgtcgtcgatggtttttctttggcttttcccagtatttctgaactttctaagcccataaacactgaaatccgccgtggtccgccacctccgcgcgcggatttatcacgtcttacggctaataaataaattcgccaaatccgtccaaatgcctttggcttttcctcccgctggttccggcttttccttgccgacccatcgccgtaatggcactttgccccgctccgcgtccctccgtttttcttctctgcgcactccgtgccgtcctttcccgttaatccttcttaatccaatgtcctttcctctcatgcattccaatcatttcgttcattcattcattgctccatccgacgaatgtttggcatggacaacgcttccgccgcctttccgttcgcttcttcctccgctgaccaaattcagttcgacttttccgactccgttttcgacctgtccgtcctccatttgccttcggatgtctttctccgtcaacacaatctttccgattcgcatcatcttgcagttgcgcatcaaaatacgcgtgcccagcaaatgtacaacatggaggcgggcttggacccctttttggtgatgaagggcggcgtggagagggccgtggtgttggcctacttcttgccactgatgcttatcggcatcatcggtatttgtgtttgattcccctcc

SEQ ID NO: 10459 - DNA, 1415 bp, Heterodera glycines
agagaaaaagacaaagtgacgcggcatttgccaattcagaaccattacatggctatattccggacgaaaagcgtggagatggaagacgccacttgcggctcgcaactgcccgaccgccttttggtgggttacactttaatcaactaattggatttgtaattagcgaattatacacctgatcgctcgctctaacactacccctagcctttggtttgccatattcacccctttctctccttcacttgtatttccaaactctctcttctccccgttcctctctgtccctctcttctctctctctcccttcctcttccatattctactctctctctctctctctctcctctctctctctctctctctctctcctctctctcttctctttctctctctctctctctgcgccctctctttctctccctctctctctccctcttccaaattcccattccctctctctcttcacctcttctcctcctctctgtctctctcccattctctctcttactctccctccctcttaagcccttcttcatctcctatatgcttttgttcggcttcatcgtgcctctccctctgatcgccgtctgctatttcttcattattcgtcaccttcgtcgcaaaccgcgaggtaaaaaacagtcaaaaaatgagtagccagccattcgctgctgttttgcttgctgccttttacatttactaattagctagttaattagcctttcgctaattgccctttacattttaggttccgtcacttacactgcacgcgctgtccgctccattctccgcgttgtcattttccattttatctgtatgtttttattaattattttcctaattaccccctttctttttcccattcattccattcttttgcccctttttaggttggacccctttttggttgttcgttttgctccctcttttgtcccatctgaagttcgtccaaatggacacttttctcaattctcatggtgctcgcattggccgaatgctcacctgctttttgccctatttgaacagctcaatgaattgggttttctatgggtaattaataataattaattatactaattaataattagtgcctaattgcttatttgatttccatggcattttttgtagaatgatgaaccgccaattgcgcgagaccggtgccgtcaccgggcgtcgttcgtgcatgccgttgtccgccacccttcggtccacccgtacgacttcgaccgcctcaaaacggtccattcgatcactgatcgcctcaagcagagtttgacggacgaaagacagcagggaattgttgagaaagagaatgaatatattaatttttgttgtatatttctgcttcaatatttgtttaaatcggcttaaattataaatgatttattttattatttaatttaaaaagcataaaa

SEQ ID NO: 10460 - DNA, 3822 bp, Heterodera glycines
atttgatcagtcactctcaggatggactataagtgatcgatgtgtggtgctctgatcagaaaaaaaacgaataatcatttgcttttatcagttaacgagattgaaatattgagcaatatgattagagacgaagcattgctcttacaaattaggaagggttagaaatatttaactgattaataggattattagagatatatgataaaaatgatcaggggctaatgaacacatgaatgaagaaatgaacttgaactgggcatctaatcaacattttgtgattggaatgacataaacaagcaatgaaatcataatgatccgaaataaattaaactggacaatgtgatcaaagatggaaacggttggttcaatgtgatcagttacaagcatggatctccgcgattaaaaaagttttctcactggataagatggtgatctgagccttcagagaaacgcaaccgaaatgagaccattactgatcgggaattatttgaaaccaatcaatgttgattagaagtggataaaaatcaataatacagatcagctgaagaataaatttacattaacaaaaccgaccggaaaaatctcaagattttgcggcactggcgctaacggcacacattcgatgatcgcttccaattgttccatgccctgaaatttgtcagaaactcaaaaaccggcaaaatgccattgttccccaatgccaccttttgttccctgtcaattgcctttctcaaaatcagctgtttgctgaacgcgtttaggcgcacaaactcgcggccttccacaatgtttagcttcattgtcggcttcggcccgccactgcgcccaatgattggcaaagtgcccaaaatggcacctacacaaaagtgggaaaggaatgccattggatttgaaaccaaatcggctaaacaaaaatttaaaacttttttggatgtacggaagaaactaatcattgggaaattgacattgcaaggccatcaaaaatttctgaaatcgcatttcaaattttttcgaggtccattatgggcgaaatttctgaaaatttgagaaaaaatgaatttttttttgtcttcatttcgaacattttgaagacaaacaaaaaacataaatattaaaaagcatcgaaattcgaatcgaatggacttggagaaaacctttcttggcattctccaccattgacatgtaaatggcacttcgatcgcgctcgagcagacaaacgggctgagcagcacgttcatcgtcttgatgaccaaaattgtggcgacttagacccgattgatcaattccatccgctgtttttgcttcttgggaatgtgatcggtgccatttgatcgccagggactcatccgacgacacatttatttgcccaaatgaagacgaagcgaaaattggccaaatgaaaaacaaaacggggaaagttagcagcagatggaaccggtgaaggagaagaagcttcatccgcttaattggtgtgttaattaatattttggacagtaaaatgagaaaggacagtggcgaccgatggtttttgttaattaattagtggtaaatgctcgagattccctaattatatcacttttttgaccagagtgttgactttatctgagtaaagaatcttgacactaatcattagggctgctcaagagtcatttggtccatttacaatctctgctggttggattatctaaggtgacaatgctcataatagggatgagattttcgtggctaaaaagcccaaaacataattaacgaaaagtggcaaaaaatgccgtaatggcaaaaatagtggtgaaaatgattgacaatttgttaaaatttggaaatttatgctttcctttcattattcatagagagctgtaagtacattttcgaatttgttttacgctatttcgaatttggagtgatttctggtcgaaattttttaggtatcgaaatcccaaatgatttttaggagactaatttagatcgagtttttgcccgatcattgatcataaatcaatctgccgatcaacggacggtcaatttgttgagtgtccccaatggtatcactttctgctgttgctttgatcatcgacctcccatttgtcccactttcttatgttaagagcaggaatgtatgatatttacaatatctttcaactgatcagtcagagtcgcgctttcttctcgagtgtttttgttcgttgaattcggcgatgagtggcgaaacaatggaaaatgaaaacggagaaaacggagagggcgggggggaaaggaggaaagtgatcaaagagagagcagtgatcagagtgggacaaaaaggggaaaagtgatcaaaatgggagagagtgatcagagtgggacagaaaatgggaggtgatcagaatgcgggataatgagagtgatcagagtagggcttaaatggataaagtgatcagagggggacagagtaaggatcagatgttggaaaataaagatggaaagtgataaatgatcggacatacgcacttaaagtcactacattaattttaaattattgtacacaataaatcagtgatcattaaaagcaaaagaccgagactcggaatttgattaagaaaatggtcatggagatcccggcttaatccccggcagaagatacccggaggtacggcacgggatcgtagttgtgaacaaagcttaaatctttgattaaaagttagaagcatcaagcaacacacttttgctgcttccatttttcaattttaatttactaaatttcaaatccccctccatccccgctcaatttcgcccctttccccgccgtttctgtccctccattaactccgatgggattatttacagccatggcactctcccccccctttcccggcggggttttgatgatggccactttttaccgtttgccgctttgctctgtccgccgttgccattggcgccgtcgtccactcaatcggtgcaaaaagtgccgcggggaaatgcgcaaaagggggcaaatgccggcacaaacagtgggaactccaaagtggagatttgtttttgtgcgtcctcagcagatgaattgggattttcaacagggaaataaataaaaacacattttggcacggcacaattttagccttttttggagaaatgtgcgaacttttacggcagaccaatggaaaacagccaaatgcgcggaccattcattctatttagagaaagaaatttcttgaaaaataagatttttcatactaaaataattaaaataatgtaataactaagtaaataatataaaatatgatttaaatgatgctataatgggtataaaataatccgattttttcggtataaaaccgaaaaaaaccgaaaaactcaaaaaattttcggtcggtcggtttcggttaaaaaaccgaaaccgaaaaccgaaaaaaccgaaaaaaaccgaccggtccgatctctagtaataattaaagaaaaaaaattcttaaaattcattaaatgtaaattattaacaaactgttaaatacgcttattatttgtaggaattttgtatatagatttgcaaattttggaagtaaaaagtttaaatttaaaaaattatttaatgctcatattattttttaatatttaaattttgctattttatttttaatcatttcgttttttgtttcgctgcgtcatttccccgccggcgttaatttctcgtccatttttaatttattacctttgcgcttttccattattattttctcaaatgccaattttatgtcttttttccctcatttaaaaaaatttattggctttttgttctgccattttaatgcctttttcattaattttgtcgtcccattggactctaga

SEQ ID NO: 10461 - DNA, 2121 bp, Heterodera glycines
  unsure (1)..(2121): unsure at all n locations
aaattaagattatttttataattaattttaaagcatttcnaattttatntagttaaataaaaaatgacaaaaatgttgaagcaaaacggtggcggcgaaagtgccattctgttgccncatcagcncaattcctcgactttgatcggctccagcgacgagtgcgacatcgtaatcaaagtccgttggatgttaatttaaaaatattttattttatttaaatttattttttccttttttagagtcccggccttcgtccaaaacacgcggtgatcgaattctatccgaaaacaaaatcattttggctacgccaattggacgcgaaaaacgaacagcaacagcagcaacagcaacagaaaaggcgcatggacagcggtgagaaaaagaaaatcattcggttactgtattttgggggttttgtaccccctaattactgtaacagtaaaataattttaaaaatttcataaatgcccgaaaacccttactttaagaatagaaaaaatcgttcataaaaagttctgtcctttttacagtaccgcctcctccaccatacccctacgaggacactgtggggccacaaaacctgtcggacaacaccagacagcaagtgttgagagatggtaggcagagaaaaaaagggcaagggcagacacacggaaacatttattattaaatgttgaaaaaataatcttttaaaaggttcactgattgaactccatccgatggacacactgcgcttcggcaaaggcgcaaatgcggtggaatttgtcttcaaaatgccgcccctccatcacaaaacggtggcacaacaatttttgaaattatgccttaattgggtaattatttgggcaattaaggcacctcgatcaaaatggtcatgatctgtgataaggtttaattgatcccgcggctcaaaaatttttcagaaataggaaatcaaaatttttttacgacccccaaaagcgtcggaaaccacaagtcggaaatcggaactccgtgccatcccaagccgtgactcgaacgcgcgggattcacgagcattcattaaatgaaaggcatcaacatttaagcgcttcgatccacatccgccgccggtgcgcaagaaatgctcgttggaccgcgaagacatttcgcttcccatcgtcggagtaaaaaattcggggaaggggcagggggcaattaaacttttaaattaattaattttttaatttttagagtcgcattcagccgaaggcacacgccgaccgttttgtccgccccaaacagcagtcaaaccacagactttgccaactcggtggccaccaaacgcagaagcaatcgcaaaatgtacagcagcagcaattatcaaatggagtaaatttaataaaaaattaaatgaaaaaattaataatcaattaggttgattaactgagttatgatttaattgcctaattacaaaggtaataaaatcaattggataattataaataataataattatctttatgtttttaattaatttttatttaattaattatttatttattaattagttttttaaaattatttgtttatttcgagatttacttttaatgcctaatgaacttgaattaataaattaatgatgtggtaattgcccctcaatttgaggtcgctttgatgcgccgaagtgtttccgcgtgccgactgatttctgtggccgattcgcccacaaataattcgctgccgcgcgtggacacaccgtggaaaacggaggcaaatggtgggacgagaagcccaagtggatacggtaatacgaacatatttttattttaagcggatacggtaatgataatttcaaaaggcatactgtagtgaagaataaagatgaaaattaggtaactgaatgaatcatttgaaggaatgattaaatgattatggtaaagaattaatgcaaattcgaaagacaagaaaatctatcgatctgagaaccgtctaattccaggctccatcttactttattaatataaaattttttgtttgcttttatataaaaataaaagaaaagaaaagatgaattattgaattagtttttaaaaaataaaaagttttaaatttttaaaatggcaaatttaagaagcaaanttacactnatttgactctaga

SEQ ID NO: 10462 - DNA, 4116 bp, Heterodera glycines
tccttctcccggaattcgttcatggtttttacgacctctgacgaaacaaaaaaaattggtagaaattaaaaagctttttaattattaatgtttgatttcccatatatttaagtgatgtaccaaaggaatattttggacgatccggtggaactatcgcgactcttgcgtcaggctgagagagaccacttcagggctgccgaacaaatgcgcacattaagaaaaatcgtgtgagtttgttttaccaaggcttcggggagaccgattcacctgaccgcctatccctctttattttcattaaataattacgccaccgaaattttaatattataattttttaacatttagtgaaaaaattgcggctgccaaaaagagcgtttcgtttcgggacgacaaggctgcagcaaatacagtgagcacgtacatgtcggatctgatcagtaatcggggaggcgggtgcctttgcaatgatacctccatcttcattcaggaagtgggttctatttattatttaaatgcttttgtaatagcaactggcatttaatttttacaaatcgaacagggattgcgcaacagtttcattggcgggtcacttgggataaaagtcatgtgcaatacgcttatggagtcacccctgacgcccgcagaatgcaccagcatggttgagaccatatttcaaggcgccatttccatttcaatggaattaacttcggaggacgtcctgtgtaacttagtggacaaaaactggtattttcatgcactgatttggcaatgcactaattatttctttgatttaattaaaacgtttattttcaaacaatttttagctcggaaaagacatacaataagacgggcccgataagttgcgagtactgcaagataatgcacgcgaaggccaaaacggtaaattaaatcaaataaaaatgcgtatctcaattaaatagtttcgaacaaatttttgtttatagcacaataaaacaatatttaaaaacaatattaattagacattttttcactgcgctccttttcgtcccaaggtagcggaatatttcgacgcgatgtttttaggcctcagtgtcatgtgtgcgcgaatcgatacaccggaaggaaagatcactgtgaagaccatgtttacgtgatcacaaatggaatcaaacaaaccattaaactttatttggatgaaaaagtagcaaaaaagcgatgtaaatatactttcatgtgcaagaaatgaatggcaaatgccatccgttctttaccaataaactgaaaatctgaaacaaaaataacataattcttgcatatgggttttttaaattgccgtttatgttgtaattcacaccattttgaaccaattgatgaaaaacaaagagatgataagaaaaatacttttatgcttttttctagggtttctaccacatggttgcgtttttgtctttcctatattttcgagtttatatgcatatttttggattccctacttattatcaaaaaagctaattaatatttgactaatttaaaagctctatttctatggacaaaattttacaatataatttattttataaaaaagaaacaattactaaataatgcagtaaaagttaaataataaaaatatgaaaaagcattctcgtcaaaagtgcaaaaaaaaaaacaatgaataaaaataatgatgaatgacatttttctgtaacatttcttattgaagcaaaaggacggcaaaacgaaggcatttgaattcgaaatgaggaaacgaagagtaaaattattttattattggaaaaattgttaaattatttttgtattacaggaatggagaagtgaatttcgaaaattaaaggagagtcgtttaattttctaaaattccaaataaaatttctgggtttttcattgatttgacattaacttaaaggcaaaaaacgccatcgaaatgtgtactgacggattgtgggatggaaaatcggatggattttataaatttagttaatttaaaaaatatatgaattttacattgttttattttctaatttttttaacgggcttcgttacaaatttcaaattgtgttttttttattataaccgaaccaaaaactttttattaaatgcgaaattgttaaaattgcccatatcatcaacaaaaaactttttgtacagcattttttaaacgaatcttttttgtaataattcatacgcaatttattcttgaccttgccctaacggttacaaaaacggatgagaatgataaatgagggcggatgaatgtttatgcaaatgtctcagtcttcattatcacaataataaatctcttcatcgaaaatcctcttgataagcaatgttccttttaccgaaatgtcacagacgtaaaaaaaccataataattccaccgtttcattctgctttttaaacaaataatcattttttccccttttttgacttttctgaattgacatttcgtcgtccttttgtgaatgcgtcaaatgccagctgaattgcacagtcatttctgtattcaaaaagcgacattttaaaatatcagtcaccaattatttggctaaaattaagcattaaaccaacgctttttgaaataaggtttttattctctgaaaattaaatgtttcgctttgttgtttgtgtgctccttctcccggaattcgttcatggtttttacgaccttgaacaaaaagaaagatttggtaaaaatgaaaaagctttttatttttgatttcccttatttcagtgattgacaaaatgaatgtgtttgatgacccggccaaacttttgcgccttttgcgtcaggccgagagagggcaccaaaaggctgccgagcaaatgcgcacactcagaaaaatcgtgtgagtttgttttaccaaggcttcggggagaccgattcacctgaccgcctatccctctttattttcatatttatttcttagccgccataatttcaatgagacatgattaggccaattttgaatttataaacgcaaaaaatatatactataatttaaaaatttcctttaattttcttataaaaaattatttaacatttagtgaagcggaagttgctgtcgataagggcgtttcgtttcgggaagaagtggttgcaacaaacgcactggacctgtatctgttgaatgtgttaaacaaaacggggaacggatgcctctgcaacggcacgtctatttttatccaacaggtgggtttttatatgtcatttttaaatgctttcataatagcaactggcatttttactgggaaaaatcatttttacaaattaaacagggactaacgagcagtttcatcggcggatctctcggaatgcaaataatgtgtagttcgttaaccgcgtcaccaatcaccccggcggaatgcagcacgatggttaacacagtatttcaaggagctgttttgattgcattggaattgagttcggcagacgtcttctgtaatttggtagacaaaaaatggtaagcaacaataactttttagtttgtacttatttcacaattgccataatcacttcaattattcaattaaacatttttccagtaatacgatgacatacaacaatactagcccgatcagttgcgcctattgtcggctaattcacgccaaagcaaaaaaggtaaattaaataaagcaaataaaaaagcatatctcaaagaatatatgcgagaaaaattaaatgaaacgtttttcattcatgctccatttcaacccaggtggcagagcatttcgattcgatgttctccggactgaaagtgatgtgctcccgtttggaaaaacagacgttaaacgaaagctgcaaaagccaagtcaagctacttacaaggaagattaaacaaatcatcgaagcttttttggatgtggatgaggccgaattgaggtgcctgcacatattcatgtgcaaggaataaaatggcgaatgcaagttaccaatttcttacaaatgaatttttgatttactgttgcaatcaacataatttgtaccatcggaaataaacggagaaccatttgaagaaattgtaaagtcaagcaatgaaatagttaagctcatttttttgactgacagaattgcaattttcttaataatttctcgcaataatttctcttaaacgggaa

SEQ ID NO: 10463 - DNA, 3257 bp, Heterodera glycines
gaaaaatgccagcgccgcacgacaagtcaactctacggtctttccttggagcgctcacatactacggcaaattcatcaaacaaatgcgcgaaataagaagcccattagatgaattgcttaaaaaggatgtaccgtggaattgggaagatgaacaacaaaaatccttcgagaaagccaaagaaattatgctttcggatttattgttaacgcatttcgaccccaaattgccaatcattgtggccgctgatgcttcaaaaggaggaattggtgcaacaatcagccatcaatttcccgacaaaagggaacgtgtcattgaacacgcatcatgcactttcacgactgcgcaacaaaattacagccaaatcgaaaaagaggctttaggattggtgtttgcggtacaaaaattccaccgcatgctatacggcagaagattcactctgctgactgatcacaagcccctactggcaatcttcggatcaacaaaaggcatcccaatttattcagccagccgacttcaacgctgggcgttaattttgtcaaattacgaatttgatattaaatacgtcaacacaaaggcattcggaaatgccgacgtactttcgaggctcatcgcaaattatccgaggccatcggaagacattctcatcgcaaacatctgcaatgacactgattgctgtgttaattttgtttttgaggccaaaattgagcaacttccgatcaccgcaaaaataatagcggaggaatcagcaaaagacgaaattctacaacaaatcagtgccttcaccaaacaaggatggccgcaaaaattggacgacattaaattgtctccttttcttccaaaaaaggcacaaatatccgaaatcgaaggatgtctcgcctacggtgaacgaattatcatcccttcgtcactccggaacaacatcctcaaatcattgcattttgcacatcccggcattgtgcgaatgaaagccattgccaggaaccacgtttactggcccggaatcgactccgaaatcgaacgagtggtcaaacaatgcgaggaatgccactcagcggccaaaaatcctacaaaagcgacccttcagccatggaaggcagcaaacggagtttttgagcggattcacattgatttcgccggcccgtgcgctgacggccaaacatacctggtattggtcgacgcctactcaaaatggccagaagtatggcaaatggaaagaacatccagccaactcaccatttcaatgctcaaatcattcgtgcatcggcttggaattcccaaagaaattgtctccgacaatggaagccaatttcgatccgccgaatttgcacaattctgcaaagaattcgacataaaacacaccttcacgccgccgttccacccaatgtcgaatggggccgctgaacggtttgtcgacatttttaaaaggtcaatgaaaaagtgccgtcaagaaggcaaagattggcttcaaaaagtgcttttggcgtatcgcacgacaccaaacacggcactcaacggtcattcgccagacgaacttttccttggccgacgcatgcgcacaagaatgacacttgtccatcccgaaaaacaaaaactccagccaacaaatttggaaaattttcaacaattccaagggcaatacatcaaaaagatggaaaatcaattcaacacaaaacatggagccaaatcaaccattttccaaaatgaggaaccaatttatttttggaatttgaaaaacaataaagccatttggctcccgggaaaaattatagagaaattcggcacatctccgacgtatcgcatcttggcaccgacgcttggccgagccattcatcgtcatgccaaccaaatcaggcgacgtttcccaattgaattggaggacaatgatcaagttgaagaaaatgatcagacacaggcacaaaatccgccgcactcgccgatcgcgcataaaccgcagacgaatcgccagcaaacgcccgccgctgagcccgtgcatttgcgccgatcaggaagagccaaacaagcacctcaacgactggacctggacccgtcaaagcctaaatacggcttaatccgatcatgaatcccaaatcgagggacattcgacttaaggagggaggtgttggatagggatcaaagatcactttcccatcattgttatcgactattctctctccccctttctctgtccaacactatttccattctctctctctctgcctatctcctccacatttctctgaccccacgtctttataagtgcgtccattccctcactcatggctctccgctccattcattcgcattggacatttttattattttattctcctccgtcgctgcactcctccgacctcatcaatttgtgcatttatttttattggtgtttattaataaattgttgatacacaacaattttggcgcagtcagcagcagcagataaattctgcacatcatcaagccaaatcaaggctaattctgcaaaatcttcaagccaaatcaaggcatattctgcacaacctccaagccaaatcaaggcataattcagcaagcctaattttggcacttcaaaagcctgggcggctttcatcggacatcgacaaaaactgatcacctgggtggtgtaagttccgctgggtgcggtttctcatcgacaaaaactgatcacctgggtggtgtaaagtaccgctgggtgcggtttaatcaacaatcaaaatggacgcacaacaacttcagcaaattttggacgcggctctaaaaaaatcagcagaagtttttgccgccgcactcaacattcaaaatcaaaacctaaacccagggtcatccacaacggcatcacttgcggcatcaatcaatgcccgcctcgaaaaattcaattataatccggaggttggacagacatacgatgcttggttgaatcgatacggaaaaatcgttcaacaagacggcgcttcgctcccagagcagtccaaagtccaacttttagtcggaaaattaaacgaggaggaatacaaacggtatgttgacagcattgcaccaaaagccacagaacaattcaactggctcgaaaccgtggcaaatctgaaaaagatttttggtgagacgaggtcgctcttcctccgccgtttcgattgttttcaaattcgccaatgccaaaaccaagacctttcgagtctaggggcacaaatcaattcatcgtgtgaaaacgccgaaggtttggggaagaaagaagagctaaagtgcatgattctcatcatct

SEQ ID NO: 10464 - DNA, 1226 bp, Heterodera glycines
tgaagatcgttatgctgatcgggcaggtcctcaccctccctttaaagcctctttttatagtcaaaaatactgcggatgcccccctaaaagaaatgcttcgtttggcccacctttacagtaaccgattcgctgcccttttcagagataccgtaggcgaacactgtgccgtcgtcggagaagctttccagggtcactgcagttgtgccgtccttggaaagcgtgttcgggtccaggaacacttttcccgtactgttcagggatttagtttggtagagcactctttggtcttaagttggagaagcattttccaagggcacgaaagaggcgaaattaattaaaaagaatttaaggaccccaaattcgaaaacgaaaatttcggaacgtactttgtaagccgctgttgtgataataatagaataaaccgccacaaaattctggcgtgaagaatatttcgtagttccacattttagtaagcctaaaactcgaaaagaaaaaagctattaattaattcatcagcatcgacaatggcattgtccacaccagggatggcattccgaggtcccataaattttcggaaatcggaattccgtactatccttggtccacaccgtaattagaaatgtaaccaaatttaattaatttaaaaatctacgaatggtttagcttctggcgcactgtggtcgcattgagataaggctgtgaaatgttgttgatttcttcgacaaattgcttagtggcattcgctgttgcgttctccaagccgcggtagggatcggggacagagatctgacaaatgaggagtaggaaaagcaaacaatggcagaaaaatgtaacaacaataatgaatttgaacggttagatttaatcgaagacaaattatgaagcaattggtgccaagactgcggaggaaaagccacggaggatcgaattgattgggacaaaatcagattccactggtctgatcagtagaaaagtcaaggaggatcgaattgattgtggacagatttcacggccgatcagatttaaaagtgccgccctatcagtgggaagtgccaatgctaaacattcacttttttcacttctttgccactttgacttttgtaagtgtccgtgacattgcctcgtggcgcctgcggataaaactttgggtcgatcgtcctcatatttgggttaaactttccttctaccactgatgatttggtggacaattttcgctggtcgtgaaa

SEQ ID NO: 10465 - DNA, 2938 bp, Heterodera glycines
atttgccaagggcacgaaaggaggcgaaattaattaaccattatttaaggaccccaaattcgaaaatttcggaacgtactttgtaagccgctgttgtgataataatagaataaaccgccacaaaattctggcgtgaagaatatttcgtagttccacattttagtaagcctaaaactcgaaaagaaagctattaattaattcatcagcatcgacaatggcattgtccacaccagggatggtattccgaggccccataaattttcggaaatcggaattccgtactatccttggtccacaccgtaattagaaatgtaaccaaatttaattaatttaaaaatctacgaatggtttagcttctggcgcactgtggtcgcattgagataaggctgtgaaatgttgttgatttcttcgacaaattgcttagtggcattcgctgttgcgttctccaagccgcggtagggatcggggacagagatctgacaaatgaggagtaggaaaagcaaacaatggcagaaaaatgtaacaacaataatgaatttgaacggttagatttaatcgaagacaaattatgaagcaattggtgccaagactgcggaggaaaagccacggaggatcgaattgattgggacaaaatcagattccactggtctgatcagtagaaaagtcacggaggatcgaattgattgtggacagatttctcggccgatcagatttaaaagtgccgccctatcagtgggaagtgccaatgctaaacattcacttttttcacttctttgccactttgacttttgtaagtgtccgtgacattgcctcgtggcgcctgcggataaaactttgggtcgatcgtcctcatatttgggttaaactttccttctgccactgatgatttggtggacaattttcgctggtcgtgaaagtgtgccgccatttctgtatgattaaaataattaattaattggcaaaaatgagcattcattcaaccgttttccatttgcccatgttttgccaattcgatgccattgcccaatggatttgcatgcagctcttttaatgctgggattttgaccgcattctcgtgtacattcggcataacttggcattttgattttattaatagaatttttgatattttcaaataatttccaatattttttacatttttggtattggtacgttggttgaacatcggcggtgctttcacttgttgaggaggatggcaatcttattgctgaacccgtaatgaaggggctttgctaaatattatttttttcatgaaacaatgccaattaatttaattaattcttgcataatttagtcataatttaaactacgtttttgcccctccctggcccattaaaatcagaaatgatcgaataaatatgtttctaaatcatctctagccaaatgattaatgaagccatagtgccgaaaacaatttcagaccagagcgagtgccacagctgtcttttttaaaatattggacattaagccggtgccgttgtcctccgtttgacttggaacttcgccttctttgtcatcatcactctctgtatttaaattttaatttctttaaataaattatgtttaaaatatgcaccttttttccctttttgtggcttttgtgaaattgaatattttaataagacagcaaaaaagaggcataaaattagaaatttcattttcaatttagaaatggttatttctttttcaacattgccatttatgcagaaaatgaattgacgcgcgcaattagagttatgactatttcatgtgactttttacgttggcaaagccacccattgaaatgccgtggcaaaaaacaacgcaaataaaattatttttcatttcgtattgattaactttaaaaaatatattatattaaaataataataataataataatgaggtaaaagccgaatgttgctttacaacttttcatgccaactgaatgtgtcccctcgaagaagccgacatttagggccagtaaatttctgcgcagtgatgccaactgttagcttttaaaatgccatagtaaatcgccgccggtcgatgtttgtcattgctttggttctggcggcggtgctaagtgacgatatgatgtcgtatctgagatatgacatcatatcggagatacgacgggaattgaaataggcccctgggggagagaattcaattaatctttatttactatctatgaacgcggacatttcggacgatcatatatagtccaaaaaataaaataatactaaatgaattctctaaataattaatgattaataaataattttaaaaatctcaattttttcaattttattagtttttcttttgtacagtggcgggtcaacggctgggcgaaattaaattattttaagttttctctgcttctttatgattttttaaaattaaaaaaacttaatttttataagcttaattataacttggtttgctttgcctgtttatggtaaaggccgaaacacattttgaaataattgaaaattatttttatcacaagaactgtactgatatggccgctctcttttgttcaaattgcatttttcgcgaaacgccctttttgtgcggtaggggtcagttgcatctgagccaagcttaaaacatcataactttttagttgccgttcactcatcttttttcttttagtacataattagtatagtcttttttattttgctatcaattaatgaaagtttccgttacaaaaatggaaataatccaactaaaaatggatgactgttgtgtgatgagtgggtgtgcgtattattgcccatgtccccccccttcactttctctcccatatttccatttcctttgttccgctatttcttatccatccgcccatttcacaccctcccaaatgtatctcttctcccatccatcatcaatgtgttgtggtgttgctttgccatgcctctcttcctaa

SEQ ID NO: 10466 - DNA, 1175 bp, Heterodera glycines
atgccgttgaccgatggatttgcatgcagctcttttaatgctgggattttgaccgcattctcgtgtacattcggcataacttggcattttgattttattaatagaatttttgatattttcaaataatttccaatattttttacatttttggtattggtacgttggttgaacatcggcggtgctttcacttgttgaggaggatggcaatcttattgctgaacccgtaatgaaggggctttgctaaatattatttttttcatgaaacaatgccaattaatttaattaattcttgcataatttagtcataatttaaactacgtttttgcccctccctggcccattaaaatcagaaatgatcgaataaatatgtttctaaatcatctctagccaaatgattaatgaagccatagtgccgaaaacaatttcagaccagggcgagtgccacagctgtcttttttaaaatattggacattaagccggtgccgttgtcctccgtttgacttggaacttcgtcttctttgtcatcatcactctctgtatttaaattttaatttctttaaataaattatgtttaaaatatgcaccttttttccctttttgtggcttttgtgaaattgaatattttaataagacagcaaaaaagaggcataaaattagaaatttcattttcaatttagaaatggttatttctttttcaacattgccatttatgcagaaaatgaattgacgcgcgcaattagagttatgactatttcatgtgactttttacgttggcaaagccatccattgaaatgccgtggcaaaaaacaacgcaaataaaattatttttcatttcgtattgattaactttaaaaaatatattatattaaaataataataataataataataatgaggtaaaagccgaatgttgctttacaacttttcatgccaactgaatgcgtcccctcgaagaagccgacatttagggccagtaaatttctgcgcagtgatgccaactgttagcttttaaaatgccatagtaaatcgccgccggtcgatgtttgtcattgctttggttctggcggcggtgctaagtgacgatatgatgtcgtatctgagatatgacatcatatcggagatacgacgggaattgaaataggcccctgggggagagaattcaattaatctttatt

SEQ ID NO: 10467 - DNA, 4941 bp, Heterodera glycines
gaagagttgtgccaatgcgcgccattcctgctgatcagcgccttcctcatcagacgccatgccgacaaacagtgcaaacattggctcgttgtcctgatcatgcggacaactgaacagccagcggagtttgtcgctgctcagccacaaaaggaagcgagataaatctacactttattaatgaaaaaataatttaataaaaaagaaaatttgattagagaaaataataactgtatttgatgcctgagacctttttttcactctctaattaatctgttcgatcacttttccaatctcaaattatattctttcactcctcaaccactcactgtctgatcatttttcattcttaaattactgtcgatcagttttcaattttcatgtactttttgaattattcgatcactttcaccatccctaattatttcccgcgactttttcactctccaattacaatcacactgatttatttatttatttttttacccgaaatgctccggacccaaatggcagtgaaagcctgccatctgtgaagcacaaaaattggcatgatatggtcgcgcatcaactcaaatttatggttcagaaaatttcactgtctgattacttttgactctccaagcactgtctttggcgcgaagtcaaaaattaaaaaaggtaaaaatttgatcaaaaattttacaaaaaaagtgaaaaacttttaccttccaatgggtttttcctgttgcggttgttgaccccagtactggccattggacggcggtggcatcaaatagtaatgtccgggaaatgattgggcggggtaggacgggaaagcactgttcatttttaatttgttgaaacaacggctaataatcaagggcatattacacaaatgctgcgccagcatattgaaagcgaaagaaataaaagggtaacgaggggaaaaggagggaaaaggagtgaagaagggacaaatcacattgttcgcgcactgtaacggcggttttgtaccgtatctggtcggcttctcaccccttccggcgcagctgttaccgcctgttccgttccggccattactgaacaacagcaagtttgcctggcccctaggggcacacttggtgacccatagagtcacatccgcgcattcaatgctggcaaatgcttcaccccttgaggacgtacatgaatagttgaaccgtcctcccgtcctacagctatggaaccccaccaggcgacccggggtaatggtgcatttggacggggagtgctgtatggccaaatgggtgccctccatttttacaataagattaactggggagtaaggaaacgcacaccaaatcctccccttacggaaccaaaattgcagttggccaaatgagttagggagtcgtgcctgtgggtcattcatcactttttctaagtcatggtgtcggcactgacacttaacgactgccgattcgtggtgtacgttgcatgaatgacacacctcatgagacagagtgcagtttagctttttggctgcaaattcagaatcacagtggaggtgggagtgccattcggggaccaatgccgcatgtgaacggttagcaataaaatcgtttcccaaaattggtaagggtggcaaaccgctgggggtaaaggtgacagacaacttagctaacggccaatggtgggtaatccctggagacatagttatttcttcggcttttgtggacccattaagctgcaaaataatcccgagtctcaattggaattgccaaacagggcacttgtacagctcataggggtagggggaaagaggcgccgcaaacaatctgtaaaataagcacgcataagaaggcgaaagacatccctggcggataaaaccggatgcttccttgcaaaaattgacccctggaaaagcatcacttaaatctggtactgattgatagggctctaaatcagaacaaaaggagcccgtacaagaccctgctgcaggacaacgcagcactccactaccgtgttttgggcatgaggggagaggaaatccacggtagggagtggcaaggggccgtccgctaagtcagagacaaaggtaaatggaccgattatttaaatggcttcaatttcacaagtcagagtgtacaaaacggtttggattgtttgcatccattcggggcgagattggacgggaaaactcctcgggaccggcgacttccgaccgattgggtgggtccgctccccctattaagttccgatggcgtatgacaacctcgccttcattgtccgaagttgaagttatttcccttataattggccctcgactccattggaccctcggttcccggttgtgtccccgtctattactccgacaaaaatttgggcatcctctccactgatagtgcacaccatgtcggcgcagccaacacaacaaacaaagacaaataaccaatgccgccccaattgagccggcaagtgtgccgaccgcaaaggcaagaaggaacggggagcaatggggattaaggactctttcccaacacaaatagcatttgatgaggctacacccctccacgggctcgcactgaatttgtgatgagattttttcccctgcaattgaataggagatgtggcactcaaaagcgcttgccaacaggtccgggggaaggggcagtagatagggtgaagggtttcccctactgctgcatatgccctcacagcacactatgctattctccgcctgtgggttcaaaaatacccaaattccctgttcgtcgcaggagagagcccgggtggcagcatccgtaccacaaaaaagggttaaaaaaaatgttcctgtgcaccggaacgagccgccggctcaattattcccctttgcaaatgctccgtgattatagcctgatatcgttcccggaattctgaattgacccgcaatttgtgagacaaagccactaggcgggaaaaaaagacaggtaccggcatcggagagggtccattagggttaaaaacaggaatttttttgattttttgaaaaaaataaaaaataaaaaaagtcgtgtagaacactttcccctggaggtttagagaccggctatcacgaatctgacatccatttatattaaaaaccgaatcccgaacccgaatttgaacaaaaagttgaaaattcaaatttttaaaattttttattattgctctaaaattgattaaaactggataaaaattaatcacaaatcaatgaaacatcaaaactggtcattctgtacagattctaacataaaattaaatttttaaaaatttaaatttcgactttttgttcgaattcaggtccgagttcggaatagtcttgaaaccattcgctagctctaaaaattctctattagcctaaaaatttcaacaaattttgtttaatttgaacaaagttatagacaaaagtacacaagcaagcaggttagttgattttgggcaaatatgaataattttttattaaaaaattttttataattctgttattgatgatttttatataagtttaagcatcgatttaacagccaatttacgttgcaaattttcactgttgaaattgtttaattgacttccaagggaaataactaacaaaagtgaagaatttggagaaaggagaattttttctttgtttttaaattaaaatttttttttattttatggcaaaatgttacatatcaaaattttttaaaaaaattattatgttacaaaaaatatgaattgataaaaatcaattctaatcaccgagggtcatatgagaagggggtctggggttcgagtccgcttggctgcggtttattttttcatgacacttgatgacaaatcatagactaaatgaaggtcatgcataatcaaagctcagatttgtcaccagtgtattttttaacaccaaattcattacttttttaaaaataatttaaaaaataaaaaaaatcaagtagttgatgaaaagtcatggacaaaaatcaatgatttttaaaatctgagtagttcagattcgtgatcagcgcattttttagcatagaaaaaatacatgaaaaatttttaacatttttttgtcgggacaccaattcttgaccattgcccacttcccgacattttgctcctcaagggttaggggagcaaccttgtaatggtcgaattgtgtagaaatatgtcaaaaccaaaattcgtctttgtttgtaaaacataacttttcttgatcatgtaaatggaatttgtagaaaacaattaaggcagtctcgtccgaaagtctcacttttaattccctttcaacaggtggaggaaattgtaaaggccgcagaaaataccaatgataattgtcgtgagtgcgacagtcaatccgccaagtgcatacacaaaggataaattcactccatatagatccgccttgactttgttttccaaagcaatttcctgagcaaagaaaagaaatttttattgttaagttttaaaaagggagcagctcattcccccccccctccccccgcatcgtttccccttgagaattttttaaaatttactatcatagaatttaaaaaaaaaatttaaaaaatttttttataataaatattagaagaaattgccaataaatttctgcgaatatgcgaggggaaatggaaatgaaatacacccgtttaaaactccctacatactcgaaagtcgaaatcggcagaagaaacagtagtaacacaacaaaacaggatgaaaaaaagagcaacttaaaaggaaaaacaaacttgttcataacttttggtacattgtaaatcattgtgcacaaactttgtcaacacgcaaagtataagttgaagcggaaaagcgatgaataggagatgaagcgggtggaaaaactgagtcgggcgcaagcgcggaaaggtgtgccaaaaacggatgcccgcgccgtaaagaaggaagcaagcggaacaatgcgcggaaatgcgagagcggacgcaccgcggacgacag

SEQ ID NO: 10468 - DNA, 809 bp, Heterodera glycines
ggaggtgggcgatggaagcggagcagaagcagcagcatttgttgtggaacctgtcactgttcgatgagtggggaggtccctcccccgccccctttttttgttgctttttctccccgccattggctaaggaatgttgcgtgcttactgctgctttgcttcatcttctgccgccggttgcttcttgcgactcattttttgtgtgtctgtaatttatgcacagacagcggcgtatatttgagggggggggggggggggggggggacggacggcgcccgaggggcggggggggggagggacgaggggccggttgcctaatgaatgaaggggggactcatgccgaacacttatgaccatttatatacgggggattctgtctgattgcttatcaaacatttgttggattaacaaatgaaaaacttacttacgagggtttttcgctctttgttaatttattttgcattggttttgatgcttttcgccctttgcccattttgttatggacaaagggatttacaaatatattactttttaaaaattattattaaataaattttccaaatttattttcctttaaatccgacaaaattttttaaatatttatctcttagaaaacaatcacatttttggcagatcagcgttaattgatattcataatgaaggggaaatcggaggccagggaggcggcctatcgttttggggaaataaataaatcaaaataaataattatttaaataatattttacattaaaatacaattgattcctcctaaaaaggtatgcacagcagggactttctcattggctgccatt

SEQ ID NO: 10469 - DNA, 4375 bp, Heterodera glycines
  unsure (1)..(4375): unsure at all n locations
atgtgttcagctctccgtcaaagaggtgatgttggagatgagtgagctgcaaagcgccgaggggacagcagaagctgaacagtcgacaacctttggcgagctgcactccctcctgcagctgccggagattgacggcacaagcggcacatcgaatggcactcgtttccgacgtcaggcgccgttgccgggccgggcgcaatgcgaaggtgggggggggatttatttaaaataagaatttaaaaattgtattttaaatgttttaggttgttgcatcccgggactgcccggcccgccgggcccaccgggccgcagcggagtgcccggccgtccgggagctcccggggctcccggatttcctggacgccctccagcgtaaaacagccatctgatggcttggaaaagctgcctgctcatttccgccccatttagcatttgcgaagaagtgacccctccgccgtgcattccgtgccctccgggccaacccggccctccggggtcgcccggcgaagtgggcagcccgggcccggttggccatcccggacgacccggcaatgatggaccaccgggtgaacaaataaaatatacccaacaaattttactccatttgcgttcaggcccccagggacccccgggcattcagggcgaacacggcgacatcggccgagagggaacgcggggggagccgggccgaccagcgatttcgacacccgccctccccggcgactcgggcccatccggggaaccggtgagtgtgccaaagaaatgatcccctcccaaccccaaattgcagggccctcccggcttccccggtgaaattggcgagcccggccgtcccggcagcgaagggctgcccggaccgcagggaccgtccggcgccccgggtcctcccggaccgccgggccgacccggcgaagacggcacgacggggcaccaggtggagccaaatgggagacaaatcgggcaaaagtgtgtttagggaccaccgggagaacggggaatatgcccaaaatattgcgcattggacggcggcgtcttcttcgaggatgggacgagacgatgagggaaaacggaggaagaaaaagtttttgaaaaagaaattgcaatttttgggcaatgacccagaatttatttgtaaaaacttgtaatatacagaataaaatttatataaaatataagccagggaatatttagaatcatattcaaaaaagttcgataattaatcgctaaatttaaaatattgttttgttatttttaaaatttcgtcattaaacaaaaacggaacaataacaaaagggaaacaaacaaattgacatcacacatcacaaaaatggtcagagggaagcgtcaaacagtatccactggttactgtaccatcgcattcatttactgtctgttctacccctcttcctcctcccgcatttcgacatcgtccagctccaaatcgtccaacatttccgcgagtgtcggcgctccgtcaatgtgctcctcctccccgccttcgctaagtgctgaatcagccgcggcggatgccattcgctgtcggtggtgccgttgttgggctgctgttcggtttgcactcgtcgccgtctgtttcaccgactgctttccgcctcccttcttgtaaatgttgatccgttcgcgcaatgccggatcctcctcaatgtcgtccatgaattccttaaataatgtaataatttttttaaataaattcctaaaattccattgttccctttaccaataaaatttttgcaaaaattccgggtctatcgttccggctaacaaaacaataagcggttggttcaaattcaaactgtgctcacattgaactccctctccacgctggcagtctcttcctggtcgagcagtctcttcagtcgccactgtctcttgcgcagtcggcgactccgatcgtacgcttttctgatcaaaacctaaacaagcgaaaaacataaatacaaatagaaatgacgaatcagcattaagtaaaactgactgaccacatccggcacattttcctctttcaccgcgtcaaatgtccgattgttcaaattcgtctgacaaacattgtaacccgaaaaaggaaaaacaataagaaaattatttcgttggaaatcaaggaacgagtagactttagagacccatttgaaaataaagccgaaaaaactaaatctaaagccagggaatattttttgcattatgcacccaaaacggtgtcgccggcattgagcagatggccaagatgagaacggcaacaaacggatttggcatcggaatgtccgacttggtcactgtagtaggtagaaatatgcattaaaaagtacaggaaaattaaaaaaattgaatcgaatgagattcaaattggggggggggcgggaggcgcacctgcgcaccacccaaacatcggccagtcggtgctttgtggacacggacccatgaccgtgtgggagaacggcgtaagggtcgtcgacctcctccacgtcgaccacaaaaaactcgacaagcgatttaggatgaaccaaaatgtcgaaagggttcttccaataggtggtactgaaattggaaacaaaaaacggtataaacgaaaaaagggataaattatatttaaaaaaccacttacgcgttgagctcgtacaattgcaatgtttgcgggttgatcagtgagacaacgtcggtgacgcgaagacagaggacgaattggccaatgtttgcgaaggattgggccaaagtgcgcggcagacaaatgagcgcgtccttcgtgatcggcacaatgtccacacagaaagtgtgcttgtaatcgtagaaattgctgcgcacgtcatgcgtaaccaattgctgtaaaattggggggagacaataaaacaaatgcaaaacccaaagccaaacagaacggtgtttgaagttactcaaaaaaccatcaaaataaaaattttgctaaaaaactcgagcatatttttaattattttgacccattcgaagccctaaaaattctctattacctgccaatttaaaaaaaatttccaagaagttcttacaattagggcaacccaattatatcaagaatcaaattttgatttatttagcaacgttaatttttgtcaaaaattcaccattttattgttttttgagtaacgtcctttttagactcagcatcaacagaacctgggactgatggaatttggaaggcaaggccgagctgatgaaatccaccaatttgcgtgcctcttgctgccgggcgaagaaaaagtcgatgccggtgggcaccggctttatgccacttgcctgggcctaaagaaagtttaaagtctaatataaaaaagtgatagcccaattctttcgttcaaattcctaacccaaaaatcctaatggaattttctgcgtaaaattgtgttaaaagagtcggttttaataagcggtcaccttttttatgaaatttatataaattgttttacttttctatgccatccctaacctaataatgttttaaaaatgcgcgacctgcgcattgtgtttgattaacaattgctccaaatagaaaagtgtctttttgtagtcgcatctctgccgcacctgcacacacgcgcgccaatagtctttggcctcgaaacggcggcagtcatcgcacatctcaaattttttttggggggggggggaaattattcatttccctaattagtgcctaatacattattcccactcgtaaaataatgtcgaaaaagcaatgcaaaacctggttgagaagcacaaattcgacgaccatcgactgctgcagcacggcacgggagaacacctccttttggatggtcagcttcactttgacacgttttgagtgcggttcggtccacacaaacgcagcgtccaccagccgcactttggccatcgccggcttcagacgggccaagcaaagagccatcaactccttggactcgggctttgccgcattccatgcgttgggaggcacgaaaaaccgttcgcagttgcggcacgattgaagctgagctaaaaaggggggggggggttggagagcattagatttttaagaaaaagtaaagagaatggacattgcttgggaatcccttcggtgatgtcagccctcgcgcgaacacagcccaagcacatgttggccgggttcggcgctatcggagtgccacagtcacagcaggcaattgtaccctcggagaaagtgccaggttgaatttccagctgctccataatgagaatatgaatttgcagttttgatgcctaaaaaatgctattttgaagatatgattttcagaaaaaattttgttcgttttcccgggcaaccgttacaaaataagcgaaaaatgcagagcgagcggcttatttttttgttcaaanttattcgttggcatagtgt

SEQ ID NO: 10470 - DNA, 4001 bp, Heterodera glycines
cgtcatgtgcaccggtgacccgtcgatggtcctcagaatcgcacgcactgtgcaagctgttctcgttgacttggacgtggtccaactgaaaccgcaaaaaagttttttggcgatttgaatttaaattctcaaaaaacaaaaacgcacgtgcaaaagtctcagctttttcagctccaagtccttcaccgccaattggtaaaagtccatcactttcggcccctgcgactttttgccgtcgtccgattcgctgtccgtttggccattcgttgccccgccgcccgtggcggtcgccgcggttggcagtcgtttggccacccaaaccatcacatggaagtcatggtaaatgatcgggattttgtccttggtcaaatggacgtcaaactcgacgaggtcggcaccgtttttgtacgccgagctcagcgagtgcagcgtattttccctcgcgaccgcacatctgatgaaatattgcgggtttttggaggttcgggacagagttggggacggatggtcgacgacttttaagggaagagagtggggagggagagaatgtaaggaaaacttggatttctcaggcaaaggttcggggacaccctacaatccggccaccctcactttgtgtacgagttgcccatgccgcggtggcccacttccaaagtgctgcgcttcttccaatgtttggcgtaacagttgtgcatggtcgggttggggtggggcagtcgaagcggacggatgaacaaataagagactgaggaagagcaaagggaatagataaagcacacatggacagatggaaaagcacgcacagtaaactttgccgacggggacacccaatttggtcaggagagggaccgaagtgcggccgaaagtgtcgtggagcgtggagggaagggcgtagcccagggccaccagcttatccgacttggccaagtacacttcgaggcggaaactctgccaattcaaaggaattttcaattaacccaatgcatcattaatgagttattagcaaaacgtgccaaaaattcgacggccaccgactgagtcctgaacatgaagtagtccactttgttgtgaaaaggctctccaaactcttcttggtcgcgaaatttgggcgcgtccaatgagagagactgaaatgtgcggagaaatgagttaggaaaattaatatttgggcaaattaagaaaaatggatgaaaaagacaccaacagaaataagggaagtgggacaaaaggaaggaagggaaaagtttaatcggaatttaccaaaaaaaacgaagggggtaattaggtaaaactaattagctaataataaaaaaagcaaatgggcacaataactgcagaaacaaattattgctagagcctcatttgattcgattaggacaaacaaataatagtaaaggctatcaattaaatagcaattagtgatcaaacaatctaatgttaagcctaattaggttaattgcctagggaccaggcccaaaaagtcctcgagccaacaatacaattggctgccaacaacaacagacagcgcccggcacaacaaaaacggacggccgttggattcgctcactgaacagtgcctggagcgagtgaatggatgagagaaaacgaagaagaaaaggacggaacggaggcaaaagtctcgattttgaagcggtaattataaaagggcacaaaaagcaaaggaagggacggaggacgaaaatggcacaatgttcctcaaagattttgctcaaagcaaaatttattttattttttgaattcaaaagcaccgaagggaatgaatttgccagaaattcttggttttttgtcaaaattgagacttgacaagcgaaaaaattggcatggaaatgacgagagaaagcagaaagagacgaatttaaagaagacaaagcgcaaatgttcacctttcttcaattgcgaagtgcaacagtgccgtttcttcatctcttctcacatccctccgatttgttgtgtttcgtacggttagtgaattgaagaaatggccaaaaggccaaaaaacgccggagggaaaatgcaaaaagagaaagagggaaagatgtggagagagacaaccaaacggaggacactcaacgattgtcagacgaaaaaggcaatggggagagagcggagcgaccggacgacaaagacaagttcgggaggaaagtgaccgagacggaggaacaaagtcagcttgagagtcccggtcgacgggactggcgagtaatttgatcttacggcaatctcagtcggagaatggctcggcaaagccggatgggtcagcggcggcaattcgtccatggcagtcacggtcggctcttcgtcatcctcggcattggaagcgtcctgaaaaatatcccccatatccaaacgaatttcccccgaggcaaaatttaggcaaaaatggtcgtaaatagaattttggcacgaaaaaagcctgctgaaaccaattttggaagttgccaaatgaccctcctcccctctctattttcgatcatttcgtcccaatttgattttgtgccctttccaatcgctcacatttctgttccttcgcaagtcaaacggcaccattttgagcctgtactcctccctgatgtgcttctgcttgtagaatttgagtgcctcgccggaaacggtcatcaaaatttggtgcatttcgtccgtcagcacccatccgtcgctaaagaattcgcgtccgccgctgaagccgaaaatgtcgcgcaaattggcacggcaaatgcccgcagtgctcgcctctaccggtggcatcacacagcgctaaaaagacggcaacaaatgattaattcgatatgttttgtcttggctgaaaattacgggcgtcgaatgcgtctcccatttggagacggccaaaacggggcctttgtcctcctccgactgcaagtaatagccgatgaagtaacggaatttgagcacgtccgcgccaaggttcacaaggccaacccaacggctgaaagacaaactttgaaaattcactaagaaaatccctcagtttgaaaatctcgacgagttcattaattaattaattaattacccattctctcttttgtccaatttcaatgctttccccgtctcccaatttccgaggtgctcatgggaacccgtgacaaaaacaaattggtcgtcatggagagcaaaaggaacggagacatcgaagctgggagagacaaaacgccaaaaagtaaataaacgcaaattcaaataataaaaactcactggacagtgaacatcagctgaattctctcaattggaaataagtgttgtttgttttctttgttggaattaataatgtttatttgggtctaaaaataataattctctgaagcgaaatagcggcgaatgtttgggttagattcaaagtttcaatgcaaatcatttttgtttgtgcaaaaatttgccataaagaaaagatggaaaaaggtttttggatagtagcggcatcccctttgaactttcgctgaaacaaatgttaagctaagacgaaacataaaaaatgtctatcgataaatgaatgaatgaattaattaattaatctacggaggaagaagagagggacatttatgaggcacatttatcaaatgaaagtgggcgtatccattagggattaaattagtgcaaataaagcaaaaaaaaagggggggggtgcactttaaatgatttgatggaatgatcaaaggtctctccatcaaaatcagtgcaaacaaagcaaaaattggaggatgagaagagaaaaactctgaatatgcaatggaagtgaaattaaagataccgtatttgctctaattatagcccatgggggattatttttcaacctcctcagaatagaggggataattagagactgcgaaattaatagagactgggggattatttttcgaactcctcagaaagggggggataattggagactgcgaaattaatagagactgggctataattagagcaaatacggtaagcggagttgaagaagagcagctcaattaaaa

SEQ ID NO: 10471 - DNA, 5944 bp, Heterodera glycines
  unsure (1)..(5944): unsure at all n locations
cagcagaaagcaccagtcagcgatgaaaatcaccgtcttgccnncctccctctctgttccgccaatctgcatttctccactgcacatccatcgcttcatctctgctcccccactgcttgaccttccgctgtcccatctgccgtctcattcgcccccactccctctccatcgcacatcattcgcatcatctccgcctgaccccaccgcttggacaatgccattgaagaacgacggacggaagacatttcacatcgtttaaactgttgcgacccttcgatccgccccctcccccaccgatggacgattttcttttccccttttcattctattaattttgcttcgctcatctcaactgacaataaaatttgctccgtcaaattgtcaaacaaggggaaaaagtcggctttttctaatcctgaataaacatcagattcggggttccctttctaaattaaatcccggaagggaatcgtcttttagaaaagggcctaaaaactgtaagcagggaattcccaacgctgggaccaagaacggtaccgtaagacacttggtatggtaaaagtgatttggatcacttgtgatttccattcaccgattgctgtttagcgcattgtcccctcacatcaagcactggtgcttgaaatccccggttaatcatttgatcggtcctttgcccgatcagtctcgctccatcgtttggcatttttgtccactgtgttatttatttccaaaataattgttttctcccccttttgttgctctccattcttcactccgctgatcgccgcttggacctttctctgctgaccaattgatcacacttggaccgttcttcgttgaccaactgatcaccacttggacctctcttcgcctctgtccgagcatcaccaggtccggtgttcaccaatcgctgtcgccaactgatcgctgcacacacaagtcgaggaccaattgacgccgttggatcaggtcaagcacagccaactggccaattagccggttatttaaccggctatccctcgcgtgtcaattagtcgattgtttaatcggctaacaatctggtctcaaactcctactcccaacggcctattcattcacagttgcgcaggcaaccgccgcttaagtccaattctaagcggtttgcgttaacgctaaaaatattagaaaatagagataattctaataaaaataaaattgaaatgaataaaaaaaaatgtgaacagaaaaaagtattgtatgattcttcaaggaaaaagaatggacagtttaaatgacttgaaatttgaaaatacgaaatgataatatttaaaatataatttaaaagcagcaaatgatttataaaatacgaaataatgaataaattacaataaaattatataaatttttctttcaaaaatttaaatcttttttagaaattctttttcttctaaaaatttttataaaaatttgacaggcttcttactaaaaccaaaatttaaattaaaataaaagatatattaaaaaatgttaatcagttcttaagctctatagaataatgagagtgcaatagaagaatttaaaaattattaaaaatttaaatacaaaataaatagtaattatttgacaagaaccgagttcgaaagtttaaacaaataaattttatacaattaagtattttaattgtaggcagtacgataccgcgatgcgatcctgagtgaatagcttatgaaaatttattaggcaaaaataaaattacaataaaggatagaataataatatgcatgatgataaatagagcaatttattaataaatattttactttgaatccaaacttatttattaaataaaatataatctttaaataaacttttctactcaattaattttattaattaatttaattaatttttatcaaaatggcattggtttatttttttaattaagaaatacacttaaataataatgcttcaatttaaacagcaaaaatttagagttataaaaataaagaaaatattttaaatagcctaaaacggaattgcatattatttacaaacaaattattaaaaaaatctttatatctggtaatctacttaataatggtttaaaatttaataaatagttagaaatataaaaaatcatgaaaattcttcattagtttttgaaatttctattcaattaattttaccaattaactcaattaatattttataaaaatggaatttttattttttttttattaaaaaacctaaagaaaatacattttaataataatgattaagtttagttcattacaagcaaaactcagttggtaaatttaattgtttaaattaaatttaattataattcataataaaaataagaaacgacctagcacccatcgcgacaagcaattttaatatattaaaaataaggacatataaataaaaattagtcagttaaaaattaaaagaaaattattaggtaaaattttataatttttcgttaataaatgtattatggaatttaatcctcaattttttatgaaaatttgaaagtaaagtttttaaaacaatatgtaaaaatgaatttttgaaaaaacctacttatttaattatttattaattagacataatattattttgaatttaaaggaaccaagcaagtttatgtgcggatattaattaaataattcagcacttaatgaattgaaaagcaaatatttattaatgaaagtcaaaatattatcttatcaaataaaactgcataatgaactcaataaaatatatttatttcagttatgtaaatgtttataatttttcaatacattaaacagcaataaatattatttaaaaattaaatagaaaaatgtacatttatttttcataaatttttaatattgaattaaaagatattctttataaatttaataaaataaataaattgatttaaataaatgcatttttaacagcactaatttctattaataaataattgtattaaagtttaaaaggattcttggcagcgtaccaaaaagtaaaacccgtgcaagaaaaaaagcaatagttaattattaatcaaagcccataacaagaaataaattagattaatcgaagccttatagaaaaacgaataaataaaaaaatattattttaaataaactaaaatcgaggctgtcaatatcattatttttcagttaatttatttaaataaataaataaacttaatatataaagaataaaactttactgataaatgttatccaaaagtagccgtgcaatttaaaatcaaaaatttgacgtaattagcggattttatttaatcaatttttttagtaattataaaagtaaaaatttttgaatttaataactacaattattcccacccacaaaataaaacaattaaatatatttctttacttttaaaacaaagccaaattgcattcaaattattttaaaaaatttcccccggcggcgcctagcggcattgccagccccaaaaaacgcacatttttttctaaaaaaacagattaaaaatgactaaaaatatatattattatattatttctggccaagaaaaatccaaaacatattctaactaattttacattttgataaatgttacaataaattgtgattaaagaataaatgaaatagagacaatttatgtaattttaacaacatttcatttacaatattaattaagttgaaaagtaaaatttacaaatagtttttactgttcacaaaaaaaaattaaataaaaaatctaggtatccgaagcaatgcttcaaagcaaaatttttttaataaaattttcagacaaatattacttggctgaataaatttaaataattcacaattaaaaatttttaattcaaaaatttgagaaaaaataataaaaattgtttaacatctaaatttttattaaagagatttatttaaaataaataagtacaaattttaatttatcagcaaaaaatacaacgataaatacacaataaaatgaaacaataatatgtactgaaataatgaattaattttttaattaatttcaaattacattagatataatttatttatttaattaaacaaactgatgacaataaatttttatattcaagcatattattcaaatagtattataatttggtatgctcttataagttaactaaaaaagattattgattacaaataataaaaaaccaataaacaaaaacagatatatcaacacatttctaattaaccaatattttcgtaaagttacttaaaagattgaagtgttaaatccaaaaagttacagttttaatcttttcttcaacatttatcttaaaaatattatttaattattatttattgtatttacgttacacagatgagaaataaacttaaaatctataattagaaaagtaaatgaatacaaataaattaaactatctttgccaaagattgcaaaattaaatacatgaaatgaattaatagatgattcataagaacatcaaaaaatgataaacaccaaaaaataaaataaaaataattttatataaaaatccaaatatgggataacctaattagctacagtcatggtcatatgtttagactcacttagtgcttttttattgaatgcatgataaaagcttaatttttggccaaacggctaacatgtttagtgttttttgtagcattttatgtgggctttccaatgatatcactacatcccaattgcttcgcataattaataattacaaaataaaagtcaacttcacccccaattttgggtggtcatatgtttagactcactctttagttcttcaataaaatcaatattttgtaggccaaaaattctgaaaaaattcctgctaagctagcttttgatgctgatcaaaaaagtctcttacagcaacttgatcagatcactccttcatagtgatcggcacaccacaaaatacagtgaaaatcggggaaattttcgaaaaaaattcctagggggttgtgaaaatttttttggaaaattttatcaagcccattagaaagaacagtgaattctctaccggtttgccttttgaatggtgactttacgacttacacccgctgagatatgggcaatccaatttcagtgtctacaaaaagtactgtatttcgtaagtaaatagtgcattttacagtaaaatgatcatgactgaaattgaagtggccataccatagcgattttaagtcgtagagattttcggttttttacatattttagaaaattttgtcccctttctaatgggcttgataaaattttccaaaaaaattttcacaaccccctaggaatttttttcgaaaatttccccgattttcactgtattttgtggtgtgccgatcactatgaaggagtgatctgatcaagttgctgtaagagacttttttgatcagcatcaaaagctagcttagcaggaattttttcagaatttttggcctacaaaatattgattttattgaagaactaaagagtgagtctaaacatatgaccacccaaaattgggggtgaagttgacttttattttgtaattattaattatgcgaagcaattgggatgtagtgatatcattggaaagcccacataaaatgctacaaaaaacactaaacatgttagccgtttggccaaaaattaagcttttatcatgcattcaataaaaaagcactaagtgagtctaaacatatgaccatgactgtatttaagcaattgctttttaatttttccccttacatggaaacatattaaactgtgagttttgcattacaggcaagtactcatgctaaaatgaccacacttaaacgaacgcagaccgtccgtaacgggacccgaaaaatatgtaattaccgtccaggtctcataattttttgacacttgcggaagaatttgtcgatggaaatttttattgcaatttcttagactattcaacacggaatgggagcccgttgaacagagcaataaaatgactaaatt

SEQ ID NO: 10472 - DNA, 892 bp, Heterodera glycines
attttaatgtaggaaattatttatttatgaaatattcaaaatggaaaattcgctaattaaattattatactaattttttaattaattaattaggatactaattttaataattgaggcaatcacaataaaatattttattaaaattaaaaaattaacaatgaagagattctctttttcattcaattatcacattaagcgcaatgttgctttgatcagcagcataaacaattgggttattgtttatcatccggatttgaaacagaccgtaagtaattagggatgccatgccagttttcaattagacttaattagggatgccacttttcaattcgacttaattggggatgccacttttcaattcgacttaattaagggtgccacttttcaattcgacctaattagggataccacttttcaattcgatctaattagggataccacttttcaattcgatctaattagggatgccacttttcaattcgacttaattagggatgccacttttcaattcgacttaattaagggtgccacttttcaattcgacctaattagggataccacttttcaattcgatctaattagggataccacttttcaattcgacttaattggggatgccacttttcaattcgacttaattaagggtgccacttttcaattcgacctaattagggataccacttttcaattcgacctaattagggataccacttttcagttcgatctaattagggataccacttttcaattcgatctaattaggggtactcattcagtttgtatccgccttttgggtcaaatttttcagaagcgtagccagacagtcagacagtgcacttatttccttctttataatgtcacctcttcccttttcccacacacaatgctgcca

SEQ ID NO: 10473 - DNA, 4186 bp, Heterodera glycines
  unsure (1)..(4186): unsure at all n locations
tagtcaaattacggatcaaaattgcggataaatccaaaaatccgcaacccgcaatccgcaattacgggggtccaaaaaccccgcaatttccgtaatccgcaatccgcaattgcgtccagccctgatacaaactgaatgagtaccctaaattagggataccacttttcaattcgacttaattagggatgccacttttcaattcgaatttattttagattagccctttgtgaaaattttttagtctaatttaaaaaaagttcatacaataaattttttacaaaaattgccaaaataaaaaatgaccttcatgtttaacgaattttataaaatgtttttatttaatatattaatttgaaggtacacaaaaatattcccagagaaaaatatgcagaaatttggaagttagtggaaaatccaattgtgattttacatgatggttttattcatttcaacagtgtgcaattggtaaaaatatttataaatttagtaaaataaaattttcaaagtaattataaaaaatttcaatcattgttaaagcaacttgacgaagaggtgaggttcacatgccaacttttgggtgctgaattggcattgccaaagaaagaggtatttttttacagaatgcagttgaatggcaggcagtactgcccttaaaaaattgcaaattttaacattttttgcccttatatctgataaaatactttaaattatccaattaaaaaattggtgaaatagtcaaaaattgggcattttattaaaaaattaattgaaaaatttgaaggatcggaagtcggaaggggttggaaattcagacatgtctaagacaaaatccagggtatttagaacggaaatttcgtcttaaaaatattgctgaatcataattataccataatctcatgcgtttatggcttattacagttgtacgatgcgattgaaaaagtactgtacgggctcattaagcaaaatgatgatgtgcagcagtcgttgagcgcctccataacactttttcacacattttgtcttaattatgaacggcgaaaagctgcgctggaaaccattgacaaatatgtgaggaatctcattgagcaaccaaatgagcaaaaattcttgaaaattcggatgagcaacaaagtgtttgaagtgagaaagcaaaaaaaaaaaaaattaaaattaatttttatttaaattttattgcattttgcgccgcaaatggaaaagagtagtagagaagtttgaaaaattgttaaaaaaccaagagggaggagaaccttttagttttccaaaatctaacccgaacgcactaggctttttctcgagtttgagttatgatggtttctttcactaaagtcaaaaatttttacaaagaattaaatctatatatttaatattatgtttataattgggaattataaatttttcgtgaaatgaaaactaattttctaaattctgagttttttgaatatccattttacccggtacccgaacccaagttctttcaaacccggtgtttcggtatcatgtcagatttttagcttgttttttttgccattttccaggaaaaagtgcggccagtaaagggggcactcgaatttttgggtgcaattggatttcgcatgcaaaaaagtgttcctactgtggtgcaacagccggacggtacctccgctaccgtaatcagcaatgaaccgtatctggtgatgacaccgccaaacgaagcgtatgtaaaagccttatgcaaacaattgggtgaagcattggtgcaattgaaaaccggcgaaccaattcagctcaaactgttccgagacgcgaaggtaaaatttttaatttatgaaaattttcaaggaaaatgcgattattgaaatcgcaaggcttttgatttttttaagtataaatttttgaaaaccctataggtttttagtttattttaacaaccttatgattagtgactcgttaacatggtggcataatcaaaattctacattcttggtacctttcgatagcgcagttttttctctattagcctgcaaaatgtaaaaatttttgttcaacttttgaaaaagttgtatgaaaataagtactatttctgccattttctgccataacttatgttaaatttgataattttatttgaagttttgcaagttaatagagaaaaagcttggctatcgaatgataccaaaaatgtaaaatttgattgcttttaagcaaagttataacatattttgtcatcgctaaaatggcaggattttacgaaacgcacaaggtggcgcgacccagcacgaattttgaattgcaaaaacttttctcctcattttgatttaaaaaactaggaatacagttttatntaattctcacccaaccgtaaccccaaaatacagctcttcaaaccggatcaaaacgttcaccaacagcagagcgttacaaaaggatactgtaggatccgtgtcaaattccctggcggttatgtggcccaggcaagttatttagctacaactaagcttcatttaatttaaaaaaacaggaaacataatctaaatctaaactggtctgctgtcctattctaaaaagacaagaaacatctttttttcgtcaatttgcaatgaaagagtccttttttccaaggatgtccttggaaatcagcattagaaaaaaatattaaaaattttacaaaaattcgttaaaaatccttaaaaaattttcaaaatgtaacataaaaattgtcatattcatattcggtgaaaatttgtaaaaaattggccaaaaatcgcaaaatttggtattttttatttacagcaatttttttttaaattttaagggcattttccgtgagacagaaaaattttcaagtgtccgtgcgtttgttgctgagcacatttcatttaaacatggcatgttcaatctgattcctgctgttcctcctcaaaaacatggcagaaaacaattgagagaggaaaacaacacgctgaaagaatatgggttagatcagtctggagtggtcaattttagctgggactcggagactcaggtgggcggcaggcatcaatcagggccggagggtctgcgtttaatgttagacatgggtctaaatttctgcaaaaatcccgggccctgaaaaaccggggcttcctgtgccttgggagtggtcaatttttgctggcacgcggagactcaggtgggcggcaggcaccaatcaggggggccatttgggtatatgaattcgagagtctgcgatctctcacccatttttaattttaaatcatttaaaagttcataaagaggacccgaattttgagacacatggcccttttctgctttttggcgttttcctgcctttttatggattttcagaagatttattcataaaaacaaagaaaaattttatgccgcaaagcttaattttttcttggtcatttttttttctttttttttgtcatgttataatttgcttccatttttttaaaaattttttgtacctcattagtcaacctgaattttcaaattccaggaaattattactcaacttccggatgatcagcaaccagtgtttatacttcaataaacttgacaaatctacacaaaacgccaattacccatgccgatcaatgaaactaaaaaatgagtagagagattttaacccaatgatccccgataaataaacaacaaaatcccttctgctggatgatggctataaagtgtttagtaattattttttgcctgatttatttatggtaaaaggttaaaatatttttggtgatttctcatcatttcattcagcaaaattttactcaaccattccctgttttttattttattatattaattaggagaatcatatttaattattacattatttaaagtgagaatttatttcaatagttaagtagcctgaaaaaaaattttttttttcttgaaaattgttttttgttttccgtttaaaatattaaaaaataatgtttaatgtttgtttttctatgtttttttgtaccatttttaatggatgataatagccactattccaagcaaaatagagaaaaaaaattgatttcgaaatagtggttatcagagaggattatccatactcctatttgttacatcaatatatacaatatgtacattatcttaaaataacgatgcaaatttaagatgatcataaatacaatagaagggggttcttatggcattttcgttc

SEQ ID NO: 10474 - DNA, 2846 bp, Heterodera glycines
  unsure (1)..(2846): unsure at all n locations
aaaattaaaaaatgtagcgggggcaaagtcctcatcaggaaatcgaaaaagactttaatcacttaagagaccagcagcatcttactttgaccattgaaatgaatattagaagttggaagatttttgctcatataaaaaagggaaatgacggaataaaaaattatacgtgaaggaattattaaaaatgaaagttcaaagttcaaagacgggaggcataataaatgaatttgaaaatataatctgtgactgaaattatatgtaaatggcatntaatctatcactctgctggccaatgaagagttgaaatttgattttgagtgctgaaaaaggcacaaaatacttttgtaaggaacatttgttaattctccaatcaatgactaatttttttcgagtaataagaataatttttttttgttccctttagcccagaatttaagtaaacaaaaacttatatagactttaagcttccatacagttaatgctagagaaatttttgttttatgcgtgtctttttcctagtcttgggaaagtcctccgatttaaaaatttttccgtttttaaattttaaatttttttagaaaattaacaccttttaacaccctttttttaaacgatgtcgcgttcaaatgattcaataaatgacgaaataacgcctgaccaacaacggcaggaaggtggcacgaatggaaatgaattaaacgcacaattaatattttttaaaaaattttcagcttcggaagaacatcgtgtgccaatgccttcaaatttgagtccgtccgaagaatggcgtcttttgagtgcccgaatggaagagttgaagcgaatgaacgcgagtgggaccgtcaagtggaagcccggcgagttgatatgtcgggacggcggggcggaaacggtgtgaattttttaaaattacgtaacagaaaattaattcactcaaaatattttacctcttaacttctttttactcaactatccaataagcatggtaagtcattcgatagctctacatgtttaggagctagccaggcccgtagccaggagaaaaggggggggggggggaagaagaggaaggaaaagcgcaagggaagcggtgaaatcaaagaaagcgttactaaccccgaggggcatttgtctgacgcaagagggagttggggggggggtaatccgaattttggaatttcttaacaattccgttaaatccaattgtagcgttcaacaccctttctcttgcggatgaggcaaggaaagtaaattttttattggttaaaatttagtgaatggcgaagctggacagaatgagcagcctgaccatggaccagacgaagctgatcagcctcagcaacagcagcagaaagtggttgagtgtggaatgcgaacaaaacgtccttttttcaaattttttccccatttttagcaccgtaacaatgacagttttgcccgtatggaagtggaattgagggagacgaaacatttgtgcacagtcaccaaattggaacttgaaaatgtaagttttttaaacaaaaaaacgattgaaaaagggcatttggcctttcccttcagaaggcacttcaaagtgagatgaagcagcagcaaatgatggatgagctgagctcagtgaagacgcaggtcgataagattggccaggaacaacaacagcaaaagaaggagcagcaggaaaagcaggaggaggacgcaaagggaaaatacggtaatatcaagggaatactacggtaatataggaattcagcactaggaaatatggtaatggaggaaggggaaatacagtaatagagggaatatcaagggaaatatggtaatggaggaagagagaatacggtaatgggccctatttaaaacgaccagaaatattctgaaaataattttaattatttaagcttccatcgaccaattcacgcagctgcaaaatgaacagaagacactttttgaaaaagtggaacaaatggtgaaagaatgggagagggaggggaagcgcaaaaggacaattaagacagggctcgggtcgggcaacttccctttccaaggatgggtataccggtttccaagtaaggggaaagttctattaaattttttgaaaattagagtgccatttttaacagattttcagcaaaaaaaggcggattttgcgattttgagataatggggatgaccattttttacttttcacaacacttcttgcgggcgctttttccgaaagactttttgggaatgaggggggggggggagaaattgttaataggtttttccaaaattgatcattttttaacgattttctgggtgtatttttgaatcaaattaaaaaaaacatcttgaattcaaggatactttcaaattttcaagtgagagggtccaatttccaggacgtccttgccattcaaggacgaacccgagccctgaattaagacaatgtcaaaaaaatgaaaaagtatttttttataattacttaaattttttataagtttaaaaaagaaaagcaaattttcttaatttccttttttgtctctgcgcagggaccgaaaaatgactacgatttggtcgattccatcatggaaagtttcactgccacattggaggaacagcaaaagaaaattgatgtgttggagaattttgttggcattgtgaaggagcgattcggaaatggtaaaaaagaataattttgaattttgttaattaattattcgatcattaacctgtctatcattgaactttaattggctattaattaattgattgattctttgtttgtctgtttgtttagagctgtcaaagtctgtccatcccgaatttccgttcggactttactgaggtggaaaaatatatatatataa

SEQ ID NO: 10475 - DNA, 4626 bp, Heterodera glycines
  unsure (1)..(4626): unsure at all n locations
ggaaatatggtaatggaggaaggggaaatacagtaatagagggaatatcaagggaaatatggtaatggaggaagagggaatacggtaatgggccctatttaaaacgaccagaaatattctgaaaataattttaattatttaagcttccatcgaccaattcacgcagctgcaaaatgaacagaagacacttttggaaaaagtggaacaaatggtgaaagaatgggagaggaagggcaaaatgccaattaagacaatgccaaaaaatgaaaaaatgttttttttataacactttgtcttagactttttgtaattttagtaaagaaaatccaattttcttatatttccttttttgtctctgcgcagggatcgaaaaatgactccgatttggtcaatttaatcatggaaaatttcactgctgcgttggaggaacagcaaaagaaaattggtgtgttggagaattttgttggcgttgtgaaggagcgattcggaaatggtaaaaaagaataattttgaattttgttaattaattattcgatcattaacctgtctatcattgaactttaattggctattaattaattgattgattctttgtttgtctgtttgtttagagctgtcaaagtctgtccatccgaatttccgttcggactttactgaggtggaaaaaaaaaatatatataatggtgaaagttaatttagaagctttcaattccacctcaaaattgttgggatgcaaatgcttgtcacaaaaatctcacaattagcggacccaacagaacgacggtcctttacaaggaaaacaccaacagcagcagcggaagaagtgaatggaaccttattttatttctccgtttttttcctttttccagccggctttctgctctctgatatgatgggagcaatcttatcatcggaccccgactgttctctgtttgcgaaaaatccgattccgcaagaaaattcgggcattttctactacgaattggagattttgaatgtcagagggtatatctcaatgggactcgccaccaaagcaatgccattgaacgaatttgtcggacgttcgaatggctgtgggtatcgaagtgatggccttttttacattgacactttctgctgggattataaaaaagcggcttgttctcgtggcgatgtcatcggacttggcattaatttggccactcgacgtctcattttcacgaaaaatggacagcgattgggtcggtagaataaagaattaatggcctttttaatttaatttattcatttgcaaatgtatttccagatccatccgatttgttcttccctccctcggctgatcgtttgttcccttgcgtttctttgggttcgccgggtgataaaattgaagcaaattttggcccgaatttcaaattcgcatttttggtgaattatttatttggaatgataaagcatttgataataaatggtgtgtgacttctccgtttttctacactcaaaatttaaaaaacgaacaaagaacgtcaattttgggaccatttgattaaaaattggttcgaaataaggcatttttttcaaaataatggcacgcactgaactgctcggctcttagtttacttttttcaaacttttgagtgtatgaaaaaacgattgagtaactaaatgataattgatttatttcaaaattgaatttagaccattccaaagactgtttcaattccaccgcaaaagaattcttgggattcctccgcttgtcacagtgacctcgaaattacgggtgccgaacaattgatggtcaattacaagaaggagggagacagtaattttgtttttattaaaaaactcatctttttatccacgttgcaactaagcccgaaaagtttattgtattccttttatgctctctctctctcgctctctctcttcttaatgtcggcaaaccaattccagctcttcctatcataattgctaacttttctatataaaatgcttttaatttttctttaagaatggcgcactgtctttgcaaaatgcgctgttccgaccaccggttctgctgtcattttttactttgaaataaaagtgataaatgagaaacagtaagtggtccaattattgtgctcacgtacaaaataaagcgaacttgctaatagattaacgaccatcggattggccaccaaacagcagacgccattagctggaagaattgcaaaacgccgtggcatttttgcatatgagagcgacggtgattgttcaacggaaggacgcaacagacgcaatcgaagaaggcaattcggtgacggagacacggtcggatgtggcatcaatttggcaaatcgccatttgttcttcaccaaaaatggacagcaaatgggtcaaaaaaaatattatttatttaaaactaattgccaattttatgtgtgtttaagatctcacttttgtggtggattcgttgccttctgatccgccgttattcccttttgtttctttgggtgattccggcgacaaaattgaggcaaactttgggccgaacttcaaattcgacctcgccacccttctctgatctgataaaggaagaagaaatttgttggaagatggcgtattttgtgttttaattgacattttacaaatattcatttttctttttttaaaatttattcgatttttattcttttttaaatttatgcacattcgaaaagataaacaatttttatttttgaatacaaccaaaacatgcatccatctttccaaatacggtcgaatgttaagcgattctgctgttggtcggttttacgtgttccatatttatgccatctcgtcggatttattagatttttaactgtttttagcggatagcattttaactatttctgccctttagtgttcaacccaattgcaaaccatgccctatcgtataaataagcatgctttaccttctgttgtttgcaaattctgtcttttcacccgagaggtttttttgaaattatatttcatagccaaaattaatcacgaaaattaccgagttaaattcattcaaatggagacaattataaaatttaagagaatgtataatcttttgatcttcaaggtttttgtgaaagtaataaaaccaataataaatcccacagaaaacaattaaaaaaacatataaaaagtaaaataaaattgtttgaatgaatattattctgtctaaaccatctctcacaaatcagccttaaaaacgaaaaacaaaatgtaaattaaggcaaaagggaaaataaaattataagcaaaaatattcataaaatatggcgatgaataataatttggcaataaaatgaaaaaaaacccacacaaaaaaaattaggcataaaaagtggaaaggtataaataaaggagcccaagaaagagagcgagaacagaagtaatgtcagggttgccagatgaaaattttaaaaagcctcatttggcaggcaaaaaggcctcatttttacaaaatttattcaaaacacgtttaaaatgttcaaatgttatatttttgattgtatgatcgatttgagtaatttttttttgttcgaaataagcattttgtgagattctaagcatgaaaaatcgaagttgatttttttgcggcgctttttccaaaaaacttggggaattgaggggccggcggtgccgataggcgccgccgggaaaatttttgtaatttttaatgtgatttgttaacagatttgtccacaaaatggccaaattttgcaattttgagtaaaattgaaaaaaaaagaaaagggatttttaggggccggcggggggaaaattgagaattttgaccatattttaaaagcagattttcatttaaaaattcataattttgtggattttcgaaaaaattgtaattttctggctaaatttaggtgagatttccgtttgatactctattaaaaaccaaaattcaaattaaataattgccaaacattatgccaatttatcaaaatttaaaagcttttgaggattttccccaaaagcctcaaaaatcctcaaaatttctcaaaaagccacaaaaatcctcaaatcctcattttccaaaaaaaaatcctcattgacctatcaaaaagccacaaaatgaggataaatcctcagatctggcaaccctggttaaaaaggttaccccagtaggagaaattttattaaaaatcccgtacaggctatcgtaaaaatgcgaactttttgcgggattaattcagcgagatcccgtcccccacaaaaagttttgagttccaatcccgcggctagatccgtaaatttgaaatttccggtctctaatttaaattttattcactaaaaagcgtacgctgatcagtcccgtcggtgtgcgttcctttttttctgctactttgcccataaaccatttcaaaaagattttcatccaacaaattcgccgccttttttcgtcgtcatcgctcggcaatgaattcagcttcaactcggccactttcacttttaacttggccaattcgttgcncaattnttccagtttctttttgtcctctccatttccctgatcagtcccaaaatgatcgttttatgatggaaatacaacgcattgatgcccaattgttttttgacactttctcccgccattgccattccgtccaccataatgggctc

SEQ ID NO: 10476 - DNA, 1640 bp, Heterodera glycines
  unsure (1)..(1640): unsure at all n locations
tccgcttctcgccaaacccctgaggccttctgtgaaagaagggaggtgtttgagaggtataatttgaatttggagcgcatcgattattgattaattttgtgacgtgtcatccctcccccttattcatttgtttatttaagcactccttccttccccacattgttccttctcccattcatttaaacattggaaagaatggaagagaatagtttttcaaaaaaatcgctaaaataaataaacaattatagacttccttatgaaatttttttgtttttgtagcaacattatctaagagagacaataaaattaagaaataatgaagttgaaaataaaagggtttttctttaaaaaataaaacggaagatttattaaaatcaaccaaaaaaaattaatttcctttctctccctctccctcctttctatctctttctcaatttcttctctatcttttcctttctctctatctctcttcctttctccctctctcatttccctctctctttctctctcgctctgtcaatctctctctctctctttctttctctctcaatttctctctctcaatttttctctcccccccccatctctctctccttcctttcttctcacatcaatctctttctttcttctttcctctatctcctcatatcacttctttctctctctctctctccctcatcacctcacactctctctctcatttcctccttttctctctttactctctctcgcttctcttctctctcctcattatctctctctccttcctttcttcttacatcaatatctttctttctttcctcttaaaataaattacccagattttgtctaaagaattaccaaattttagagatttttggctaattttttaagaaaaaataggtttttggggggcccgcggtgccgataggccgccaggcagattttgaaatttaagctcgatttctaacagatgtttacaaaaaaaaataagatttttacgataaatttttgtttttttaatatattaaattatcatgatttacttaagcaaaattggaactcagatttgtaacatattttcttgtggcacatttttccaaaaaaaaaaacttggtgaatgtgcgagcgtagaggtccggcggtgccgataggcgccgccgggaaaattttttgaaaactgatggatctgttaatagattttgtccaaaaaatgataggtttttgcaatttttagagaatttttttaataagatttacgaatttttgggccctgcgatgccgataggcagcgccaggcgaattttaaaattaaaaaaaataaattaaaaaagaaacactcaacctgaatcgaactcacgacagaaagtaatgtcaaggttgattccctaaccactacaccacactacacatcaataactaataataaaattaactttaattcataaaaaatttgtcaaaattgttaaaaaaatcaaaattgtataaattttttgccttttatccatgaatatgtcattcttaggggtgtattttcacccccgcgcccccgcgggggtgaaaggtcgtggggccgggnggatggcgggggtcagagtcacggggggcggggacggggggtgaggccaaaaaacctgtccgcccccgccggggggcggggg

SEQ ID NO: 10477 - DNA, 2956 bp, Heterodera glycines
  unsure (1)..(2956): unsure at all n locations
ccccccccccccccccccccccccaccaaaaaaaaaaaaaaaaaaaaaaaaaaaaaaaaaccccccccccccccccggggggggggggggggggggggggggggggggggtccccccccttcttttcttattataagcaggtcatacagaccagtccatcacatgtgattttggtgtcgcccatttgtgggcggtcattacccgccacttcagtctccgtcagcaaggggtgtatcctccgggtcacccaatgctgaccggctccagccccctttgatcgttatttcgccgacgccgccgatatctaaaatcctatatattaaagttgagtgtttgtatgtatgtgtccgtggtttgaattggtgtggcgttttgtttgaattttgcgttaaaaaatgctttgaaaaaaaagaaatatttggtttttgttttctgcgttgcaaaaaagcattctattaaaaatgaaaattcccacttttttgtgctgtcaaattttttatttcttatttatttatgttaaattgatttattttttgatatgaatggttatgttttgattatgtaaatgattttggagaattgtttgattagaaaactgaattagaattggtttgatatgaaaattgtttgtttcttaaaaagctattggtacttttttgattataatacatacgaaaaaaaatctgatttgatttttgatatttgtttgaatgaaaaaaatgttttgtatagtaaaaagagaatgaacaagcctttaatggattgaaagaaagcaatgtaaatctacatctcaaatttttctgttcgggtggataattatatgcagttgggatatattacgtgccgcttgctgaatgaaatttatgtggaatattttaaattaacgtttacaggtcagtttttgttttgaatttgggggtgggtgcaataacgattctcttttatatgtttttaaaaaaaaaacccctccccatctgcaaactattaacttaattactgctttttttgagcgaaaaaagaaaaagttgaaatgcttcttttttttgtttttgtgtacattcttttattctcaaagtttgtttcaaggtttaaaatatctaccgctgatttttgtaatgaatttaagacctagaattggaatttagatttgattgtgtttgtaaatgctaatgaattgtttgtgaaaaaagtcacatttaatttttttaaatatgaatttaattgtttggttatcagcagaaatttttgtttatgttatgattaattgaaaacgaattgttagtaaatgaaagttttgttgtttgatatgtatcatgttgtgctgattcaagttgcaattttttttacaaatggatgttttacgatatcgaagccaatctacaaaatgtgatgtttttgaaaattttaaaaattaacgggataacaggtcagtttgattttttctctttttattgagagataatttgaccttgcattatttttgacccactcatttttttttaattattttattaaattaaataataaatattcacatttgcttgaatatgttgtttggttcacatttatatatttgttattttgtaaatgcttttgttatgtaatgttctttcaggtttaaactttctactgcctcctttgttataatgaatttagaccgagtatttgtgaatgatagaagtaatgataatgaacagaatttgttatatgcttatgtttttgataatgattatgaagtagttgagagcagttatgatatattggaagagcataattatagtaaacggtcaagaatggatgttgttggtggcgaaagccaggtatctctgaattcagatattggtattgctggaccgtcacgtatgagtgatagtcaatttgaagaaaggagaagaactgagtatttgaaaagaaagagagaacgtgagagaatgagaagagaaaacgaatcacaaaaccagagagttttgcgtttagaacagatgcgagatagaaataatagtcaaagatcggaagagaatgcatatgagagacagttacgtctagaacagcaaagaattagacagagagtgattagacaaggtgaaattaatgtttatgcagcagggtcttatgtgaatgctcatgaacatggacttggtcttatgaatgttagatgtgaattttgtgatgcattgcattttgttggagagaaaataagtggccgaggcaattctttcaaggattgctgccattatggaaaagtttttgttcctgagattcctgagcaggatttccctgaggaattgagggatttgtttatgaaatttgacgcgaggcatgtgaatttttttgaaaatgttagacatttgaatagcagcgtttcatttgcttcaatgaatccgctgaggtatagatatccgaataaccgaggaccgtattgctttcgcatttacggtcaggtttatcacagaatgaatttggctttgaatcccgaaagtggcgatgagcctgcttacgggcagattttcatcgtagatactgaacaggcaatgcgggcaatgagacaaagcaatgtcggtgttgaccctcaattgttgagaaccgtttatgaagtgataaggaatgcgaatccatttgctgaggcttatgtgatgatgaaagaggaagaagatgatgaagttgagagagcgagaaacgagaatagagagcctgccgagatcaagcttttgtttgagaccggaaggcaattggacagacgtttggggtataatgtgccacgagcgaatgaagttgctgcggtttatgtgcctggagcagatggtgaagtaccggatgcaaagattgttatcagagaatgtggaaaagagttaaagattttgaatagcattgacccgatggtaacaccgatgacgtacccgctgttttatccgcgtggtacactcggttggcgcccgggaatgnaagcagagaaata

SEQ ID NO: 10478 - DNA, 4565 bp, Heterodera glycines
tagagcataaagtaccaagataaagttgcgtcaatctgtgatgattcctttttaaaaatatacgtccattttacatataattggtcaaaaacctaaaaattcaattgttttcgactttaggagggcaaatttttatgaaatcgcttgaaattaattgaaaaggttcattcgttttattcgaagaattggctctcccgacaaatcgatgaccccaaattgggagaaggacagacaatttaaatgggcaaaattctgaactaaaaacaataggtacagtagagtaaattaaaatggcatttatttgcggtctatgtcagttgggtccatacgtatgggccccagtatgtttttggactacaacttttttctttgtcaacaaaatccaacatttgacatcacttgaaagtttctaagctggtgattctcgattaaacgattggtaaaaaaaagttgtacatgaaaagtacgaaaaagccgaaatttttaaattttttcttaataactttttcacaagccaaagaattttgtttgatttttattaggctaatacaaattaaattgatttttttttaattttggcttaaatttataatcatttattaacaccatctttcacttcttttttctcaaattccgactcgaacctgcacaaatacagaaataaacaaatagtacagcatcataaaaaattatgcctcaaatgatgaaaaaataaatacgcagtttttgattgattgtttatttggtttaaaaatataaaaagaatatgataaattagttagacaaaaacaaaacttaagagagattaggtataaatgagacaaaattagacaaaataaggcaaaactataaattttttaaattgtgccaaaaaacggctgaaaattctttcgagaaacgaataaaagccaaaattcaacggaggggatcgaggatgaatgtagctgaatgcacagcagacaaaactgatcagatcaagccggcggaggtccccgaacataatgcaacgtcacggcattttgaattgtccgaatttggtacaaaatgatgcaacagacggcgaaagtgccgaacagaacgatcattaaaatgactgaaaagtgtgatcaaatgagagcagaaaaaaggcaggggaccgactctcaaggggagcaataaattttgcagacaaatgccatttctaggggatcatgtcttcttaaatctcgaaataacagcaaaaatagacacttttgggcctgaatttcagagaaggaaactttttgtacccatcgaacagcctttggcatgaggacataatttgacaatttttaaacattcatttccctcaccgaatgtccatgagtttgacgctctgacttcagttgtttgtgttctaaaagttattatgttttagggtaattagacattaattagaacatttagcacatttactcaaacagaatcccctcggggctcgttttcaagcacccgtcccccatttaggctttattacagagtacactaatagaatgagagtggagggatctgttggagtaaaaggtaataaaagcataaacattcctcacccaatgtgacggtatgttttggtgctcgcgtttgtcccgccagtgctgaaatttttcaaaaatatgaatgaaagtgattaattcaattcacccttcaaactcgtgcttgagacaaattcgacactttgcctccgcttctttttccataattctctcttccaactgtttgatcgtttggtcctgaaaattaatatgtcaattcgtgaattaatgacgaatcctttttgaatttattatcccctcttcaggaatgttttttatttgcttaggatattttagctgtcgtttcgaaactgagattggaccatagacaactcaaacctgagctcgggccttgagactaagactttttttatgtgaggattgtgccaaacttaccgcttccgcttgttcccgtccaaattgattgaaaatagtgacaagttcttgttccgcttccgttatgcaactgttgtaatgctcgacaagtgagttcggctgtaactcataatcggcgaaaatgttcttctgaaccgacagaatttgaactgatgaggaggagggcaaagctgacaacgaaacaccggccacggcactgtccaaaaactgtaaaacggtgagaataattcgattgcaacgagtttcgagattcttaatgcgcaactacaccttcactggcacacgttgtagttcagccaatttgcgtttaagcaaatcgttttcttcttccttctggcgaagagcggcttttgtctgattgagttcggattttgtctgattgagttcggattttgtctgactgagctcggctttctaaaaaatgcacagaaaatataagacataataaatccatattccattagggaagtgcgagaaatgcctttttaattgagaaaccgagaatacccccctagagtcgagactctcgcacatcccaccctcggcagttttttccaccgtttctttgttggtcgtttccatttctttgatcgttttgtctttctcttcaaacaatttctccctaattgcatcttcttcccaaagttcttccacgtgtgcagttattcctatgcgatcttttcttaatttggcaagttgttcatctttagtgggttccgacatttttatagtgtgcttaaaaaagacaaagagttgagagagatcgctaaaataagacacgcatagaaatgttgggaattttgaccgagggtgcccaatgagcggaaaaactttctgctttttgagaaatttaaattaaaaaatgataaacatttgttaataaagcaaagcatttccctcgcccgcatttattcgtaaaaacgaaaatgaattatgaaaaagtgaattttttggatgaaataagtccagcatttgagaacatttgatctgcgttcaaatatacatttaagaaatggtacattttcatcccattaatgagtgcgtaatgtgtgccggggatttaattgttttgccttttgatttgttttttgaattttttcgtcaggcaaaatgccggattaacggaaacacccaatttgtttgttcctaacagttcttttatttctgtgtgcaatttgagaaaaggactcaatttactacactaaaccttgtggcataacaaaaaggaaattttattttttaaggaaaattcaaaatcccaaggaaacagaggtcaaacaaatggcgtgcaaaggagcgccgcctaatgatatttttcgaaaattttggtgcattttgcttaaatgatgagatgttatcagaatagaacatatagatgtcataacaactcgtaaaaaggcgactcgtacaatggcttaagctttaggctaggcctatgcttaagcttagactttgtaaatttttaattgaatgagttgcccgcttgtatgtacgagtttccattgaccacatcatatagtaacatccagttcccatcattaatcattgtttctgtgtttttgaaaatattttgccgggaactcacattaaagcaaaggtcgctctccagccgttttattatctcatccttttccgcaagttgtttctcctgcttaattctccgttcgtaaagttggctaatttgctcctccatctcggcacactccttgatcaattgtcgtttaatgctgtcagactgatcagcagattggtggcggcggtccattggggcggcaacttttggggacaatagcaacggaaaatgaaaatgcccgatagcgagtgggacactctcgacttgggctttggggataattgatctgtttctagacaaatggtttctgattataataatttgtcctcattttgctaatcattccatgggaaacgcatagaatattctcccaatttaagagaagaatcttggtaatttatcctttacatatttcttgagaccgaacgaggcatttaagtaaaaatcgattagtcattacattaaaaatcgattgtgccggcggcctcttttgtaagcaaagaaattttgaaaatttggtcggaatttagaatagaggcgattgtacataaaacacaggagaaacgacactaatagacaagcaaatgatgggtcaatcacaagtgaaagatgaaggaagagaaatgcgtacaacgaacggaagagaagcagaaaagcatcgccagcagggcagagacgcagagtggccccgcggggcatttttggactttgaatgtgcttcgaatactttggttttaaaatttaaattaactgtaagaaaagtaaattcatttattttttatatattgttttgggtacattacctatgtatatgctaatttgtctccgatttcaaatacgaccttccaagaatagaggggaggaacaatttatttaaaacaaaataataaaatgataatatttagggcttccttttttaggcacaaaaaatcgcgaaataggcacctaaaaaggcataaaaaatcgcaaaataggcataattaggcacaaaaatcctcaaataggcactaaaataggcaaataaaattttttattaacgtttttag

SEQ ID NO: 10479 - DNA, 2208 bp, Heterodera glycines
aaaactcctccccttttcttgtgttattttggtgctcctcacgcggtaaaaaaagggaatgaaagggcagtcattttgctttttttaaatttattttttcttttctttttgtctcattaatttatgggtgagaaagcaaaggcacatgtaatttcgttgagtccgcgccatttttgcgccatccccggggcgactttcaatccaccaaccaattaatttattattatgattaattagttgattagccggattagtcaaaagaaaacattcaaaattacacatttaaataaacagaacaccatttaagtatgattttacaaaaagaataaaatggtgcccattctaaatgtttttgttgtgtcgttgtttggtgccgtcgacctttgctcccccccccccccccatgcccacggcgtcccccgcccccccccccaaccgacggacccgtcattaaattgtgaaaagcgcgggcaaaggatgcgcagagggctaaaagaatgaataccccgcggggagaagacaacataataaatattcgaacgaacagagaaagagaggggcaaatcaaatggaatcaaacgccccccccccccctcagggcaaccacaacagcgcaataaataatgggcgactcttaaataaaggcggcggttattgtgcagtcaaatccactttggcgccactttgctctttctgctgaactgctgaagagtcccacctcaccacaaatgccaatcatttgactatttgcaaaagtcaactccatccgtttgcattgtttttgttttttctcctcccctttcaaaagtttaattacttaacaaactcctttattaattagggcagagttttttcttcggttttcagactatttttaccttttaaccttctaaaatggaaataataatttttggggattctgtggcgacagttgggcaatcaaaatgaaccttggcattgcacttttggggatataattggagggaggagggcaattagcgggggggggggggggttcgattcgtccggcacaaccaattgcccaattgcgtctgtccccctgactgatgagaaggtggcacagcatcagttgctgttgccatactctcaactcgccctccctccccccctttcccttccccctctaacgctgcaatacctttgactttcgtttgattacttccgtactcaattttccttcccccaatttcgtactcaattctcccgccccaaaatggcatttttctttcctctgctttctcggcacccccacaaagtgtccaagccacgaaatgtccaaaagagtaaaaacccacgaaatgtccaaaatttttcaaaatttataaaaacaaaatgagtctaatttaggatttttcggttttcggggtcgctgaatacgaatataccctttatattaccccttgcctaaccttaagcccatctgaatacccaaaatgcgtttctttctgtttgtctgtttctctgccccaatttcgtctcacagatggccatagaatgagaaaaggacattttgtcatctgatttgccaatgcctctgatcagagaagggattaattagttggctaattggatttcgtttttggagagcaaatttatttatttttttggctttggtggccaattccgtgattcgaattttctctcatttttatttgtttattttgtttttttttgcttttcgattctcaaaagtccaacgcgtgtgcttttccttacctctgccatttctaaggatatattttttcaaaggtaactcaactgatcaatcttcgtcgttaattgttcattaattattgttttatatttatacaaattgttttccttttttggtgatcattttaatttattcttcccattttaaatcgaattcgaaaaattattatttttatttatttattttactttaatttattaaattgaattgtttcttctctcctccaaatttctcatttttgtttttcaaagggcgaaattcgtgcaaaatgtacagaggccaacatttgtcgcaaatgtttttctttttttccatttcatttcatttgtttttcttcagaaggccgagttaatgtaataagttttgtatcaaaattgttttaatttaattaattattaatttaaatgttatttttatttgtccgttaattttttctattttcgtcaaaaaaatcatctcaataattgctttaa

SEQ ID NO: 10480 - DNA, 1158 bp, Heterodera glycines
  unsure (1)..(1158): unsure at all n locations
ttcgattctcaaagtccaacgcgtgtgcttttccttacctctgccatttctaaggatatattttttcaaaggtaactcaactgatcaatcttcgtcgttaattgttcattaattattgttttatatttatacaaattgttttccttttttggtgatcattttaatttattcttcccattttaaatcgaattcgaaaaattattatttttatttatttatttttatttaatttattaaattgaattgtttcttctctcctccaaatttctcatttttgtttttcaaagggcgaaattcgtgcaaaatgtacagaggccaacatttgtcgcaaatgtttttcttttttttccatttcatttcatttgtttttcttcaggggccgtagcaaaagaaggtggttatttgacgaggtcatttaaccatggttatttgacctggtcatttgaccacgaaatacgagaaaaacggtagcaaaagaagatagtaaattttctgctggagcaaccaccagtcaccgttttttaaccatgaactaacttcttttgctataccaccaactttctaccacgaaatttttatttacatatatatatatattttgcttcttttcatggaaaacaagaagtcaataagttgttttgcaaatttgcagctgaaaggatgaatggatcaatagaaaatgatcatgaaatatatttttattttttgttggtcgctaatattgttcgcctatttttcattataaataaaccaatataattttgcatcgttttcttcgtccaaatgttaatatatccttccgagtaaaaatattcagaataaacttaataattttatataaaaattattaaagaattaatacatattcgcttaatttactaaaaatgtctttgttctccaaacaaatgtctgagcaaattgcatcttcaattaaagacaattacgcaacattcttcccaaacagcaaagaagctaaatttgcccataagtcaaatactgcctgggacgacttaacaaatgagcttaatgccaactttggttcgtcggtcactgtgaaacaagtcaaagaaaaatggcacaatatganaaaagattcgaanaggcgctttgtcgaccgaaagcggtcataaattcataatatttatttgtactaattga

SEQ ID NO: 10481 - DNA, 2469 bp, Heterodera glycines
cgaaatcatgtttcccactcccttctcccaggggtattattttttaaaaagtctttttttcaccaataaatccttaataaaaagattttaaatgcctttttcacaattttttggtgcctattaatgtgcctttttcacgatttttggtgcctttttagtcggtcactagttattatgaaaaaaaaaaattttttttttcaaattataattctttataccaacattcatattttttggatcaaacaaaaaaataatatcaccgaggcgcaaaagcctataaatatcagcatctaaaaagaggcaggcaaaatctaattcaaaattttaaggaaatttccatcactatgacacctaattttcttgtaatcgaaacgctaattgacttttctaattggtcatttcgtctctatttgcctccagcgcaatttgtcatcggtaaatttgggcaaaattcgtcgcaattgttcgtcttttcactgcactgttgatggtggtggttctgttgctgttgctgatgattttgtgcgtgcatcggaatgccataaacttgcacatatgtctgtcaaaatcaaaaatcaaatcaccaaatcgatcggacaatttagccgaattcctgaatctatttttgaattggtaatattttcagtcaaatcagtgcctaatcaataattaaaaatgagagaaactaataacattttgatcactataaactgtttgctcgtctttaaatcctcctattttctgattagaaaacgaagatttgattactagagcagctacagggatttgatcatgtaccagaacgggcaaaacgtaattaaaattcccgtctttatggaaatcccgaggttgtggtgatttactgggaatctcggcggatggcgccgatcagatcagtgactaattttaaaatgaggactatttccaggattgaatgctctttgttcgagtttggtcaatgatcactgatggattcattaaaaaaaattataagtctcgctattttcgacttcatttttctgatattcctccatgaaaatttgatcagaccaccgcttatcagcggattttaaatttgtctccgatcactgaccatcagttgcgcacggcgcatatcgagccccgcttggctaagccgtacatgtgccgaatatggtgatggccctctgatggcatgtcgcgcatccgacggcggattgatcagctcttgccacagtgctggccaattgtggggcccatttgtggccaaaaagagcgcaattgctgtcacaatcactggcacaatggacgggacgagcacaatttggggctgtacatccaacattttggctaaataagactcaaaaaatacttagtacggattagaatttcgaaattggatgaatggcacatgtcagggccgggattgtgtgggggacaactgggcgacatttcgattttttaaaaattattaaaaaattgattaaaaaaatataattaaatatttgtataaactccgttcatagttatgcgaaatgaaataatttggtatcatttcaaaaatgtctgcttttcgttttttgagtctcgaaatattccccgttatttgcgtccaccataaaatatattatatagaagaaatttttttataaatatattaacctaaaatattaatcataaaattatattaaaaaatatttttgtgagacctgaaattattaatattgattaaaattgtcgattttttttacaattttggccattttcttctgctgaaataggaatagacggctaaattttaatattattattataattttgggcaagtatgcaaatgtaaaaagtaataaatttatatttataacaaattcattatttaatatagataagtaatatggattgaaatttcgaaaattattaaaattttaatttaaaaaaaaaaaataatttcagaacaaaaaacttatttcgaatgttcaatagatttgggccagttttaccttctcccgtccaaaattataatgttttctgatttttatagagatatgtttttttattccttaccagggaattgagtgtttatgttgaattttccaaaaatgtataaaaaaggtaacaaaaatatgtgtgtttaaatcaaatttatgaataaaattaattggggaaattcacaaaaattgcaaaatttcaaaattatttgctgcttaatcgattgcaaaaaaaaggaaactaatgacggtcataacaattttttttttcattgatgcgtcataaaatttttatgcaggaaaatagtttacaaaaaatttcacgtgaatttctgctgtttttcctaagtggtcagaacacactggacaaatgggaaagctggctggaaatgccaccttctccatggagaatgccaatgccaatgccatgcaaatgtaaacacacgtaaggtaatggcaacggacaaatacgccaccttgaaaagcttccccgggaaaagat

SEQ ID NO: 10482 - DNA, 2205 bp, Heterodera glycines
  unsure (1)..(2205): unsure at all n locations
ggcaacaaatagtcggcattntcataattttntattttccttaattaatttagcaatttcaaaaaaaatgtttttctcattgcttttcacttttgtctcatttcttgctcttccatgctgtggtttggctggccattctctgcttggcaatgccgccgccagcagcagttcgccaagtgccaccatcgttcataaaactgcatttggtcggcattcatcagtgccaatgatgccaaataatggtactaccactttgccccacattttaatttttttttgattttggcatattgtccttttaggcattgtgccaatgcgaaaattgtcatcttccaaatcacttaaaatttcggcaaagcttgacggagaaaggaagaatgcatttttgacaaaaccaattaaaagcttgacggatggagtccaaccaaatgttggtggccctgttttttcgccaaatgtttttcatgaacaaaatgaagaagataaagaatatgagaagcaggtgaagttgatcaaactgtaatacaattagtttttgatcacaagatatttaaaacactgaaaaattcaaatggctagcaaatttaaagaaaaattttccaaattttcgttttgcttgtgtaataaatttttggggaatttttcccacctaattacagcggaaatttcctgtaagtcttcaaatatattaacttcagcattgctgttaatttgtaagctctctacaaattttaattcaaaatttaattaattttctcaatataatttaaaattcaaaaaattaatttgtttttatattaatccagggaatctatttgaaatcaaattttgaaattattaaatttgtaaatttataagtttatctacactattatacaactaattttttgtaaagactgataattatgtgccgttcccgctctactggcatgccgtgttggaacattttgatggaaaagtgccggccaaaattattgccaatattttgggccgtctgatcactgccttaaaactttgcaaaggcaaccatgactatgacgtgatcacttcagtaattgattttgacggcattttgacggctgaacattttttggccctcaaaaaaactgatgggccaatttttcaagagaccgaactccgtggagacatcgctttcattgtcaagaaaattgatgtgccagcaaacacacgtctggcctacatgagtccggaacaagtgatggtaagtatggcaaaaatatgaaaagttaaatgtccgaatcgatcgaaaccgggcgatcggaatgttacaaattaaaatttggacgagatcttcgatcatgtgcctctaggctacggcacaaaccgatattttcgattttgatccaacagattccgaatgatcagggacatcccgtgaaggacaagtgccacctaattagcaaaatttaaattcgatgagtgccctcattaacggttcccgcgggacacggatttccttatttttaattcttgcaaagccaaataagtaaccgtacctaaacacttggattaatgccaatgctaacatatacaattttatgcctaatgcctgtttaacagcacaattcctacaaccactccacggaggaggacattgtgtggtcattgggcgtgatactgttcaccatgctcatcaaccggcatccattgcaagggatggcaaatgagcatttcaatttggcacaacaaaatgccaacaataacaaccgaaccgttgacattggcacattcttggccaattcttcagaagacatgttgccaaaatggcgcaaaatgattacattttatgtgcgatcagaacaggaattgccgttggaatacctcaaatcgtcggtcggtgttggtaatgatcatgttctactaatcccggtgattgaggtcggtttatatgaaaggcgcgatcgatgattttcgatttggtaccgaaaaccgatcgaaagaattttaaaatcaaaaatttttgatagaaatacccaaccccaaaattcccaagaatttaaatataacattttgtggctaatcaacaaaatgccaaaattacggtttttagcgctgccttcaaatgcaaaagcagcaaaggatttcgttgtgccgtttgcgcaaaactttggaagaaattgtggagaaaattgaaaatgctaaataaaaaaagaacggataatgagattggatttggtcattttt

SEQ ID NO: 10483 - DNA, 2218 bp, Heterodera glycines
caaccgctcttttttctcaaatttattttttatatttaatataaatttttgccaattaaattttttatttgctttggttttagcttcggcttgttagcctactaacgatacccgcggcgagaacgcaccaaagctttaggtaccaaaggagcctaaggagttctctgatggttaaaggaacacattgttccgccccatcacacgccacaccctcctcatttaatgtggcgattaacttacctgaattcggctccttttaatttgtatttttaatttaaactaaataagaatttataaaatatatttttaaagtatattttaatttatgtcgatgtattttttcttaattcacagtaaaacaattgactcaatctcataaaaataatttttgtgtgtgatgtcataaataagtttattccaatgcttctttccaaactatatttttaattaaatttgttttggtttcttcagataatttaattttaatatcgttccaagatttcgctcttgataaagcaacgtatgtttggccatgtgaaaaaggatcatcattgaaatcaagaccaattttcgaaaatgtttgagactgacttttgtttatagtaaatgcaaaagcaagctttattggaaattgatgtctactcagtagaaaaggaaattttttttcttcaattaaggtaattcttggaataaaagtttgttctccaattcgatctccacttttaatgatacagtttattacatgtttgcccaaatcagtcacttgcaaccttgttccattacacaatccctcctttacatttaaattgcgtaataacattatcatcgccccttttttaagcttaatttcatgatctggtatactggaacatttcaatgaattaagaatttctggagttactgggttatttttacttaaatctgtttcatcaatacttaaatatgaatttgttcaccaggtaataaatccaaaatctcttcattatatttatccactacggtattatacggtgacaaaattgcgcacttgcttaattcatcataattatggttttttaaatggcaagacgcttcaataagcgatttggaaccaaattaagggagttttcgatcggaaacaaggtctttgcccgccacagaatttcccaaaattggcaacagggcaagatttcaaagcgaactggtgtgatttacgacgtgacattcgccgatggtaagtcagggcgataccacgccaaccagcttcgtcctcgcagcacatctgactccgacgaacagctctcggtgatgctcgaagtcttcgacatcccaagaccggttgctgttgaggagcagagggcaatcccagtggaaatgccattggaggacccgcatggcgaacaggaaaatttgggaggtcaaattgaccagggacagcaacgacggtaccctcagcgaaatcgccgtccgccgcagcgcttctcaccgtaacctgggaaccgcgcttaaggggggtggtgttcggggtattgccgccgatgatttgaatgtccgtgacataatgccaatccaatcgattccccttattttatgttgttccctcgcccataaatatgctcccattctcctctcagattgtcttcccttctttcattttgcatttatatatttgttcccccaaattattgtgacttttattttccttctccaataaataaatatttaattggacttcaacaaatccctcggaccgaacaattgggcgcagtcagctaaaaagcatacgacataaagcgcatttgttattcatttattacattctccagacgagagtaatttttggattttaacatttctggcggcggtcttcaagtgggacgaaaacaaaccgtccacattttcgaccgccgacttttcattcgcgtcaaaaaactaataaaccccaggaggggtggggttccgccagggtggggttttcaacgcttcaaaaaaaaccaatagaacctaaaaagggggaggttccgctagggcgcggttttcaatcgccgaaaaacctatgaccctaaggggggttggcggttcgaaataacgcggttttcatcgtccaatttcaacactctcaattgaaaagcgatcgataaccaccgacaagggcacaagccaatattcaacaattggtgggacgcaattagtcaactcgtcaccgcacagcagcagcaacaaaacaatcaaccgaatc

SEQ ID NO: 10484 - DNA, 3265 bp, Heterodera glycines
  unsure (1)..(3265): unsure at all n locations
taaatttgaaaccgattttaagcatattcgaaaatctcctcttaagataagcaattagaaaatttgattgaattgttgttttttatttaaaattaaaaaaattagattttaaactaattttaagcatatccgaaaatctcttttaccgtaccctccttcgtcacactttccacccttttttggcaggcgaaattcgatgccaaatgttttcaattcctcgtgcggtaagcattgatccatgaaggcaatcggaatggagaacaatgaattattgccattgatcaaacgaacgctaatttaaaaataaatttaattcatcattattattttatttaatgtcttacggttttgtttgcatttgtgccttgccaccactgagaagcaccaacagaccaataaagctcctcattaaataattgaacatttcgcttatttttctggcaaattttagcatttaataaaaataatattccgcttttagaataaatgttttgctgtgcttttgatgggcaaatgattaacataataaatttatggctgtgaaaggaatcgctcaatgggcggacgaaatgacttttggagattcatttttatttagaaaagagatgctttttcacatatttgttttttttcttcatatattttgcagaataagcatccaatgctaatgtgtggtgacgaagcagtgatagttaaagtaataaatgttagagccgtacggaggggggagggggggggggaatttaatggtctcaaatcactcaaaaattaatacaagtaaacaaaatattgaggaaaaaagaagtatcgatgctaaaatgaaataaaattgcgcccaaggcaaaaataagcaaattttctttaaaaatttttgtctttgttttaaagaatttttttataaaactgttttaatcttttatttgggggccctcttttgaccaaattttcttcaaaaaattacattaaccatacttatttctttgaagtatttgagataagctaatcacgaatttaaaaccgagaatgattgtgacagcttcggtgtgtgttggcttaagcctgttttttgcaccataggagggcttttttttaaattttaaaaaattgttaaactccgctctgattcatgccccaagctgcgcataaaaatttatctttacttgaaactttaatatggaagcctgtcaatcttattattaatcatttctgacagcagttttagataaattttaagcgcagcttgggtcgtttatttaaggatgaaatcacagcctaatttaagaataattttagtttttttttaataattaaagtgcaaaactttccgatgcccaatctttccactgtgaatccttaaatgtcgcccattgtcttgcaccaatttttttgtaaatatttttggtcccactgatttaaatttatataatttagagcacatttaattctctataacgaacctaattattaacttttaatggagcatggatatttcggcacgttgttcttaataccaatataatgcctgtttttagttaaactcatgaaatcaaattacattaaaggatttttttcttaatttaaatttgtttaaaacgattttctatatcttgcttttacatttttaatttacaaaatttttgcatacatggattataattttatataaattaataaagccttcattttttgctgacgtaagttgcttttgccacttttgcaaatgtcacatgatgttccatgcaaaattggcagttctttctttttacaaatatcattttgaaaataaaattattatttttattatttttctttaaaaatgattcaaaatgcttttattttttcttttatttgctttttcaacaaaatattttttgccaaaaatgtcaaaccggccatcaatctgatcaaatattcggctatcatttctccgccgggtttttataaaattgcaatttgggacagatttgaaaagaaaaaagcacaacaatgcaaaaatctttttgaagaagttgaacaagaagtaagaaattaaaagcatttttataaatattcaattttggctaactttgccctgaaactttgagagtgatttttcattatgccaatattctgccaattcgggaatagtaattcataaattaaatattctaatattttaaataaaaattctttcagtaatttttaaagtttcaatttcaaaaaacgattattttcaaaatattttctttttttcatgggtcaattgtccgaattttgaaattttgtgctttttctcccaatttaattgtctaaatttttacttttaatagttcaatggtaaatttcatgctgttcgtcgcttcaagtattatgatggcattgaattagaatattttgctgaatgttttgaaaactttttcattgctcagacaaatgaagacggtgaatttgatgtgaatttaatgggtaacattggagaaacaatctttttccaaatatttccactctataataataaggtaattaattagaaaatattaaatgcaattaaaatatgacattgatactaatattcaaaacctatttatagctaaacgaagtgaaatttgcatattttgttaatttctttaaattaaattttcattaattccttcttcaggctccaatccgttccgattctttcccctccacttttctccaaagcatacacagaaaacccgattggaggttatgtgtgcattttgagcaacatttttattttctaattcataaggaaaaaaagactaaaatcggcacaatgttggacaattggcagagaagtgccaatgccaacccatcggatgaagaagcctttttcctcaaggcatgtttacaggaaatagcgtcaagaattgttgacacattcaccaagggcatcaagctgaccaataatgaaatcagcatccagcgcaaatattggagtgcatttcaacagatgaaagggcatggaattttggccggaaaattggcacaaattgatggaatgccaaagttaatgaaagatttatgcagatttacggttgctgattatgaggcaaactccgccgatggattcgaatttaatgacaaattattgcctttggctttcttttgtgcggaatttataanaaatggcaatgaaaagcatgagagcatattggagagaatgaagcttgtgaagtttgaaaaaagtggagaggaaatgaacaaatgtagacattatttattttatcacttttattttttgtggaatgggattaattagttt

SEQ ID NO: 10485 - DNA, 1718 bp, Heterodera glycines
  unsure (1)..(1718): unsure at all n locations
aaaaataataaaatacagaatttcattttcaagatttcccccctggttcttcaattaaatggaaattcattttttgacgcattaaaatgatttttttctgattaaaaaactgaataaatcattattttacttaataaaataaggaaatcctgtttaattgcaaagaaataataataataattttatcttaatgacaaaataattgccaattggtaaattaatgattaaataaaattttattactttctactggagctcatttgaaaataataaacatattttcaataaaaataaaataaattcacaatgtaaagagattttagaaaaattaaagagattttatgaaatttcattatatcagaaaattggtgtaaaattccaaaaatgaaattttagcgccaaaaatgtgctgttcacgaaaataatagaaacttgaatatttgaatgctttgaacacctgtgggtttccacaacggttagccgacttttgcgccgcagacatttgcgccgcgccatttgcgccgcgacacttcccaattcttataagcgaggacggaggctgtccatgcgccgctattatgggactgattttatggattttatcagcgagcaaggagaggaagaggaaattggtcttaatttcaaacagggaattgtccgagtggggcacgtccaattgcccatgattgcagccattaatattgagtgccgaccgatcgaagtacgacttttgcaaacacacactctcccaccgctctcggattccgttgggtggggacggataaacagaaatttgagtcctgaggaaacattcatcaccgctgagagagaacacgactattttccaatacgtgtggggaagtgtctaacaagtcccggggcgacccgaattgtaccactccgcttgttaaactttggaaattgtgacataaaagtgcacgggggatcccgcttggctgtacttgaaccgctttcagctgacacgcatattaattggttgcgaaagtgtacagaaaccgaagaaagcatgctgatgaacgacgaggaatggcataaattcaaagcagaaagtgatcaaataccaccggaagccgattggacagatgaaactctggcgttcccaaaaaatggcgaggccaccaagccaattttggaaagaatctcgctgaaggaatcaattttgagtccgggaggaatgataaaattgaggcaaatcatcgaaacaaacgaatttgtatttgtgaagccgggcgaagtcggtctctttaaggggaagacaattcatcgaattgatctgactgaggtagccagaccatgtcaacaaaggccgtatcgttatcccgtggcactccaaccagaaatagagaggcaagtaaaagaattactgcgacagaatgtaatccgcccctcttcctccgcttgggcttctcctattgtgcttgtacgaaaaccggacgggtcctacagcttttgtgtcgattatcgaaaattaaatcaattgacaaagcgatcaacatattatttgccgagaatccaatcgattcttgacgaagtgacgggaaagaagtatttttcggttgctgactggctccagtggattcttccacataaaattggctaaagagacatgaggaaaggagtgcctttatctgtcacatggnngctgtttgagtggctacgctgtccatttggcctagcgggagcaccacaacttttca

SEQ ID NO: 10486 - DNA, 1978 bp, Heterodera glycines
  unsure (1)..(1978): unsure at all n locations
gccctgaaattaatatntgcgaaaaattttccatttgagattgaacgatgtctcaaacaccacgaagaaatgcaacatttcgaggacctagtttttgatgaaaatgctgattacgttaaagataaagatatttgcaaaaaatttaattgtgaaaatattattttattgagatgtgcctattgcaaaatgtatttgtgttttaaacatttttttgacgattatcacatatgtgaaaatgaataaattttaaaaggaatgaaaaaaattttccgctgtgttgggatcgattccttggccattcatttgcataaaaggcaaatataaaatgaggaaaataaaattacataagagggattcaaacctatggggcaaaaacaaaagtaaggagcacaacctccgcaccaccgaacaacacaaaacagtgtaaatgtttatttgatttattgggataaaaaaaagtttggcacgtcataactcggcactcgggctcattccgcaaaaaataaaaccacttttcttaagaacccaggggtgctctaaccacccaccaaatttcattcggaaatcccacggacacctggggaccttcctttgtcagcaaataaagaggacagcgaaaagcggatttggggcttggtgtttagggccattttggcccgcccggagctgcgacgaggggccccattttgggtgtccccgagtcccaacagtctccagagtagggctttgtcactcccaatccttgaattgactgttttcacttattttcactaagaaaaatttcaaaacttagggtatttaaaataattttttttaatacaaatacaaaaaatttgaaaaaaaaaactagaaattatcatagtttttctgataatttttctgcaaatttatccaatttttcttataatcatcctttcaatcttcaacgattcttttatccaaacagtttcttccattttgaaatgttagttctatcacttttcaacatctttgcaatttctttctcactcatttctggatattctctttttgtttgccaataaattttcattttttccattttttctttctccgttattttactgcgaatgccaaaatgtttcttccatttgtaaattgttccatggcctactccaattttcttacaaatttcggcataattttgttgccattcttttctcgtatattttcttttttgcttatattcatttatcatttcaataaaattctgtacaatttctaacttttcttcatcagtttttgatttatagtttttatgaatttgtttttgaagaccaaattctttgatccattcagcaatatattgacgatttgtccccaattttttcgctattttcgtattaattttattccattcttttgttgagtattttcttcctttttcctttattttctcttttattttatagaaattgctaattatttcccttttcttctcttcatttcgtttttcttcttcttttcttcccatttttctccaaatatttcatcaaatgattttagttccaactttttcttttctgttccgatttgattaatttgagtgatcaaaaatataaataaaacgattaataggtggagtttcattttatttaaaaattctcagaaaaaattgtatttatttaaaaataataataattttaaaattaatatgtttttttacataacaaaaatcgcaactctattgatttcatagagatcagaaaaacctttttattaaattttattctactgaacaaatattggaaaaaataaataaaataatcattacatttaaatataatttttccttctcaaataacaaattaaaaatttataatacaagtattgtaaagattagttttcattatcctttaaaatttatttatttattttcttgacaattttcattttaaaaattattttatctcaactgttgatttggcttaagtttgttgtaacctttttggataaaatt

SEQ ID NO: 10487 - DNA, 3376 bp, Heterodera glycines
  unsure (1)..(3376): unsure at all n locations
aaagaaaggaaattttcagattcggcgtttcattgtcagaattttgttnnaaagggaatagagttacgcataaagggcattgtatttgnaaaaataataaattaggtgggaccagcttcactgcttttgtttctttgcagttgtcttggctaacccaaatcattcatcatccagatgtgttcagcgttacagactatccgcagtaaattcttttcaaaaccttagaaaattcatttattctcgcttccttttcttcagtcatccggtcaacctcagctgtctcaaggttttccctgacgaacgaaatgtcagcgtttggaagtgtttggatcttgttgaggtttcccaattttaaatatttttttttgaaatacaacaaatttttgctaatttgtcagatactcttccgactcggcgaagtgcctgctctcgacacacatgtattgtttgattacattttctctcttattggttttaccacgagactttcttttgcaggtcattggtctgtttcgaagccctggtcccatgctgttgtgtcccgatttgctctttctgggcactgtacaaatcaatgttggttttatacgatgatattggtttatcaaaaatgaagttacagagttacactgtctttgggcttttgaaaacattgacaaaaacgttgggttccatagtcgaaattaattaattaccgcggataatttgggactaagtttttgtttctatatactaacagctttcgaatgttccagaaatgtaggcttttttccaacatgaaaaacttttaaaagatgtttagttttgagccggacgcataaaatatatcccaataatagagccataccccaatactccaatactagagccatttctatctttttatagatgccactgactcaattgcgcgtctatgtgctgaagtgtctcatcgccactttgttgtccgggcatgcgaacaccgtggcggttcttcaatttgcattgaattcggagaaaaacaaaatgcaaatgcatgaaatcctccggaattcgatggtcggttactactcgcaaaaccttgaggtatgtgcaaaactgcccttttttgttgccgaataacaaattcaattgaatttgtcccgttttcaaggaccagggtcgactgacgcgcattctcgaaattgcgcacgagctcaaaattcttggagaactgctcaacatgacccaatttgcgttcgtcatcgacttggccacacttgccgcccgacgggactatctgaagttggacaaattcattggggacaaactgagcgagcatggcgaacgctttgcgcaagacctgtgtcattacttacgacgtcgatgccccgtgttgaccaccataaacccgttggccaacgacactttccactccatgttctccactttgcaacagcgggcagcctcttggccagtgatcacggccgatttgaaccaactgattgcgcagatcagccgaggaaaggtcggttgcaaggctttgtagccgttttttgccaaaaaaaggaatatttttgccattttgtgatccattttttgaagaatattgcaaaattggggtccggtttatgccgttaggcgccgtcgggagagtttttgggaattttaatccaatttgttaagagaattcctttttcctgttcaggcaacgcctgcatcagcacagcaatttggaggcattggcagtgctggtagcgttggcgctggtgtcaatccgtttgtgccattaaaaggacagggggagccgcggatgttcggcgcttcgtcaagcgcagcggcatcgggcattgccaacgccttcacaatgttccgccatcagcacgccgaccagcagcagcaaatgctgcgaagcctgcgctccacgcccggcgcctcggacttccacgacttccgtctgaccgcgcaaataccgccaagtccgagcaatcaacagcaggccgagtttggaggtaattaataaacgcgcgtttcattggtcatgcccgcattattatcaaatcgctcccataaaccatatttaaagggtccggatcatatgttactgatagaaacttaagtcgattaaaaatttcccaaagttttaattccgaaataatcatttttttataaaatttttagcaaccctttcaaaatttttcatttcccttcgaaagggggagggctgggggcccatccaaatgcatatgctcatgatatttatgactttagtattccaattttgcttacagatgacttggccaccgcagtgttcagtgaagacatacaggaagaagcgaactcatattttcagcaggtttcatttgtcctcaacttaacaattactattttccattgtcgtccatagatttatgctccaaatggtcgcatgtctgtcaatgatttcatcgcaaaactcaaaggttttcggcattctggaaacatcaaagagcgcgtgagtatttattttgtccaccaacgaacaataaatctacctcccccttctgatcgaaattttttaaaaactagttttttttcatttaaaaaaactttttcaaacaaaaatttccgtctctttctaggaattgctgctgtgtgtggtgaagaacttgtttgatgagtatcgcttctttcgcgagtatccggagagggaactgcgcaccacggccgaagtttacgggggaatcattcgggaagagataattttgtatgctttttttttttacttttttgaattcatcgcttttaggcagccattatttaaccgttcattgtttaggaacatccaatttgcgactgccattcgacgtgtgattgaatcactgaatgacgagccgggcagcatgctatggacttttggcattgtggcactgagtgcgtgtcgcgcatgcctctacaaataccccaaagtgtgccatatgatcatcaacacgaacagctatggccggtttccgcccggcttgaaggactacgtcagtgccggtgcgttaggccaactgccgatgaatcactctgcggcacatgatgtcagcctgttttcgtctaaccaacaactacaaccgttctttccgcctgccaccggtgaattcagcgtcccaattgtgccgatgccgaaaatgtccatgccgggccttggcgccacagcagcgaacatgcgatttgccgcgcccactgtggggacgagcacggtcctccgaacgaaaaacatggattaatttaatatttatttagggaaattccattttgaatgtgaccaacgtggacacgctgatctcggccaccgaacgcgaaggcacccaagtgaaacagccgccacaacaagtgctcgagaaagttgcattcacctgcaacaatttgtgcacgaacaattactcgacaa

SEQ ID NO: 10488 - DNA, 2219 bp, Heterodera glycines
  unsure (1)..(2219): unsure at all n locations
tgttcgtcnagactcaagnaattgactcacntgatccgagaaaacggtgacgaattctnggaatggtttgcncagtatttggtgatgaagcgtgtcactgtggagcataataccaccaactgtacaacagcttcctggtgttgatcaacaacaccgcactggacaactacgtgaagaaggagacgtaccgcaacatcaacattctgctcaagagtgacaagcaacagtcggtgtcgaattttggcgatcgccaactgctgaaaaatttgggccattggcttggcattatcaccatcggaagagatcgaccaattttgaacaaagacttggacatgaaatatctgctctttgaggccttctacaaagggcaacaagaactgctgtacattgtgccgttcgtggtcaaatgcatcaccgccagtgccaagagtcagctgttcggtcctcactgtggttgggtgtacgccattctgaaggtgctcgccgaaatacacaacgagccggacctgaagctgaacttgcgctttgaaattgaagtgctctgcaaggagttgaacgtcgatctgcgaagcattgaagttggcagctacctgaaggagcagcgacgtttggtgagtgtgaaacaaaaaaaattttccgatgattgtgcaaaacttttttaagcccaaattggtgccgccctccaaactcggcacaaccgccgcatctccaacattggcacaatgtcagttgccgcccatccaacaaccaccacaaattggcgctgggatttcagcacaaagcacggcggattatacacccactgacatggcgaacatcctcactgaaatgagcatctccaggaaatattcgccggccagttatacgcccggcggatcgcaacaacaagttccatcaataacagcccatcaaactctgcccaccttcaactacgcggacattgctttgcaatctggtacacatttatacataaattaatttgtagcaaattttgcctgttttaaggcattttgcaaataatcgtcattcctccacatttgatgcttttccaagttcatccgcagcttaaagcgacatgcaaaattgccattaatcatgcaatcaaagatgtctatggtaatactaattcattatagttcattgaaaaatttacaaattttttgtttgtttttaggtggcgtcgccgaccgcgcaattagcgttgcaatcgccgccactgaacaaatctgtcgcaaggacttcggcctggactcggctgagcaaaatttgcgtcgtggagctcaccaaatgatgcgttcaatgactgcagctatcgcatcaattacgtgccgtgaaccgttgtcacagcaaatgaacagcattctgaaaatgtatttgaccgacgcaatgggaaatgttttgcccggaagtgaccaggccaaaatggtggaagaagcggccaccgctgtgaccgacacgaacatcaacatcgccacaaatttcgtcgtgaaaaacgcgtgcgaaaaatcggttgccgacattgagaaacggcttgagccggagtacgtggcgcgcaaaaccgcctcagacgaccgtccgttccaagttgacgccgacatggcggaaatgagtgaaaaagtgccggaaatgatcagactgaaggaggggccgatcagtgaggcgatgctgaaggtgtacgacgacttctcatcgtatgtgaaattttgattggtttacttgtccccattttttaaaattttattggaaaattttgtaggaaaatctgtggcttcaaaccgctcgcgcccgaggacagatttatcgagtttaccaagcctggtctgatgaacacaccaactgctgcttcttctcgaacgccgacaaatgtgctcgccacaccgttcatcccttccagtcaaatgtccatgaccgatgttcgtactccgaccaccactctccatggcgtcatcccttcccatcatccgccgcccattgttggtcatcccgccgcgcccattatgtccgcagaacgaatggcacttccgcccggcattttctctgaaggccgcggcgccttctgcccggcgccaggcaacgaattgggcgttcggactgaggaccaaattctgcagagcaaagtggagaacatcttgcgcgaatggatttccatctgttacactccgatggcgcaaaaagacccgcaacatgcgctcgcttatatcgtccaaatggtactttcg

SEQ ID NO: 10489 - DNA, 2706 bp, Heterodera glycines
cgatcagggttctcaattagtgatcactcactttatttcttcctttcaaacagccttttaatggttggccagatcaatgtgcccgggactgtgtacaaaaacggcaaaatttgttacaattttacgttgcttaaagtattacggtattattgtcgtaaaatatgtttaaacacagttcttggcaaagatatatttgtttttcttttcatttataaacaatatttgaaatgtttaaataaaaaaatattaattaattaattactgtaattaatattaaatattattatttttgccataaataaatttaatttcattattaatgtacgcatttgaaaatggtgtgaataaaaaatgtgaaaaatgaaatggcactttgtttttctcctacacttgttgtggcatgttcacaggtggcggcttcggatgtggcatcagcaattgcaccaaattcacataagtggtggagggcggctgatcatcttttgaataagaaaatttgttgaaacgaaaacattttcggcggtaaaaaaacgtttgaaaaaattccaggcaaaaaatggggttaaaattcaagaaaattttgcttcaataaagaactcggtaaatctcatgatactaatggcgctgcggtttagtcgagtcttgaagacaataaaatgtcaaaatgttcgcttgggccaagagaattccaggccagggaattaccgaacaaaaggggacccaaagtgcccaaatttcctcaaaacccaattctcgaaagcatcgccaattttggcacctttgccgaactgactgctctccttccaatgccgtcggctgctggacatcattgaagatgatggtattgcttggtggtgctgctgttttttgaatccggcgccgactaagccggcgccgctgcgccgggttcgaatccgaatcagaaacagtccgagcgccatcagcgcacatgcaacgccgcaggcaccgaacaccgccctggagggaaaaaagagagaattattagccctaattaccccagcaattatggtggtttaattaacgtttcattagctcaaattaggtcgcattaggcgatgagttaattaacggttcattaaccttaattacttctgatcaggggatttgtgtaattaatgtgcttttaacagataaaaatgttttcaacatttttatgcctaaaaatttcgaccccccccaaaaattgaattggcaaattctcatatttctcgggctccaaaccgagacaaatattctcaaaactaagttcgagtcttgactattcccttcgtgttttggccaaaatttggtcacgaatttttgggccaaaatttcaattctcgaattttctgggtttgggccaatcgcatctctcgctgctcaagaaccgggcctcaattcttgaggcccccgagtttctgccatagtgaattgccaaattaaattctaaattcctggaccatgcccatggcggtatgtgactgcgtgacggcaccgtcggcccatcggcataactgtgccggtgccgcgcgtgcggtgtggacacaaaggaggacggtgccgtgccaacgcccgctgaaaattctgccggtgccaacgctccaaacacttcggcgtccatgcgcagcaacatttcgttgagcacctgtgagaaaaaataaaatacagtattccctaaaataaaacccccgtgggctttatttttcaacccctctcaaaaggggaaaaaattctcaaaaaaccgaaaattttttgcgctcctggccttacaattaaaaagcccgtcctcagtatcagggaacccgtcccggtccaatctgacgattcaacacaactctcgggacccaattctcgagtcttggaaatttcgaacagccccattaagcttggtcatggattaataacaatatttgtgtgcgcactttgaagagagggcgtgcgtcgtgttggagttgcgcattagcatcaaacaaaatgtgccgaagcgcgtggccggcaaagtcggggtgaagccgactagtgatcagtgggccaagcgagaggaaaagcatctgaacacatataactttgaaatagaaggtacaagcatttgatcgactcagtcgggaaaaggggttaaaaaattattgatcggaaacgcatagtgatcggtgatcaaagaattggtcagagcgatccaaagttcggggaattggtcgggagttgaccgggataaaaaatcaaaattcaaaaaggattcgtctgaagtgatcagggtttgcgataacagtggaatggaaacaatttttcgatgatcagacaatcacaagacagattagtttgtctgccgttcaatttgaaagtgattatgggatcaatttgtcggtgatcagtcagttaatttttgcaaaattttagagtgatcagggtttaggattaaagtagaacgagatcatttgtcggtgattaggccaattaacttttccacaggacagagtttatatgctcatttttcaccggaaatgggccgttgggccgcgagtgcgcggacgactgaggcccatcggtggactgctgaaaaaattaaatttaaaatttcaatttggtttgattttcgaaacgaaaccatttgtggcggtgttttgacaatcaaaatcagaatgtcttcgccacattcgcccaaatgccatcgttcgcgcaacacttgcgcataattatccgcaaaag

SEQ ID NO: 10490 - DNA, 2365 bp, Heterodera glycines
aacaaaatgtgctcaatcgggtggcggccaaagtcgtggtgaatcggagttagcgatcagtggcccaagcggagaggaaaagcatctgaactcatataactttgaaatagaaggtacaagcattttgatcgactcagtcgggaaaaggggttaaaaaattattgatcggaaacacatagtgatcggtgatcaaagaattggtcagagcgatccaaagttcggggaattggtcgggagttgaccgggataaaaaatcaaaattcaaaaaggattcgtctgaagtgatcagggtttgcgatcacagtggaatggaagcaatttttcgatgatcagacaatcacaagacagattagtttgtctgccgttcaatttgaaagtgattatgggatcaatttgtcggtgatcagtcagttaatttttgcaaaattttagagtgatcagggtttaggattaaagtagaacgagatcatttgtcggtgattaggccaattaacttttccacaggacagagtttatatgctcttaatttttcaccggaaatgggccgttgggccgcgagtgcgcggacgactgaggcccatcggtgggctgctgaaaaataaatttaaaatttcaatttggtttgattttcgaaacgaaaccatttgtggcggtgtttggacaatcaaaatcagaatgtcttcgccacattcgcccaaatgccatcgttcgcgcaacacttgcgcataattatccgcaaaagcggtgaatgagtcgaacagattactgaattactcacttagtttattttaaaaaaaactaccgaagaaaatttagtaaaaatgccaatttttggtaaaatgccttttttagaaaatttaaatatttagagaaaggcgttttctctgaatgtaccaattaaattaaatgaaatgtcagctaatgatgaaaatggataatttaaattttaaaagaattgccatttttaaataaatgccacgccattttaattttaatgcattttccattttggcacggaatgccaattttaattttagacgaatgcctcctcaaatgaaaaaccaaatttagaagccttataagcaaacccaaaaatagcaatggcatttgcttaaaatctaaaaatgccaaatttagagaaaaaaaattaaattcaaatttaaaaaaaggcactcacttaatactcaaaaatgtcaaactcaggaaattacaattaaaatttcaaaaaaaataataatttgccaaattggtaaaaaaaaaagaagattttaccccttttcaggtggtaagaataatctgttgaatggaagctgttcattggattcattttctgcttccaaactgctgtttgttgtgccaatttcaaaattattgttggcacaatgttcggcactaaattattaatttttataaaaatttttttttttttttttgaaaatttacgaggccgaatcgggcccaggactaagctcaggcacaaaggcaaacccaaaacggaaccagcaaatgtcgggagaaagaagctgatcttttggagcagaattatctgaaaataaaaaagaaataaaaatatttgaataattaattataaattttaaaatttaaatacaaaaaaaataaaaatgatataaataaattaaataatttactcatcaccaatttccagtctttgaacattatcttcatttctacagatgcaattgtgccgattttgttcataaattcgtcgcaatgtttcgtcaatggcaaaaacttgacaataaaaaaataaataattgtttattataaaatttaataaatcaaaatattaaaggctctattttcattaaaacattttaatgaaaaattaatgaatattaaatttataatcataaaataaattttgcttcaaccaattttattttaattatacaaaaattcgtacaaaaatacgatttaattgctatttaatgcaattaaaatgattttaattctgatatattacgcaaaacaattaattaattaattatttttgttatttttaattatattttaaatcattttttattcttccattaatcaccttccgacatggacattgtggagcccgggtcgcaaaaccatccgttaagcaattggccatcctccaaatcggcgccgccgccgtttccgcgtcctaagccgcccctctgacagccgttggcatcgtccaaactaaaatatgaaaaaatgggaaattgacagccgatttatggacaatagactatatcattatagagaaattttcaaagaaacgggaaaactcttgaataccccatgattttttggaaacattggttagaaaaataacccccagaaatttaaagtttccagaaagacggcaaag

SEQ ID NO: 10491 - DNA, 1882 bp, Heterodera glycines
aagggatcgctcctccgccggagacggcaaagacaacctccgatttgaattgtttcgactgaatgatttgcaaaatgtgcgactgagggaaaagttacggtgggaagcggtggacacttttggaaagggcgcggcggaggaaaagcggcgatccgatcagccgaaggtgggggcacctctgataagtcagtaccatcattcgccatgttcctcagaatgttcgtccttcgtccgtctttcgccccgcggtgactgttcagtccgctgacattgtccgcgtccgcgccgatgccatcgtcgacccgctgaagggatcactgttcgccgcactgctccaatcgccagcggaggaaacgacggaaaaagtgttggaagcaaagtccattttggacgtattggaaatggaggacgatgaggaggaggaggagaagggaatgtcactgatcagcagggccaatgtgaggagacagctgagagggatggcacaactgctggaggaggaaagtgccaaagggaacggaacggaagagaaaaggagcgccggaaagagagccgcgagggcaaagcaacgtcagcggagggggggggaattccaaatgaattaaacatcggcattttgttttcaaattgcccttcctttaaaaatagtttgtgccaaatccagtccgttgcagaattggagcattggctgcaggcattgaaagtgccgcaaacattcgccgcccttcgggcagaagccgaacgatggcgacagacgaaaagcgccatggcgggcgccgaccagcgaattttggcacagggaggggccgctttgaaggaaaagctgcgcgagttggcgcagcgacgcggcgcgggcgacgctttggtggcgggggacgcaatcgcaacggacgcattcgaaatcagcgacaaatattatgccaaaggtaaaaaaatatttggttatttctcaaaaaaaaaatctttctcagcgattattcacaccgttccgcccaccgatttgctcactcaaagagacttcgaaaagttggccgactgttttcggcgctctttggaaatcgcttcttcccgtggcttttcctccgtcgtaacgttccgtcggcttttgacctttgattcgttgaagcaaatttaggcttttcctgagatgttagcaaaaaatgcaagcgaaagggacaaagagcgggcggcacaaattggcgtcgaagcggtggccaaatggatggccaaacatccgaagggaaaggtaaggccaaattatcacccaattgcaattaattagtcattccctaatgtcaaggtcaattccgtccttttcgtcatccagcaggacaacaaacacatgttggagcagtaccagcagttggtcgagcagaaatttgggaataaaaactgacactttccacagttgttgttttattttgagcctttttcttaaaataaattaaatggtgacttttggtcttttgcgctattttgtcgtttcgtacatatcaatttcattaatttttaaaaatcacttctctcattccctttccaatcaccaccctttgatcatttattgtcaatttcttccccctctttgtccgctttgatcactttctcacagttcccctttgatcttttctgatcactctctccccctcccttttgatcacttactttgtcctccctttccgtcggtcatttgcccttttcgctggcccatcactttgccattttacgctcttcctctgctcatttaacttgggagtcctctgattttgcctgtgcttttcccgaatgattgatgggtctcggggggggggggggggggtcgtaggatcagctgaggatcgctacctctaatggaacaatcgtcgaaatctctcgcctaatcaat

SEQ ID NO: 10492 - DNA, 826 bp, Heterodera glycines
cgcccggggcgatgtttgtactgtccattggtaaatggtttggccattttgcgcaccggagacgcgaggaaacggccgaaagggaaaaggagaggaggccgaacgaagtgggaagagagaaggaagagataaggaagaacagggaagaggaagaggaagagcagaatgagaaaggaccagctgaggaggaagagaatgaggaggagggacaaagcgaacaaaaaacaatggaagcggaaaagagacaaaaggaggatgaggaggaggaagaggaagaggtaattgctttcgattagtggaacttttgtccaattgttttgcttttcatttgccctttttcgctttttcagtccgaagaccgatcatcgacggatgagaatgactcttttgcgcttgaggacggcacttcctccaccgatcctttggactcggcggatgagctgttccttgaggcgtccgcctttgccgagttcacggtcagcgaagacggctcaatttgggaagggaccggcggatggggcgaagcggacgacgcgacagacgcggagtacgagacgagcgtggaggaaatgctgatgttacggcacgggacggtggagggaaagcgcagtccaacgccaccctcaaaaattggcacgatttgctcatcggcggaagacgaaggtaagccggaggaaagggcaggacagaatgccaaaagattaaaaaggcacacattgaatgtggactgatcagtcgatgctttgctgtgatggataagtcggccctcccaactcagtacttacgtctttatgggtcggtcctccgcccaactcagtccctcgtc

SEQ ID NO: 10493 - DNA, 3129 bp, Heterodera glycines
  unsure (1)..(3129): unsure at all n locations
aaaaggcttaagcatcgtgcacagaaaagaaaagaatncctgcaaagcaaaaggttggttttgctttccctcccctccccctcaactcataattagcattattagactcatttccgtgtttaaatttaagacggaggggtcgtattaccatcgaagtggacaatggccgccggggtgaagacgataatcggaggggcggtggaagcagtgatcgccacaataattaggacgaccaaagtggaagtgattcgtgtgaagcttgaggaggaccaatggatgggccaaaacggactaaaaggagaagaggaggaggaaaaggaaaagggagagcagaaaggagtgggaggaagggaaggggaaaaggaggaggaaaaggaagaggaagagcaattagaagagcagaaaggagtgagaggaaaggaagaggaagagcaattagaagagcagaaaggagtgagaggaaaggaagaggaagagcaattagaagtgcagaaaggagtcggaggaagggaagggaccgaaatgcataaaaatggcaaaaaagagcagcaacagcagcaaaaagagcaaatggaacccaagcagtacctggcggtgtacacagcacaaacatgcatcaaaagagcagcaggtggacggattagcaattgcttaaacaatttattcaacaaaagccaaccacaatttaagagaaaggcggaaaatggcaaaaggaacaaaatggaacagcaaaagcgggggaggaagacgaattgtcaatttacagcgacgcattggaagagcaatcggcggaagaagcagacgaaccgaagaaggaagagagaagggagatggaggagggtgggaaagagaaagaggaagagagggaaagagaggaagagaaggagagagatgaaggaaaagatatgaagaaaagggaggggaaagaactaaaagaacgaatggaagaggagaaaaagggcaaagaaagaaggccaagcaaagaaatggccgaagaacagctcgtaaacagtgagacatcggacgacgaatgcgaagaagaggaagaggaggaagaagaggaggaggaagacgatgaggaagtggaggaatacacggacgaagaggaagaattgtgctcggagatgtcccaagtggagagggaaattgagcggatgagaagggaaagtgtggcaatggtggaggaaagagaagtgaagacgaacacgccaatgaaaatggcaaatccgaggaacaattcacccgaaaaagcagcaggtgaagaagccgcgggaagggtggcggataaagagcggacgccggtggacgtgggcgtatactccgggtggaggagtacggtaatggacgggaaggatacggtggaggaggaaaacgacgcggaagacagaacggaaacgccgaaaccgcctaagaaggagcagcaacagcagcagcagaagtacgccaagacaaacgacttccaatggccgtcagaggcgcgacgaatgacggcggcggaagaaaagccgaaacaaaggggcaacgaaaaggaggagggggtcagttgagggaatcggagggggggggcaactcattagagagggagcggactcattagagagggacgggggttcatttgaagagacgtaattggaaaacagatgagcaattcgaacgggtggccaatttaatttatattttaaatatatgttatgtttttttccttcagctgttacaggaaagtgatcagagttcagcccctctctctgctgtccgaattgggactgatcagctgccgagctcctccgcttcttcggccttcgcccacgggactgatcaaaatcggaatgtccctttttctctgccgtcagtttcggttgctccttccatttgcagcgggtccaaaccaatgccgagccaaatcagcgacaaggcgatcagcagtttggaggtgggcaatggcaaagggatgctcgaaccattgattaactgataaattggtcagtccctccccctttccccccgtattttttggtgtcctaattttgcataaagttacttttgcccattctgtgctgtgtcaattaatcaatccatctgcgatggttatttttgtgactttttctgtttgtcaaaaggaaaacttttggccattcttttttttctttttcattgtaagacaattctctttttttggggggcaatgaataattttggcgttttctttcttttcttcgctatcattccatcaacgaattgaactgactctgctgctcatttgtcagtccatttgcatttttcgggctgtcttttttcttattttaatttttccgtttttttctaaactccgtttttatggattttctttatttaattcctttttttttggtttttcgttttcctcctttctggcacttttccaattcgtttgtctcccttttcttcgcccccccccaattcgttcacttttcgccctttctttttctcagttcactcactttggcatccgtccttcttctgccactcaaattctccaacagagcgatcactttcggcacgtgccctcgtggaacaacggaatggtcagcagaagcaatcgccagtctctgatcagatctgatcacccgctgatcagcaaatattgctcggaagtggcgacaacggcgaaatttggcgcggaaaaacggagttggcaacggacggagaggacagaagaagcggcaaagaagccgaggaatctgctggagatggagacgaccatcgccatgggcggctccaactttctcagggtaaggcagggaaaacacttctcgagagtgcctttccgagaatggctttcctgttgccttccttaggatccctattcgcacattgtgctgtcggatgccaacggagaccacgaggaccccggcagaatcgccggcggggggttaccaccccgcgcggattggcgaactgttcaacagacggtaacattttgctgtcaatggcacctccaatttgcatcatagcttcctctttcagttacatggtgttgcgaanattgggctggggccattctccaccgtttggatgtgttcggacgcggcgacaacgaccgaatcgnaacgatacgtggcgcttaaattgtcaatcccacgggactctctg

SEQ ID NO: 10494 - DNA, 4184 bp, Heterodera glycines
acaaaatttgattaaatttttgttttgcttttttcttacattttcttaaagtcccggtcccgctctactctatttttactaaatgaaattatttaggaaacttcattggagttacggttttttgttggccatttgttcactttgtgacatactctccgaattggccactccattggctaccggtaaaaataattaaattttatttcaattttttttattttttcaaacattttttagttctcgtttttcttcgtaaaaggattcctctgttggcttgtgtttatgcccaatttttgcctatcgctgcaggcagtaattcatacataaatctgttttggataagcattgaccgatttgtggcattggcattccctgttttgtataaattaataattaattagagtgtaattatgcccttactattattctacattaaaaatatttagtgttattcttttttttacgaacttttttttataaatattttcaattttagaaaatttaattcattttttcttctttttattcttaatcggtggatttaagaaaatctaagaatatttccgaccatgattattattagaatcagaattttactaattaaattttatactttaagagataaaatttatttaaagtgatttaaattaaagaaataattattatttaatttttaataaaaaatatattgctttagaaccttaaaataattgttttgaacatttcttcctcctttgatttaggttctggaccatatatttttctggtttctgtatttttctgtctttttatactgaaaaaacagatacaggtccatatgggaatacagtagtacaggcactctcgaaaacaccgaacatattttttattttcttatgaccagaaaattttttgaaaaatgcattcgcacgctataaaaattaataataaaaaataataaatcgactaatattatattaaaaaattaaaacttttcatctttagtttccgcaacatctcaagattatctggcaaatacgtgataattgctaatgtcttgtctttgtcaattattttttatgttgtttatttgtcgtttatatttgctctacaacatcccgaaatgtaactaattaattaattaactaattgaaaataatattttttatatttaaatagtatggtctattgtgagcctggtgatatgatgcaaggtgaagtgtatttgctcgctactcttatcgtggttatttttactttggctacaactgtaatttatattatcattggaattatgctgaagggtaaatttaattacataattaaaatacataaatttaaatgacaattttacaattcgttgtaaaaataataagttttcatttctcagtgattagaagtgatcagaacaacagcaacaattcttctcagtcccaaatcgaaatcactcgtcgcattttcaaatcgttggctgtgatcatggcagtgatcttttgcttttggtttttgtttgcactgatcgccaacattttggcacgaggactgatcaccagcgatccggcactgcaatttcttatcattcgattagtgacgcaattgcccttaatcgctcgagcgattaacgcacctgtgctttacttttgcaggtaaaaaaatgaaaaaattaattaaaaaatacaaatatatcatttaaaacttatatgtaatgatttttagaatggtaaagaattattttaagcttaacttctttttatttaaaatttattcaaattttcaaaagttcataatagcaaaaaagaaaatttattaatagagcttcgtttttgaggtacaaaaaatcgcgaaatcgacacataaaatgcctaaaaaatcgaaaaaggtagccattaattttagttttatttcatttgtaaataaaattatgaattattaaaaaaataatttcgaataaggacaaatttttaagccaaaaattttatcaagaaaaaaataatgattttgggaccattcttgagaaaattttcaatttttaaatccttgttaaataattaatattatttcattttcagttctgaatatcgtgaaataataaaaagtgaatttccatgggttaaatttttgctgtgttcaaacaatcataatcccccagtcgttgttgtatctgccgggccacaaattctcaattcttcgaacatacaacaaatgcatcataactgatgaattgtgaaaaattttaatttgtcataataaatttcataatattttgatttatatacgtataaaattaattaaattattattagatggccggatttggatttatatgtgctaaaaacccaataatgtgagaaattatgtgttaaaacgaaaaccataaagttttaaaataggccatttcattccgtcaaatattattttgcttttttgtgccaagtaaagaaaaattgaaaattttttagtcgatgaaaatttttttaaaaattaatttttcttaacaaattttaaattttttggccatatgcaaaaaatgcgataaaacttacaaaatataattatatgtgcaaaatgcataaaatatgctttttttattcggtaaaaggggattcgtaaaccggtaacagtttttcattgtggttttgcgaaaaaacaaaatttgtatatcctaaaaatggtaaagatattgatgcaacaatttcggaaataatgacaaaaatccataagaaatattgtgaagagattggaagagggcaaaatatagagaatacattaaataaaatggaaaatgaaacggaaaatttaatcaaaaatttgaaaaaagacccgaaattgcaagaaaaggttcaaaatatggttgaaatggagctgagcaagaaccgaaaactgaatgaaaaaattcaaaacgcaatggaacgcagaaaagttaattccttctacgatttgcttaacggtaaaatttaaatttttattaatttatttactctttttagccgcttttcaaacattttttggaaactgcaaaaactgttccatcatgccacaaaaagaactgtcaggaagaaggaaacgacggatggcaaaacatgaaatgggaaacacttcaaatacagcgaatgagcaaaataatttctctattgctggacaaaatttggtgactcaaccaacggatgtgcacaattcaaatgagacaggtctcgagctcgtcactcattcatctgatgacaatgaccatcaaaatggtggtacaaaccgagtttttttgaatgccgaactcccaccacaaaatcggaatttgtctccgactcgtcaaattttgccggaagatagagccacaccaactcaaactgttgaccatcatccagccaatgatcaccatgttgacataccacctgtagcacatgcaaatgttcatgaactgtccgctgagcagggacatggagccattccaattgctcaaccggcaagacaaaatcaagcggtgaatgagcaaatcagaggattacttaaccaaacttataacgcacgccaaggagatcgaatattcgtttgtaaatttagcaaatttattttttctttgataattggcctttgggtgatgttgtggatgagtatttttaaagaacagcttcagttcgatatttctctaagtggtccaatcgcttttttcatcctctatttgtttattttgctttcttttttcccttgcttgttttatcacgttgaggtacatcaaccaactcataaccaagatgtatgaagcaagaatcacgcaagcaacaacagatcagcttctcatgtttctctttaattatcttttttagtttttagatcatttcctttctattgctcacctcactataattgtaaatttatattggtaaacttatactgtcggtttatttctttgaaactattaacctttgagtaaaagaagctgtcaccttttttatgtgcaaaattgagagaaaaattatataacttaaaactgacaaattatgttcgaaagtaccgaccatcatgcttaaaactataactaaggattatgtatgggtttgacagacaaaattcaataaatttattgattaaagatccctgttgttatgcgaatttcgcgcaggattaatttggacaaagatttcagacaaaatctgattgtaaaaatctgctagtaagaaaaacaggtatatatcaaaaaaaataaataaatt

SEQ ID NO: 10495 - DNA, 1642 bp, Heterodera glycines
gtaggaaacagaaaagaataaaaattttcaaaattctacgccaaggataatgattctttcaaaaattaccgctaaataaatacaattaaattaattaattatttaaatactttatgttcacactttgcgcataatcacggctactcccggtcgcggcatctgaagaaaattccaaaaaatatatccaattattaattaaatttattaattacgcacataaaatttcatcaccacagccaactttaaagtgttcaccgcccgctttttcgatggcattggccatttcatttccaactctttgctaattgtaaaaaatattatatttttaaataagaatatttaatgcaaatattaatagtaaattttcaaataggattttttggaaactttttaaagttatttttttttcaattcaaattattgggcttcaattagaaataaattgccaaaatctttcaaattaataccaataacaaattaatttttttaatttcaaacgaacccattccgttatcaaactgtggttacagccatgcatcagcacattacttacgaatgcagcgtcaaataggcatcaatttgtggcgaatgctgatgcataaagccggctaaatttgcacattccggctccgaaagcggattatccccgtgaaaaacttcgctttaaaagtaaattataattataaatttaattttaattttaataattacaaaaaaataaataacccaaccatttaaagaacgcggaataaaatttaaaagaaacactcaaattttacaaagtaaaagcaataaaaatttatatcccttttaatttttcgaaaaaaaatatcccaacaattttaggaaattgcatttttataataacattgatttaacaaagtgccgcttcgtcactgtcggcacaggcattgttggacgaccttcttggcccagaacgcgtttttcgccaaagtcctatggaaatataatttgaaaaaataattttataattttgaaaaaattacattaaaagcatattaattactcattgtaattaaaattaaggttaagtcgtaaagctcagcctgaaccctcggagacgaatttttatagatttcactcaaatataaaaatatgatttaaattttaaatattttttacaaaataaattttcatattcaaaaaaataaattataaaaaatatactttgcaatatttgaataagtatttaaatagtagtttactttaataaaataaaaaattatttatatattaaaacaaaactgacgatcgcttgtccaagtgtgctcatagccgtcagggtttacagctggaatcacataaatatcaagttggtcgagaattgaattgtatttattgtcgcttgcaagctaaaaaacgtaattaattaattaaaataattaattaagcactaattaatagcgcaataattacactgtcaatgaatttgagtgcaactgctggtgctatccattctcgagcgtgaatgccagcatcgaccaacataattggcttcttttggccattctttgcgcttttgccaaactgaaattttgttatcattacttttttaattaaaaatttaatatttatttatgcgaaaaaattggtgttatttgatgagaatttgctaaatatt

SEQ ID NO: 10496 - DNA, 1575 bp, Heterodera glycines
  unsure (1)..(1575): unsure at all n locations
ataatttnacggctaccgtatcatattgatgatatttgtccgaatcaaaatcagaggctttttccaacttttctggacttcttgcgatcagttcactcgcggtcgattttaatttactaaattaattggtttttttaatttttcaacatttatttatttataaataattaaattacttttttaataatagtgtttccaaacttactcgccataatttgccacaattgtgtcgcgccaaatccaattcttgtccaaaaagtcgagaacctttattagtaaaattaaattattagttgttatttaattagaatttagaattctcacaatgaattacactatttatttgtgtgttttgttacattcctaattttttataaaataatttaataattaaaagtaaatataaccaaatttttgattaaaatttaaattcaatatatatattttaatagtatatcaaattaaaatttaagttccttaaagttcgtaaattttaataagggcgggaacgaaaactttcgattcatttggttatgactctttcggcactcacctttttggcactgtcagaatcggcaaaaatgtccgcatttgaatgcaacgtgtgtgcatgttgccagaattggacagtgcctttgcgactgtttgacgactccatcaaatttgcgaaatgacgcaatgccagcacttgagagtcattcgttgggattgcgcgaatcactttataactgagaacgaaaatttaggcgtaaaaaattttcgcgttttaatagagcgccgaccctcactcaacccccgccctcttcacaaattccttgaaaatttcaaaattttaagcaaaaatccctgaagaaattggcaatttcaggtgtgaactgttaacaacaaatcaagccaattccccaaattatccgaggctccgccggactcaaatccccctttatttgtatataaaaaatcaaaatcaaaaaatggcccattttttagacaaattgttaagtcaaaacctcatcaaaaacgcccaacatggtgagtttattttttgaaaaaaagattgtttctattgaatgaaaatgcaaaattatcggttgaattgttttttttaatttaattatttttggcacagaattctatttttcgcgagtgatatgtttttggaaaaattatatttatccaatttatcatcaatgcgtgaatttcattaaaacaaaaaaaatatttttgtaatctcaaaatttatatttgatctcatggttagcataattaaaaaatgattttagattttgttaattattataaaatttgaataataaatttggacattttaaaataatttttttttttgtctgtgaaaatattataaaatttctattatttttataataatgttataaacattacccatcatatgtgttatatgtgttataagcatttgctgggaatagcaagaaaaatacaaaaagaaaattaataaaaataatcatttgaaataagtaatttaaaagaatgctttcatcttcattagagtttacaaaaaattgtgcgttatgcttaatgatattgtagcttttgtaa

SEQ ID NO: 10497 - DNA, 2804 bp, Heterodera glycines
tccaaataatctgcataaaatgcaaaaacaaaaggggaaaaataaatgattgatggctttttgcttcgctgcgcggcgcgagaggatgcaaaaaaaacatatccacggattagggaaaatgcccatccgaagggattttaattagggcggcaacttcataagggagtcgaataggttttggttcaaaggactcccttcctattggcttggtcttttgcggtaaaccaggtttggggttggggcggctacttcaaagactgtactccttcataggcacgggatgggcgagcagtacccacaaccttttgacagtctgtgcaattttatatagggtatatatatttcactgataattaggtatttcttttcacatcagctctaatttaatgaattcatcatgtcattttgctcacttcttccgccaaaatttgaagggcgggcaaaatcttaaaaatttataattttaattgttaattagttcgtccttaattacttgtttggccaatttgtttatgcccttttccgggtacacaaactactcccggtcgcggcatctgaagaaaaatccaaaaaatatatccaattattaattaaattaattaattacgcacataaatttcatcaccgtgtgctcatagtcgtcagggtttacagatggaatcacataaatatcaagttggtcgagatttgaatgtaatattgtcggttgcgagctaaaaaatataattacttgattaaactaattaattaaacagaatcaaaatcataggctttttccaacttttctggacttcttgcgatcagttcgtggtgagttgaagtgtcaaaagtatcgatgtgggtgatcagaagaggcgggggtcatttcagtacggaacaaatgattttaattaattaataattattttaaatatattatttttaaatatttttaaatattatttggaggcaaaaaatccatcaatatattttacccatttcgcgcaatcccaacgaatgactctcaagtgctggcattgcgtcatttcgcaaatttgatggagtcgtcaaacagtcgcaaaggcactgtccaattctggcaacatgcacacacgttgcattcaaatgcggacatttttgccgattctgacagtgccaaaaaggtgagtgccgaaagagtcataaccaaatgaatcgaaagttttcgttcccgcccttattaaaatttacgaactttaaggaacttaaattttaatttgatatactattaaaatatatatattgaatttaaattttaatcaaaaatttggttatatttacttttaattattaaattattttataaaaaattaggaatgtaacaaaacacacaaataaatagtgtaattcattgtgagaattctaaattctaattaaataacaactaataatttaattttactaataaaggttctcgactttttggacaagaattggatttggcgcgacataattgtgacaaattatggcgagtaagtttggacagacactattaattaaactaattaatttaattattttaaataattaaaaattgttgtaaaattaaaaaaaaataattagtaaattaaaatcgaccgcgagtgaactgatcgcaagaagcccagaaaagttggaaaaagcctctgattttgattcggataaatatcatcaatatgatacggtagccgtaatttattttaaattataaaattcattttttcagattgtctcatatttacgacttttggccgaaaataattctgactttatttcatttaattccatcggaaaatcgtatgaaggccgcgaaatttcgtatttaaaggtaaaaaaagatattttaattcgttattaataattttcttgggtctgtttccaagtccggcaaaatttttaagaaaaaactgaaaatttttaaaattgaagcaaattttattaatagattttattcaaaatttctccggcttcatctatttggacaactaactcaaatcgacttagacaaaagattaaaaaatcctcaaaagtatagaatatttaacaaaactctcatcacatcacaccaattttttcgccagaaataataaataaatttttaattaaaaattttaataataacaaaatttcagtttggcaaaagcgcaaagaatggccaaaagaagccaattatgttggtcgatgctggcattcacgctcgagaatggatagcaccagcagttgcactcaaattcattgacagtgtaattatagcgatattaattagtgcttaatcaattaatttttaattaattaattactttttttagcttgcaagcgacaataaatacaattcaattctcgaccaacttgacatttatgtgattccatctgtaaaccctgacggctatgagcacacttggacaagcgatcgtcagttttcttttaatatataaataattttttattttattaaatgaaactactatttaaacacttattcaaatattgcaaagtatattttttataatttatttttttgaataggaaaatttattttgtaaaaaatatttaaaatttaaattatatttttatatttgagtgaaatctataaaaattcgtctccgagggttcaggctgagcattacgacttaaccttaattttaattacaatgagtaattaatatgcttttaatgtaattttttcaaaattataaaattattttttcaaattatatttccataggactttggcgaaaaacgcgttctgggccaagaaggtcgtccaacaatgcctgtgccgacagtgacgaagcggcactttgtta

SEQ ID NO: 10498 - DNA, 2074 bp, Heterodera glycines
  unsure (1)..(2074): unsure at all n locations
tccatttgtgccgtacccgcgtttttttggtgccattgtgttctcccccaccgccatccttttggcgcctcccgcccccattttgcaattccatttgctccatttgccagtccacccccgcccctaagtttatcaatgcccgtgaggcaaccaacggacggacattgggacaacaaaacggcacttttggacggatgggaggggcacaaagtcaattggcatgggccaacaaaattcagccgcccccttttttaattcaaatataatagtgacaaggccgagagtctcggcccaagagactctcgtcattcatttcggtataaatcagaatggcaccacccgttcaatttggcactgtttgattctcgaggataaagacatcctcattaatcgtaaaatatttaatttcaattccttaagactttttccactctcgtatctcgattccgacaaaagtcagtttcgcccaccatttaacataccctaaaataatgccatccccacccaatgacccgctcccccttcccccggcactctctcgcccgtgccgcacctatttttttgctcttttgtgccttccggcatttccccatcctccgccaattttgccatcgattttccgcggcaccgctttcttcctgaaagtaatacacataaaaatgtccagtccactctcccccccccctcttttcccccttttttcattttaatttccacatgatggaagaaaaactgcttccccccccttttttttctctgtccactttaattgtccctgaataaattgagccaaaattgaggacaaaaaccctgggggactattttaatttcgaaaatttaattattttgcggtaaagccaaaccctttttcagcattaaatgaaattgcaaatagcgtgggttttgaccatttctgaccttgtctttattggcactcgagaagatctctctctctctgcctcaccatttgcctgttttcttaatttgtctatttttttcaatgaatcagcatacgcaatccaagccgttctttgacactgtaactattgttttttgatcatcacttcgctgttgtgtcgatgttagcctctaatcactttgccgtcgtcagccttttgtctgcccattttgctgcactttttcttcttctgatcagtgactgacctcccaaactgatcatccttctgctgctgatcagtccttcctccccctccccaactcttccgccgtcgtttgtcgaggaatgcttttccgcctcacattgttcgtccttcttccatttgtcccatccatcgctgacgaatttcgacaccgaaagttcgaaaagacgggccgtgagattcgaatggccacgaaagtttacgcctggggctatcagcaccttcaggtcagaactcgggacacacagaatagctcttagccactacctttgatttcctctgaaaagtcggactgtcggaagaatgatcggctaattatgctcaattgatagtaattaccgattcaaatgccaaatcacacaggaggaaattgcatccagcagtgccatcgacgacatccggcttcgatcgatggcactgaggacgggtcggctgccgaacagttcaggcatttggaaaaggaagtcgaaaatgggcacggtgagaaaatggaaaaggaattaagaggaaatggaaaattaggaaaatttgaaaaaaagaattggcaaattgcataagataagggggattgggcaaaaagggaaaactttgtgaaaaattagtgaaaatgaaaaaatgatggacttcgggcattggaggattggcaaagcttttcagaaaaacgattccaacgcaaatgaacagtcggtggaaggacagcatcagaaagaaacaatgacagcacacgcgcgactgatcgaagatttggtgaaccggcgattttatgagccgacgggtaaatgaacaaatgcaaatggacgatcggagagaaaaaaaggacaaatgatcagaatcaaagggagtgattgtgattagggatcanccaccccatcgaagagaacggtagggcaatttgatcaaaaccaaaaaactga

SEQ ID NO: 10499 - DNA, 2649 bp, Heterodera glycines
attaaaagatcggagaaagccatcgcaatcgtttttcggggaaataacccgactgttccatttgatgtcgttttgaaattccaaaaaaaggtcaaattcgtaaggccgattaaaatcaattataactccgacggtatccgttttggtcagatctttaaacaatatttttgcatttagtggcaacactaatttggcacttttcacagaatatgagcttctcaacagaaccattgtgccatacgaagtctgctctttgacttttagcatttattttaggcattttggccaattatttttgttcatttttcaaaaaaaaaggacatttggattccggacacggtgctttacaactcgggcaatatggacaagaagaacagcgaggcggtgatgaatgccattgtcgagacgggacattggcgggtgggagaaaagggggggggggcaattagaggacaatgacaaagggataatggaaaaagggaccaattatgataataacaaagggataatgacaaaaatgtgggactaattgggacaatgacaaaagtataatgggaaaagttgcattttaatgatggggtgtttttgaagtttgagtataaaaaaaaatgctcaataaaaggacgggggacggtcaattaatttaccataattggaagagggagaagggagggggataattagtggagtaattagttaccgagggtagagagggatgacatgatacctaggacaattatatattaatggtacttaattaaaaattggttactacagaatgatggacgtggtgccgccatccagctgatgttccccgccatttacaagttgagctgcaaaatgaacgtgtaagaggccgtggggctcctaaaaataattttcaaattcgtttaaattgaattgctttaggcgtttcttcccttacgaccagcaggtggcagaagacagttaatgagggtgatcagtggtcaggctggccaaattggcgttgatcagtgatcacttcgactggcattctgatcactttaattaccccctccccctttcccatagaattgctcgtttattatttcctcttggacccacgacatggccaccattgactaccattacacacggcccaaagtgaacatgaagaattttgttgaggacgacgaatggaccgtcatttcgtttgactttcggcgcgaagaagtgagtacagacaaaagaggacagacaaatgggcacagacaaatgggcacagacaaatgagcagcagaagaggggaggggagtgaaattttcacggcactttgagttttggtcatgatctttgctctttaacttaatgtttttgttctttgtgctcccggcttggttcgatcagcaatctttgagctttaatggttctttgaattgtgtgcttaaatatcgcgcactttgagtctccaatttcgttctctgattcattcatttcgcgcactttgagttttggtcatgatctttgctctttgatttttccgtggttttgttctttgtgttatctttttgcgttctgcgctttaagaagggcacttctgcttgttttattctctgagtgccgccattggtcgcgcgcactttgcattttggtcataatctttgctctcattttggggcttttattgagtgatcctttgctctttgtgctctgatctgatctgtatgcttacatatgtgttctttaggtcttttatttcgttctttgtttttgcttttcatcattctctgatcctccttctcttgcttcttctctctgatcatttctttgatcttttgcgcctttctccagtgatttgtccattttcattttgttgttttatctccattcaatacaatgctcatttgtcaatgcttttccaattccacttgaatacatataatttccccgttttgttcattagttaaaattcaaatgctgcgcgaggccctgggccatgctttacgcccatttggtgatccgccgtaagccgttgtattacattgtcaatttggtggtgcccacttcgatcatcactgtggtggcggtgatcggctttttcacgccatcctcaagcacttcggaacgggacgagaagctgtatttgggcatcaacacggtcagtggcattgtgccatcctctgagagaaaagcccccccccaaaaaaaaagaaagtgtctttattttgccaaagttccatctgctggaaaacatcctgactttcaaggataaattgttgggaatatggcctttttccaaggacatctttgaactcaattaacggtctcgagtctcggttctctccgttcagttgctgaccatggtctctgatgcttctgatggtgaccaaccaaatgccgaacacttccaattacgtgcctttgatgggatggtcagtttgtctcctctcctccgtatttcagcagaatgaatccatccatccaaaaaaggtattacatgggcatcattttcgtcatcgttttcggcaccattcttgccaccgttgtgcttttcattcactctagaaaggcgcgccttcagccactccctcgcccattgctcaaggcaagttgagcaaaaaaaaaatgtttttaactgtattttttagagagatttaaatcagaaaaatatttaaaatgccttttttg

SEQ ID NO: 10500 - DNA, 851 bp, Heterodera glycines
ttcccttttgggtttgccattcgccgcttttcctccgtctccgttggcttttcgccattttccggcaccctttcgacaacgaattgcttcggcgcgaacgccaattggcggaacggacgcgcaaagcggcggaggaggcgagccgagcggtgggcagagaacgacgccggagggagaccatcattgaggcggccgattttttggcacaggtctaaaagagagtgatcaagcagggataatgactatctcattacagggcgtgtacggacaacgcaaggccgaactgcaccaattgcaacggaaaatgcgccagtcgcggcattcgctgttcggcagtggagccaacgcacggctggtgaagcggcaaaagctgatgaggaggtaggcgaagcgaacgatggcactacccaaactgatcaaccagagcaaaaaatcttgaacttgacatgccctaaattgctcaaagtggggggattagttcaagtttgatcattctcttggcatagtccgatcaatgattaatcaatgaatatggactgatcagtccgttgtttccgtccctgtctgatcagttctcccctccccctctccgctccctgtctgatcagttctcccctcccctctccgcttcctgtctgatcagttctcccctccccctctccgctccctgtctgatcagttctcccctccccctcttcgctccctgtctgatcagttctcccctccccctctccgcttcatgtctgatcagttctcccctccccctctccgctccctgtctgatcagttctcccctcccctctccgcttcctgtctgatcagttctcccctcccctctccgcttcatgtct

SEQ ID NO: 10501 - DNA, 1925 bp, Heterodera glycines
aaaatttcgaatttaccttttttggttcaaaattgatttaaatatacggaaaaaattgaaagccaccaatcctgcaataagaaatcatttaagccctttttgaagcaaaaatctcaaattcgaaaatttggactttcgacttttttgttcgaattcgagtccggggttctgaattaaccgaaatagatgtcggattcattatgtgcgacctcaaaacccaaggaacttgtttttatggcattaatttttatcactgccgcattttccactgacgcatttttccgggagtctattttttgtacacgataccgtattccctcttttagatccccagggtggctctatttttcaatctcgtccaaacggggaacttttggacggggccactaatgctaaaaaatacaataaaacgataaattcacccctaagagtcgatctaaaattttttcaaaaataccccgatgaaatgaattttctaaaaattagtcttcaaaatttatttataattcgtcttcaaaaaatttttttcattacaaaattttcaattttcaaaattatgtttatatcaatattggtttggcataatttaaaaacttttttgaataactttgtcatttacaatcctaaatttgaaacgttttggcactattttccatttttagcacctaaaaatcgtagccctagagtaatgatcatttttaataaggaaaaacaaatttggcatataaatgccatcaaagtaaacaatcaaaaaaccattttaaatattgttccaacatccacttttttttgcttcattttgcagcaaataaatgttggcaaattcaattaattcattctttctaatttgaatgtgcagccgaaacgaccggccaattaatgtaaatttttatcaaaaatattttttatttaaattttgaaattatttatttaaaaacctcatgcaatttttcacgaaatgtgtggcacaaatttattactgttaaatatggttaagcatatattaaggattgatctactaatagcccggtttctattaacgctcgttaagaagtttttaaattagttgaaaaacggggtacattctttttattaccaacggaatttgaaataaaaaaaattagataaattctgatcggcaatttttcataaaaatatcagacacaaatttgtcaatattaaaataaataaggatcagttgataatgatttctaggctcgaattttttatgatcgaaaaccgagaattgatcccgagggtcggatgccggaaaatccgagaaatttgtcgacccgaattccgggaaaaagtaccaaaacagagtttggcaaaagatgaagaaaaatgtatgactttgactaattgttaattaataattcattaattaatgaagtgagctcaatttttgaccaaaacaataaaacacagttgatcacattggaaaaaagaagacatagaaaagtgaaatagacaacggaaaagaaagagacaaatagaaatagtgcatacatttcattgtttctcttccctccatttgaacccatacaaaaattgccccgatttttcttttcttttttataaattctcacgtttttgcaaaggtcgagagcccagtgaatcggtccggtgcgattcgtgcggagaacgaagtgcgaccgttcgcagacggaccggcattttaaatggttcctacagagcatcatcatcatcatcatcatcggcactgtgccaggaggcataatttccccgctaattagtgtggtaattgcggagggacgtgggcacttaaaatatacgcgtcgagtagttgatctccaatggcatggccttccattggaggatggagcacagcactgaattgtccgatccctctgtgaacaaaaaaaggtcgtttcctttggtcgatgaagcggctgggctcccaa

SEQ ID NO: 10502 - DNA, 2091 bp, Heterodera glycines
  unsure (1)..(2091): unsure at all n locations
taggtccaaataaataaaaatgagcatggcgcccattggccagaaatgttccagttttgcgcaagactggtgccaaaatgggcggttccataaaaattatacgaccgcgccagaattagtcagccgatttccaatcaacaatagtttattttaattgataaatatttttctataaataattttaatttcttaattatgcatatttttaaatgtattttacacaacgcgccataattaataagccgatttcctaccaaaaatgtgtcctaattgttaaatgtttttttaattttaattatttcgcaattatgcataataaaaatgaatttgtcaatttgttgattcattcattgttcgcagtatttaatgatcattaatacgtaaaacaaatttggcttataataaaaaggacaaaaaagtgcgccaaagcaattaatcaaaaaacaactgcataattattcatgcacttccccgttataacaatcaatttagcatcccgcacattaattcgcctaattacttcattaattagcaaaatgtgtcaccttatttgataccttgaggcagcaaattaaaaaaaatttttggcaaaaaaattaaatgacaaatttgcgcaaaaaattaaacgttggccttttggaccggtcccttcttgagtttaattatgatggtgaacattttgggtgggttgagccatttgtgctggaaaaataaaaaatacaatttactaatgtacagcggagcaattttttcgtctttcaaagtggcaaacaatttaattttaaaaatcataaaaattcaagtttaataaagcaatttgaattaaaaaaatttgccggataattccattatattaggcccagctttttctaattgattatgtttttcccattgacttcacaaagttatggccaagtgattacgcacgcatgcaaaatctgcgattttttgaaatttcttgaatcaattaaagttccgagattcagtaaaaataaataaaccaattatggcaaatattgtaagggctttttgttggttatctcatggcatattcggatatttttgttttttctgtgagtgatcataaattgttaatctggcaaagtttgattaaaattgctttattacttaaattgttatgcttttttaaataaaaccacatattaatttgaaaattgaaaaacatatcttttagaaacaaatttgttttttcttgttttcatttacaaattaatttaaaaaataattaattctcaaaaaaacaataaaattattctgttgtttagcatgatttttaaaattgtttttctgcttttcgcttcggtttttcttgggccgacgatggcacatacacccactgaaacggcggacgcatcgctaaacacgacatcattaacaggcattatttaatttaaaaatagttgttttaatttaaaaaaaaacatttcttttcccaaggcacaaatggtacggcatcggaaaagctgatcaacggtgtggtgcaaagcttctatgcgccaaacccgaactcgacggtgccgccgcatgtgttgcgccgtgccatgcggtaagacacgacgaaatatggacgaaatatggcgttttgcatagggcccggaaattttaaatttgcgaattctgctgtgattggaactcaaaatttttgtgaaagggaatcccgcgcattaatcccgcatatcccaaggaattaatctcgctattttcaaaaaatgcgggattgcggactgggatcccgcaatacatatttcccgtgccgggctctaatctgcatgaatgtttttttttgtttgaaatttgttctttttcctaaaatagttgaagcagattgaaaaagagataatcgcaaaaatgttgcattttgcattaaatttcataaaaaaattttgaatttttccatattaataaagcacccacagagctaccggattaatacccaaaataatgtatattcatcattactaattaatttaggtattgcaccaaaaatccagaagatgcccgatgcaggtaaaaaaaatttaaattntaaaataatataaaatgataaattttttagggcacatcccgaat

SEQ ID NO: 10503 - DNA, 1469 bp, Heterodera glycines
  unsure (1)..(1469): unsure at all n locations
ttcgaagttgtatgcactgaaaaatgccaaatatgcgcatataatatgcactaaaaacccccaaaatatgcctaaaaactcgaaaaatgatgccgaaaaatgcactaaaatatgctttaaaattgccaaaattgcttctaacccttttttacaaaaattttttataacacattattatgtttatctttcatatatttgaagtatgtttttttaaaatttatttaatagatgggatgcatttcacgactttttaagatttaattttgacaatttgctggtccggcctttttttattggacgaaattaattttcaatataattgcatttttttttaattttaattttaattattgtaaaaaaataaataatacattataaatttttcaaattttatcactttgacactaacgcccaacactttctttaaaaaaatttcgtttttttgaacttaaaacactaacccttttttatgtgtttcttctgacctgtcaatgttttgaattgttaaatttataaattgaaaatatttaaataaattttagtgataaaatcgcattttatttttttaatttttcccccagaaacgctgtgaacatgtcaattgcattgagcagaagccaaaggcattggcattacgtgccacgcttggtgaagtcgaggcggcatcactcaaattgggagagtaagcgaatatatatatttgtttagttttaaatttaatttaaacagaccggacatgccaatgaatgagattgaccgtgccgtggaagtacgtcttgagcgagtgcaggaggtcaaaaagtcgatgctcaaggaagccggactggaaacagacgtatgttcattatgttatattataaatgcataaatacttttttacaagcgtttattttatttattaaattaattataatttttaaattaggtttactccccgtccccgaattccgacttttcttggcctattctccgtcacccaatctccgattttttgggcctattcttgaccccgatccctgaattttctgggcctattctccgatcttccgacttttctgggcccgtttccccgtccctaatccctgaattttttgggcctattccccgcgtccgttttgggccaattttttcgactccgagctcttcgctcccatccctgatccctgaacctcatttccgactttctgggcctatttctcgaacctgagctcctcgctccccgttcccgatccctgaattttttgggcctattccccgcgtccgttttgggccaattttttcgactccgagctcttcgctcccatccctgatccctgaacctcatttccgactttctgngactatttcccgcccctggtccctgttttgggcctatttctcgaccttgagctcctcgctccccgntcccgatccctgaattntctggggctattccccatcctgatcccccgcctattctcctcgctccc

SEQ ID NO: 10504 - DNA, 1422 bp, Heterodera glycines
tacctttctctaggaggtgaaaaagtgagggctcaataccgaagatcaacaacatgtttcctgcttatagtgccagtcggtgagcttcaagtcgcaaactttttttgaattattttaaagatacccgctcattctgatcagtgatcaggggattttcatgcagaaacaggcactgagggacatggtgtgcaccatgcgtgaacgcccggacatcgctttggtcactcagccgccgtattgtcgggacaggggcggcacctttggcgccgctttggagcaggtgatcgacagtcagtgtcctacacaattgggaactcaactttcccacattttggaggtgtattttggtggtgctcattctcgcatttatttggccagccacgcctttggcttcgtttgttccacggggatgagtgcgttgatggtcaaagacattgtggagcagtgcggcggtttcagacagttcggtgcctacttggcagaagattactttcttggccaggcctttgtcaaagggttggcgcttcaattacaaatgcttttcttttaggccattcttcattttcagtggcttccgcaatgtcatttctcatctgcccgcacttcaaaacacagccaggcccaccgttcgttctttccatgaacgcatttgtcggtaaatgtccattaaaaaacttactttaaacaaatacatgaaaatgggggggggggggggggtcagagcggtgagtgaggggattaaatgcaatttttttctcgaggcagaaaaggaattgggccaaaatcggcaaaattaaaatttttaggccggacgcatattgggcattgacgcggggcaataccgaccatacgaaataccactgcttagccaaggggcacgcttctttggacgcagaaaatgattaagcaaacggacaaaaattaattgcatatacctaatacattaaaaggactgaatttcaaattaaaattaattaaattatttttcatttactcacaccgtttcaattttggcctctcagttccaaaaagatttgcatgtgtggcgaagtggtttttgtaagatagtaaagggacaaagggtggtggttcgagtccgttgtgcaacatgaatatttttatttatttttgtccaaaatattaaaaaatgacgaattttgggaattatttttgaagggttttcccaaccaaattggaaaaacttgatatcattcgaaagctctttatgaggagaagctttttctaaggaaatgttaagcgatttaacgatttagaaaaaagataagagcgttcgaaaatctaaattaacaatttagcaatgttctaggccgaaattcttaaccaaatcactgaattttgttaattttctttttctctatcgatatgcaaaatttggtgcagattggaatggattgaaaaaaa

SEQ ID NO: 10505 - DNA, 2665 bp, Heterodera glycines
atggatcaacttcgtattgccatgcttcctccacctttttgctggagcctgcccaggagtgtgtggtcgcttcgcttatcggcgttttctccgttttccaaattttcggttcttcctcggtccctttgtttctcttcgttcattttgcctattggtgcctctgtgactttctgcttctgctcattcttcaggtcttccaattaacccttaatcatcgtcttcctaatttgttgattttcagaatggtcccttgcctttttccgtcattacttttcttctttgttggctctttcgcgaatcgatgacatttccaagtgttttctcatatatattatgctcaaaacacgggaacagtcatttttcttggtttgaccacttaacgtggaccgttctgatcgttttgccttttctcttgtcgaatttcaatttcagccagcggttcacgggaataagtcaaaccaggaaaaaagtgactgtccctgtttttgcaacttaatgttttcttttattttcgagctaatggatttgatttagcatttatcaaggccatattgaaccctcacatcggatggcgttttggcacttatcggctttgttggggaggacggataaaaccgccgccaaaggtaacgtaacggcgtgctacggaacattaacaacggcgagacttgccttctgcaacattcctcaaagctgtgactctcattcattttcccattttttcttgtttgttaaaaattgttatttttaacccaaaaggaattaattagtttaattgcttagctcaaccttaaattgaactccatttctctcgtctaattcgtttttccctttctttttattctcttctctccattcctttttgtcgtgcttttccaagtcatttattacttttaatcgattacaaatgaaagtcattcaataattgttgtatcaaacggataaatcgttttggattcgtcatcctcaaagcaatacaatccacggcgtgaatcttcacagtttcaacagataatcgcttagtctgtcgcctccgttaccatgtttttccactgaaattgcgattgtttttttttattagaacgcaaacccactaatcggcgatttcatttttgtttccgattcctctgaactgacaagtggcatcattaaagccatgaagagaaatgagaaaagaacaacgagaataaacgatttcatttatgaaaataaaagaaattttgtcaaaagaacgttgttgttggtgaaatgattaaaggaccgatcgatgggagaaggaaattcattcgccaaatgcaattggcgtttgaaaattcacagagaaataaaataaaacattccgtttattcttcgcataattcaatttcaactgataataaagcattaaccaaaaaacgtaaataagccaaatggcggttttaaattgcgtgggacaaaagggggaaagattagacaaacaatttaatttaataaaattctaattattcttcaaattacgctcaattttactgattgttttctccgtccactagtaaatccgacagcacttcgtcaattgttttgtggtcaaaggcggggcgaatgaaaagggactcaattcggtgtgaattgaccatcgcccgaagggacggcagaaagaggagaatacggccaaatctgaaaaagtcggccaatcgaatgtatatttggcactaaggctcccccccccccaccgggcgggggagggcgggtgccgcgcggagtgctgctggagcatggcctgggactggtcctgaagctgctccatcagtgcaccgttttcggcagtgaccgccgattctaaagggaaacgaaggatttaacgcaaaataagccttggagaaaagcaattgctttgtattttaattgacgatcattttgacctggtctgaagagaatgatcgctttcagacagccaatttcggcatgattcatccccaaacgcttgaactgttcgtacaaatggaggattgaccggtgaatgtcggtggggattagcaaattggccggagacattgccaaaacgcattcatccgcacaccattcaaaagcggtcagcatgaacagctcagcaattccgtgctccaacaatataatctgaaggcgagagattgcataagggaaagacagagagagagagagagagagcattttgtaagatggagagggtgagagacaaaaagagagcggagggaggcgagagacagaaagtgagagaattggtgagagaaggaaagattgaggcggaaggggagagaggacagaaagagtgagggaagaggagagggtgagagtgagagggagtgagggggaggggagaagggtacggtacagaaacatttctttctctgctttaaaaaagaaaaaagtttcgcctagcatccccacctgatcactgatcgaaaatgactcaaaagaaggcattgcccgtgctctgctaacagtcattttcaatatccgagcgcatgtctccataaagtccttccgttgctccgaactgatggagttttcgttgccattttccgcaaaaatttcgtcattttcatccgttgggactgagatggaattgcttcgtttttgtttgaattttgcaaactcaattttttcgggtgaaaagccgctgtatttctttcggattctgcccata

SEQ ID NO: 10506 - DNA, 1109 bp, Heterodera glycines
aattattaaaaacctgggaaaattaatttttattcgtaaattaagaaatgaaaaattattaacttttctaaaaaaaaatcgttgaattgcattttaatgacttgaaatttaatttctttttggagtttaaaaccttttgtataatctattaaacactagaatttcaaaaactaaaaattttgaaattttaatacaaacttttttatatactttgtaaaaaatttaagtattaatattttgatagaaaataattaaagctattgaatgataccataaaatattggttgcagttgagtaaagttatgaattttttacattttttattttagaaatatttcttcaaaaattctaattttatcttagaatttttcgttgaaaattttcattaagtttttaaaaaaaaaaaaattaatttttgaaaattttttgaacaattttcaaggatggcagttttaagaaacgcgccagcacgttttaaaaagcccgtttgcgctcagttgacaaaaacgggctttttggcatgccttttctcgccggcattttccttcaaattaattgtaggccaggagtggaaaaactttaggatacttttaataattttttcaaaaattttattttgagaattttttgggtcagagaagaaatcactgtttaagtagcagtgagcccgtttgagctctattagtattctgttgttttttagggatgtgaaaattaaattttatttatctttttcggtaaagaattttggcagcattttctttccatgaatttaatttgtaaatttaaatcagacacccgtgtctcctatatttacgtgttcgagccggacaccgttttggagcgcggcattcgtccggcattcatttcaaatgcggcacgctttccggacgtgcgcgaggggtaccattttcgtccgccgttgggatggatgaacgacccgaatgggttcagcaaatttggtaaaatcattaacgcattttgttttcattcaatattatttttactaaatttcatttattatttatttgattaattttatcattttattttagtagctcaaattaattaaaccaattaatgaactcattttttaaatatttttttca

SEQ ID NO: 10507 - DNA, 2768 bp, Heterodera glycines
  unsure (1)..(2768): unsure at all n locations
tttattttaaangaattattatatttttgcaaaaattaaatattttaaatttttatataaattggggcgttttttcctggattaaaaaattctcataaaaatgacattatcacaaaaattactacattcaagattttttttttggtttttgttgttcggaaaataaaatattaatttcaaaaaaataacaaaaaattattattattattaataaatataattgaaaaaatacggcaaaatattttctagttaaaaccttctaaaaaaccgatttataaattgtaaaatgtgagtaaatttatcggaaatacatacccattcggcataacccggatggctggtgtcaaattaacgcaattttatcggtgtaaaagaaaaatttgaaaattggatataatcgacgattagaaaattttggacattggaatttttacatttaaaaaatacattaattttttggaatcaattaaaatccatcatcatacatagctttttaaaaaaatttaaatttttcctaattaatcttccattatttcatcttttccaaattgtttcttccaattgcaaattgttccatagttaactccaattttcttacaaatttcggcataattttgtttccattctttcgatgaatattttcttttttgtttgtattcatttttattgcaataaatttttgaacaatttcaattttttcttcatcagtttttgatttgtgacttctttgtatttcttgattaagccctaattctttaatccatttataaatataattactatttgtgcccaacttcttcgctatttttgaatttattttattccattcttttgttgaatattttccttctttttgctttattttctcttttattttataatatttttgaattatttctcttttattctgctcatttagttgtttttcttctttctcttcccatttttctccaaatatttcatcaaatgttttttgttgcaattttttcttttctgcaccgacataattaatattaattaagacgattaaaagcacaattaaatggaatattaggcccaatttcatctctttttaatgatattttgtctacagttgttattaagtaattataagtatatgtattattttatttaaattaaaaaaaagatttatttaattaaaatatttattaattgacaaatttaagaaaattatttaaataatattataactaaattcccccatatcatttgccatatttttttatgatttataagatgatcattttggaattgattatattttaaagaaaaatttactttattagcgtcacaacatatctttcgttaatattttcgttattttgcattatttttatggaaaatgaattaagtttatgaaaattatgataaaattaaaaacatttcctttatttaaaattctgaaaaattaaaaataattaaaaagaaattataattatgtaaaatattattaatttttaattctttttgctttttttattattgtccagtcatttactaatttttcccatttttttgaactgggaatgggattgagctggaccagatttcaacttctttaaagtttttttaataatgaaaaaaaattgccaattcgttgatttggtcttttaattagggcatttatgtaaaatacatggcatttttaaagatcaattgggtgcatcagccaatctttttgctgcccgaccccgcagtggcacttgagcatgatggcatcggcggcatttattccggctctgcggtggtggtgattgatgccgtttcgggacggcccaaaatgaatgtgtactacacggactcattgaatggtatttattttaatgcctgattatgcttgctgtgggaggacattggtgtgtcacccaaattataccgtaacgaaatttaccgtaaaccagggatggcattccgaggaaccaaaaattttttggaaaattatttagtgcaacagaattttttttttcatatcaatttacattgttttagtacgtttttttggaaggtcttttacaccactttttttgcggcgcacttttggtttttatttgggagtccaaattacatacctaaattaactatttcgaaatttaaaataaaccattttgtaatttagcaaaaattcaaaaaaagaatttccgaaaatttccgatttttttcaaaaatctcaaataaaaaccccaaagaaatatataaaattgatggaaatataataaatgttgtggatacaattagggatttaggcataaatattgataataaattgcaattttccaatcatgtcgcacaaataataaagaatgcatatttacgtatgcgttctttatttcgggttattaaatcaaaatcttctaggatttggattattttgtacaaaacttatgttagaccgttattggaatatgctcctgaggtttggaatccatctcttctaaaaaatatttaaaaaattgaaaaatgtcaaaaatatttcaccaaaagagttcttttcaaatgcagccttccacccattccataccaacaaagattagaataccttcaactgccaacacttgaaagcaggcgaaagctgtctgatctgttcatggctcataaaataatttatggccgaacagatctgaatccctttgaaatacttaaaccttctttaacattcccttttatagacttaactcgaaatataaattaggcaaaaaatttatacctattgcggggcgggtaacaaaaattggaaccaactcgataaa

SEQ ID NO: 10508 - DNA, 5060 bp, Heterodera glycines
aatcgctacgaaattttcggggatccggcattttgggactaatttccccagtaaatccttcgtctgaattattgtacaaactctttcaatttgatgaaggattgcttgtttccattcatgtccccctcccattaatttgaaaaaaacacaggcctggagttgcggctgaccgccctggaggcggtgggcaaatacgcggaagccatccagctgatccgactgcattttggcgaccagctgcagcagtaccagtccaagctgagcatgcgcattttgcaacgactgcgccggctgtaccaattgggcggatgccatgccgaactgttccaactgtgcatggacagcgtggacaacaacgagtcagtcagtccaagaaaaaattttggaatttaacgaaatttaaatgaaatcattttttgaatctttttaaaacgacgacaaatttgtcatcacatttggagttatttactgtgtttgtcctcttttgaacagtcccaacgattggagcaattgggcgctgatgatcgactcttttttccatttgcaggacaccgatggaaggtaagaaaaatttgggaggaatttggacacggataatgcactttcctggccaatgattgattaaacatatttataattcctgatttaattattcatctgaatttcatttcactcaaattctgaaatttaaaatttgaaatgtttttgatgacttttcaatctattttcttcttcgatagtgactctaataataggtcactgaactgaaaagcccaggtttttatttttggctctttaaatctttaattttagtcttttgtccgttatgctccaaaagtgtcactttttggctgatcaaagcgacagaaatgcgtcggatgatcgccgtagtgagtgcattttcagcatttgtggttcccatttcattttgcgcatttttaaagcattccttttggtcaaacttttgttcatccaaagactgtcgtccgaaaaccgtggctcacaaagggaattggtggaacaactgtttggtcggtaaaatgtgttcattttggcatttaaataaacaaaaaatataaaataaatatgcaatttttgatttaaaaatttaggttctccattttcgttacaccaagaagtgatccgagcgtaccatgatcggccatccacttttatggacttgaaaattttgtaagttttccattttttaagttattttcgaaattggccaatttaattggaaaatgatgacaattttcagcctccatttgctcactgctgatgaacaacgggctttgcttgacttcatttcctcaattttggtaccaattctttttcgcgctaatcggttggatcccatttgggctttccccatgcatttgttgggtactttacgtgaccctcttctggaagttttcaaaaaacagaaattccaaaaaatttttagagaatttttgtttattttttagactaacaataaattttagcagaattttttttcaaaatgctaattactgggtcgagaaaggatttgcatccgcttcatttgccaccaattatttgcccatttttccgccagaatgaccctaatgttggtgttcatcctgcgcttgttgaccattgttttgcttcttcctccgatgaatccgctgctgctcccttttccgtttggacttttctgttggccgaaatgatctcttccttttgcttccaaccgcacactttgtccgaccaatccctgaagggtctgtctgtgtttgaccgatcatttagcattcatccgttcatgccatttctttttgccactgacgggacggactatcccatgaaaatgcgaaaaaaacattttttagaatttttttaagaaaattccggggggggggggacgacctgctcccgccgttattgagtggatgacccgacccaataatgtaaaaaatagcatggcattctccatttttcagactccgtccgtcgactgttgagcagaattttgcaaattaacgccaacggcagtgacctggccattgctatgcatgcccaaatggtcgcaaattattgttgggaattttttctcagaaccggtaatatatatatatgcatatgcatcccctctttttacagtaacttttacaaaaacacagtgcatttgtcgtaataaaaatactttcactaatcccccccccccaatattttcattaatttcagatgattacaatgtgttggccttgctactttcttttctggaagtcttgaacaaacaaacccaatgcaacccgctcattcctgtccttttgtgcagaatttacggtaaaatatttattgtacagcacagtatttttttttatttaaaatatgatttggcccaaaatttcaaaaaatttaaatgccaattattttcagcaattttcggcatcacttggcgcatcaatgagctggtcagacaaatggacatcaaatttattcagcgcgttaattttgccttcttccaatgctttgttgccgaaaattttggacaatttcggacggccggaaattattacgcatcgatgggtaagtgaagaatatattagttttatataaaacaaatgcaattttaattttcccattttagtgaatttgcagaaatccaatactaaagaggtgaggaggcaaaaaagggacgaaattattttaaaatcatttaagaatgaattattaaatttattttaataaaagtttactctccactgatacataccatcgaattttcttccatgtcacagctctctgttttaaattgaatgataatttgttcagatcagtgaatgcattgtctctgcgtttcggaaggaaaaatactttcaaatcgccaatttgtacgattttatgcaaatttggtaatgtttttttatccgagtgcatggattaatgttggtaaaatattaattttgactaactttagtcagaattccgtctattcccaatgctccgttgtccaaatggccgttttctcagcctttttcgattcacagtctgtggaaatcgcttcaaatcatttgacaatggacgaagatgattttggtaaaagcggcacaaaaaatttacagtattacattgatattttaaaatgatgttcttttgaaatataaatatgtcagaaatccccctttccggaattatttttagtaaatttccggcactttttctctcctgcaactcccaattccctgataattttgaggggaacctcgatcaccagttttcttgcacattttttcttgtaggatgatgtcctgaaaaacggattaataaatgtttaatttgttggacattcaaacatttaccataaataaacacgtatttcagatttaaagcgcaccatcgacaacagggagttcagtgctgtgaaggtttttctgtccgaagcgacgcttggcgaaatgcgcgatgggacacttaaagaaattgtgcgcagagagagagcgaaatgtgcaattgcaattttaaactatttcagaagtcctatctgaggttgcgcgtcactctgtgccgggccatttgctcaattggcaaacagtcgttagcacagaatgccgccaccttttttgccacattggacgagtgccggacggaatatgcggaagtgccaaaaattgtgggacgaccgacacatttcaaaaaaatttaaaataaataattttttagcggaatatgctggaaaacttcacggacaccggcctggagcagctgtttttgtgcatcggtgatccccaggagcaacaacatgaacagcaaaaggatcagtccatgttggttcaactgcccgtgttggtactgaacgcggcggcgattggcacaccggattctgccgaagtgcaaagcaaacagcaaaatgatgatgaacagcaacaggaggagaagcagcgaatgattgcaacggcgaaccaatttgcaacgcttttgaatggtaattagtgaagtaatcaaacccttcgtgaagtccccccccccctcctgccacgcccaaaagtgaaaattcaaatgaaattaaacgacatattaaaaccaaaacggggtatccaacggcacaaattgcaaatttaaatccttagaaataaaaaaatggaagagaagtggaggagggcgcaaatgattatgtggttcaaaatttgacactttcgttttcaacattaaaactgtggccacattcccttccattgtcttaatttgttcctttactttggcatttctttttttctgtagatttcctcgtttactttggccaacagtcgccaactttcgtcacgctcaaaggccgaaccgtcgctgtccgaatggtggccaaactaatcgaaatggtcgctttggcactgatcggtgccaaacgattggaacggattttgcccgtcgcttcgctgctgccaacagcgacgacgacagcgtcaaccaaaggcaccgacggcgacggaggaagcgggaaaaaggaggcacggcgaagtgatcggaagagcagcaacaaaaaacagggggacagacagcagcacaaccaccaccaccaccaccaacatggcgatgcacaatgctgtcagcacggtccatggaaacaaagcgacgagcaaaaggtgtactaagagagtgtgaaccccgagtaaagtttaaaaaaatagtttcctactaaaaaatccctaagcatttagaaaatcaaaaattttttcacttttttgaggacaactaccttgagtccgtcagggggtactaattgggctacccggatccgacatttggggattttaataaagcaaaaaaaatattacaacaaatgccgagatctcttttctgtttcgttaaattaatttttttttgtgactcacttgaaaaacaaatctcagtccgaaaacagagttaatttaaaaaatattattttgttttttcttgcaatggaattaactctggctaaatcagacgtaatttatttatttttttgggcataaaattaaatttttaaatatattttttgttttattaaaatccccaaatgtcgggtccccaagttgcaaatccccaaaagtcgcgccacg

SEQ ID NO: 10509 - DNA, 4381 bp, Heterodera glycines
gggcggcgcaactgtcgcggcgcaagtgtcggcggcgcaaatggcagcggcgcaagtgtctgcggcgcaagtgtcgcggcgcaagtgtcggcggcgcaaatggcagcggcgcaagtgtctgcggcgcaagcgtcgcggcgcaagtgtcggcggcgcaagtgtcactttggctgggcggcgcaagtgtcactttggctgggcggcgcaactgtcgcggcgcaagtgtcggcggcgcaaatggcagcggcgcaagtgtctgcggcgcaagtgtcggcggcgcaaatggcagcggcgcaagtgtcgcggcgcaagtgtctgcggcgcaagtgtcgcggcgcaagtgtcggcagcgcaagtgtcactttggctgggcggcgcaagtgtcggcggcgcaaatgtcacatcaccattatttgtttaagaaaaaaaacaaattttgagaaattatatctatttcaatttacttatttgtaggataatttattattattattatcaatttgagaaaattggtgaaaaatacccgaagaaacaaagtgacttatgaaaataaacgcaatgataattcattatgtaattcaacacaattaaagcaaagcaaaatgtaaagctaaatatagtttaacaagatcaaatcttaaattgatacaattatatttaaactaaaccaaaatatcgttttgcggacaaaaacaaatgatacacacgcacatcagctcagcgtaaattgtattaaaatataattaaacattaaatgaacttaaattcaactgatcaataattgaattttgtttgatccaataatccttacaccgatatattacataaaaacaaaaagttacaaatattttggcatattaagactgaataataagtaatttttgcgctttgcggtccaatcgaacgactcctttgtacgtgactttcgtggtggcgggcggcgagcttctggtcgaacgtgataattttgagatgaattatctttttgagttgtttgagaaactcactgaacggagaaatttggaaaaaatttgcttttatggcacggatgaagaactgaagtagctgcataaaacggaaaaaaatctttctctcctattaatgtatgcattagccaacggcaaacgactcaacctttatctttgtgattaggttacaagattattgttaaattaggcattcttaaaaaataaactattaaaataacaattctgttaactttaataaattgttgaaatatttttggggtcgttgaattttgcgccgccgcaaatgtccttttgactgggcgccgcaagtgtcggcgccgcaagtgtccttttgactgggcgccgcaagtgtcggcgccgcaagtgtcgcgccgcaagtgtcgctttgactgggcgccgcaaatgtcagcgccgcaaatgtcagcgccgcaagtgtcagcgccgcaaatgtcggccaatcgtcttcttgactttcccttcttctttcccatggttcaattcctctaagtaattaaaatattttgtttctttttgtataatcatgagtttcctatcgacaaaatatgattactcatagttttttaattaacacatttttattattttttgaagaaaattcgaacaaattgagcatagtaatcctaaaaatcagcattttttgttgaaaatctattaaaaaattacactcaaattttcaaaatttcccccggcggcgcctatcggcaccgctgctggcgccttatgctcgtctcgcggtttagtaaaccacggttaacgcattaaccacggtttcgttaaccgtggttaacgaccgaccttaaccggtatgctcgtctttaaccatggttaagtaaaccatggttaactcaaccgtggttaagagaatttatcgtgaaattgaaaaataattaatattaaaaaaaatataattaaattattataataattattttttgtttgtattatcaatattagcatagattttttaaaaagctattttagcggtttgggcgtgtgcaaatttttttgatgaaataacactaatccgtcaataatttatatcatagacaaaaataaaagtcagattctttttctgcatgtaaaattaccctagaaaaaatttatttattattttactatttaaattattaaataaatttacgttaaccacaactcgagttgtggttaagattccttttatatattatttttactttaaaaaaaaaattaaaatttgaatttttaaaatacggattacggactacggatccgtaaaaatccgtgtacggatcccgtccgtatccgatctctaattaaaatctaattatttttgctgaacagtcaccaattcttttatttttaaaatttaattattcttaaatttcatgcgttttataattcaaattcaataaaatacataattagatatgataaataaaaataattatttaaatttaatccaaatgtgaaaatgtggtggaaaatttaaaataaatacatatataaaacaataaaataagcaacaaacatataaaatttatatatgttataaaaacaggaggaaacgcaaaattcaagcgccatttttgtaatgaaaatctcaacaatagtacaaaaaaattgaaattttcattcttttacaaaatcaaaattgggcaagctaattttgcgcaaaaattaccaaataattttcatataaattcagatattcccattaagcgagttaatggaataagtaattttttaaattattatgatatacgaacgagaacaaaagttactcaataatttaaaattataatcaaaaaataataaataaataaatcccgctaaaataagaaataaaaatcaaaaacgaacaacattataacaaattgacttaaataatatataatacattgattttatattaaaacgattagacattggcatttaaattaaaaggaaagtgcatcatattatggaattattaataccatacactgatagtattttaagctttttgaattaattttatctataatatgctttaatttttatttaatttcataagtgttatgtcaaaaaaaataataaaaacaataaagtatttgtatttgtatggtgagaacaacatataaataaattaaatactacaaactaggccaatataaataagtaaattgaatttattttttttaattttaatttctattagctttgtactgcatgaatttaatgtgaacattttgacataagcaatttgataactaataaataaaaatatttaaaatatcataaacaacaatcgaacaatataacatgtaaaaatatttttatttaaatttttatatttgattactttacgaatacaaaaatcaattgaacatatctttcgctctctcctctctttctcttcctctctctctctagtatttatttttctctaatttctcattttcattttttccattttctcttactcaaaagaacaaaaaacaatcaaagaaactaaataaataaacggcaataacataatgcaagtgaagggcactctaataattcggcataatattttgattgaaattttttcctaataccccaaacgtttttttcctttataagtatatttcaggattttcagaaattccttaacacaaatacagtaataagttgtcttcttacaaattttaagaaacttatttttttaaaatttcatattaaaatcacttcaaattttacttttattaacttttttatttttcgtgcctttaagcatttgctaattgtaagttatttaggaaatgactgaccaaaacagcgaagcaacttttgccgaggaaaccagagagctcaaggccgagattggtcccgtctttaaccgcgagaaactcgacaaggcgtacaagaaacttgcaaagaaataccatcctgacaaacacaagaattctgctgagaagacagcaaaatttcagcgcttacaaaaggcaaacgatgagctcaagaaagagctgcttaaaccggaggcaattttattttaagcacataagcagggcaccctttaaatttgttattgaaaccattttaagtacaaagtttctttttttctcaaaatgatgggatcgccaaatgcagctcggacgcttgatgagctcaacaaagtgggccatgacgaattgaagaaaatggcaactgctcaacgtggcggtgattggaccggaacagtgacaattgggggacaacaatttggtgggttacaaattattaattaattaataattatttttgcatgtgcaattgaatgtagttttggttttattacacgttaataattgtttattttgactaattaataaaaaaatatattagtggagttaaatttaattattcgaataatttttccgactgaaacg

SEQ ID NO: 10510 - DNA, 2223 bp, Heterodera glycines
acattcgtccatatttgttgaaggtgtgcgtgtactgttccaacatggagaagtgaaagatgggcaacaacattcggcgctgaattcaaatgagtgtattttgatacggtagtaatttgaaggggaaggatacggtaatttcatttaagaaacgattaaaacactttcaaatgatgattaaaaaagtatttcaaaatcatatttgcattgtgtgttgctgtattttactgtatttattctggaacagtcccagcaggaggggaggtgtaaaggatactgtaccaccaccctagccaagatggtaaaaattcgtttgcaaaaggtggaaaaaataaaattggccggatatgataattatcatttttctaacatattccccacccaagccccgaaaatcctaaatcttagtaatcctcggctgatttatgaatttatgggactcacttggcgaagccaatggtccccgtcgctgaccaaaacgccgttgcccaaccattggtgaaagaatttgtactcaggtccttttttgatttcaacagtgctttccaataggacctaatgcgcgagaaattttttgggaaatttaaaatttaattaattaaatttttgggcaattgcccacaaaaaaaacccacttttgccgtttctccgtccaacgtgacaaccataaacttatttgcgatccacctgaaagaaatttgatagatgttcattattctttaaaattatttttttcgatttttaattcaattatttttttcaattttatgttgttataattaaaaataataatacaattatttgttaatcaaaccatctcatcaaatggtgtccttttctgaccgcgtctgtaattatgaattaattatctcctaattatgttttttttattagtgttaatacaatattattaccatttgattgttccacaataaagctggaccatgctggaataaagaattttagaagtgattattcaaaaagatgaaactcaaatcaatttggatcactgatgagaaaaagggtttggtcaattgttcaaataaattcaaaataacttaattcatcttatttctgagaatttttttagggtttttcgatatttttttgaattttaattcactttaaatccagaaatacaatattaaaaatctcaaatttaaaacaaattttactgcctccgggatgccataaaaaagctattttttagcacccaaataatttttaaaatttttatgtaaatattaccgaacgagttttgagggaacacgtgggcctggccgaggaacggaattgtctccggaatattgtaaatgccattggaagtgcggatgaagcgcaaatgggtggaagaaatggcaaaaatacgccaaacaacgaaaacgagcagcacaaccgcaacgaagaacagaagcatttataataatgataattataatataaataaaaatcgaaattattaaatttttaaatgtgaaaaatcattaaaatcatattcaatttatttaaaactgatcaaaaattaaatcgaatttaataacattaaaatcctcgtcggtaaataattttaccctttttacagaatgttcattttgaatttaaataagaattagtttattaaattaaaaaaaaaaattttttttatctataaattggcatttaaaatatttttaataatttttcccctcatattaatgaatgtgtcttaaaataaggcctaacgaaaattgaattaacgttattttggcgttgtactgtttttttgggttaaatccattaaaaattgttgtaaaaatggcattgcccttccccaagcaacaaacaaatttttgcgcagagaatatgtacgtcaattttaaaaaaaattaaaaacggaaaatgattgtgtaattggcgaatggtgggcgaaacttgctccccattttttgttgcaacaaaattatgaaaaagaaaaatgtgtaaaatttgttgaaaaaaaactatttatatcataataattatattttatatttagggcgtccttgaaggacaatgtgctttttgaccttaaatggtagtgctcttaaaatgtcgttgaacaatttttgaaaattttgtgtgccccgcggcgacccaaaaaccttgaaaaaaaaagcagcagcagcaaaaatgggcaaaaacaattaaaagattgtgcgcgaaattgagccaaaaattggccaatttgaaaaaaatgggtgaaca

SEQ ID NO: 10511 - DNA, 2044 bp, Heterodera glycines
taaaacagggttggtatcgtccaaggtcggcttccaaggacgggtatgccgatttgcaaggacatagtggggaaaattcatgaaatccaaggacatttaaaatttttattatatgcaatgcaaaatggttaatatttattcaaatggcttgtattttcaccggaattgtttttttccaacatttttttgttttcacttatcattttcttcatttacgacgacttttttctgctttaaaaacgctttttttgtggcgcgctttttccaaaaattttgtgggacagaggggggggggggtccggcggtgccgataggcgctgccggggaaaaattttgaaaatttgaatgcaatttgttaacagattttcaccaaaagctgcctaatttttgcgattttaagccatgcaaggactttttttgtttataaaatgggtttttttacggcgcgctttttaaaaaattttttgaggataggggggtccggaaaaatttgtaatttttaatacgagttgtttacagatttttgtccaaaaatgaccaaaatttgcgatttttggctaattttttaagaaaaatagtgactagtgacttaatgccataaaatttcaaaaattctcaaaaattacatttttaaatgacataatgccataatttaatcaaaatattgttgaaaattacaaagatttctcaaatttctttgattttttttaaacttttccaaatgctcattttcaaggacgtccttgcatacaaggacattttttattttcaagaaagagggcccaatttcaaggacgtccttgccattcaaggacggatggcagccctgtattattttaagtaattcatatttggtttaatgagtgttaatttttaggaaaagcttttcctcatcttgttagaatccatgctcaatttattgcagtactgatcactttttgaaaagttataaaggataaattttgcggaaaatttaaaaaaataatggaaaaaaagtttctttttttaatatttttctcaaggccaaaaatagtgaaaaattcagcacaagttagttcttttttttgaattacccctttaaaattcgatgaaaatcgaatcatttttaaaagaatgagtgatttctaaaaaaagaagccaaaacaaaattatttaaaattgaaaaattcattttgcattttagcattctatttttccaataaattggatgcaatttctgagcttttttaaaggaattctttaattaaaataaattttttatttattttaataaattaaataaattcttcagtttatttatttttatgtatatattttctttgttattggcaataaaaatgactagcatttaagggaaatgctccaattaatcaaattgatcatctgagtggagaatttgaaaaaaaacaaaaaaatctaaaaaataataggaccaaaaatcaactgaattataaaaaatcgcatatttagcgtataattaattgctgtctttagtaataaatgttagggttttattttattttgaaaaaacgatttatcaaaaaatgccaaatttttgggaaataatctcatccgaatgcattgaatgattaaaatatttaattattcaattaaattattccaaattttgcccaatccaattgatttatcccatcaacgaaaagttaaatgtcgttaaagtttgaaatcaaaaacatgatcaggcaggaaggagaacactgatcttatcaaccccaaggcaaaatatgctgatcaaaaaacaaaacaaacaaataataaaaaaatgtttgagaaaaaaatgctttcaaaaggctcccggtaaattggacactattggataaaaaataaataagtttaaaataaataaacaaaaattttaattgaataaatttttttggcacattaatcaaacatcgtgcatataaaatgtttgatccactctaagtgccttaatccattttatccatacaaattatttttcaatctaatgcctgggcttattttttaaaaagaggaatttggtgcccagttttccggtgtccaa

SEQ ID NO: 10512 - DNA, 2450 bp, Heterodera glycines
  unsure (1)..(2450): unsure at all n locations
aagttgttagagtactaatagttcaaatacatatcattaaaattcacaaactgccgttgtggctttttntaatgttttgtttttctcatttttgtaatttcgctntacggatttcactttttgtttttagattttcttttttntagtttttaaaatatgttataaattatgtcttatatttatctaataattagtcttttcttaatttttttttgattaagataatgattttttgttgacattgcacaaatgcacaactcatacgtgggtcaaatcggtgaaaaagggaagtacgtaaaatatttatatattatatttatatataagatttttcatgagattcatttgattataaatgccttgaagtaattaaaattattttttcagtatttttgttttagaaataattaactttttaaaatgagtaaggaattaaggtatacattttttaaaatctattttccattaaatttattcatttgctgactttacgaaatattgatggttattgaagaaccagaaccacattttatttttatgaagacttcattttcctctattattcgatttaaatcattttttaatattcatgttatttcacctaaaataaacgtataaaaacttcaaattatttattttaaacaattttttaaataattaactaattgtcgttattttggtcaagaatatttataaaaattgcttatttttataatagtctttgaattttacttttatgttttttataggatgttaatttaattttgatttttacttagaatttttatgttactgttcttaaagaaaaatgaaaaaggtaaaactttcataaaatttccttgtccatgtttacgtgttgcaaaacatccttttcgaatagagttcatatgactagttcaaaattaataaatattaaaactaaaaatggatntaaaacatnttttatttattttgtttcttacttaagcatttgttttttcgaaatgttatatttattaatttattattttatgtttatactaaatattcttacttatgtttttcaaaggttttgcgacagttaaaaaatatttattatcttttcttgtgtttaacgatgtctgtctcattaacgtataacagtttatgttttacttatttgttaatgtggataaatttattctaactttttaattaatctgtatttgagtatttcctttttagatgtctattgattttacttttagtgtttttgtttttatatttataattctatggttgtaaagaataagaatgtttattacattattttaacatatgttatatttaatttgaggtttgatttattattaagaattttattacgaagacaagttaaataaattaatttagtatcaaagcttatcataagactcaaatgaaattctgatttattttatataattaaaaatttaagtgataatttctcaatgtttgtttatttctttgtacttttttattgctttctttttctagttatatttaattctatttttaatgtagcataatctttatttatttattcttctctttttctattaaaatgaaaataaaagcaatgccctcttttatactcgctcttttttactctgtaatttaaagaatttttttaaattattatttttttattttttatctacttttggagattttagaaattgattaatatttagttatttttattaattttattacttctttttataaaaatagtaaacctattctgattgccattcatggtacttaaatgaattaaataaaacgaactagaattatgcaaatacatactgtgagacacaaccatagtttatttgatattgcaaaaactgaataaagtttttgataaaaaaggaaacaaattgcaaaataccttaaagaattagaaggatttaggatatgaaagcaaagaggaattaaacgggtgttgaaaactcgtttttgctaattattttcatgatttatatttcttattatttcacgaaataatttttatattttgtacattaatttacgtttcgtttatttaaccttttcaccaatctctgacagatttggtaatattgtaaacgatttcttgtataattatactgtttagatatagttttattttaaatttttggcaaatatctgtcatagcgacttggagagtgaataacttttgatgggtgagtaaacgttgaggtgggataacgcgcgcgcgctcattgatttgcaaggctgcagttgtgttgtgcgtcgaatgttcatattatgtttagaaaatgtaagaattaaatttcttgtatatttgctattgtttattatatacactgaatatatttattcaatattctatataataagtaatttttctttttttaaagtttccttaactttgctttaatttattcttaaaattgaagttatcatctatattaaattatacttactag

SEQ ID NO: 10513 - DNA, 3698 bp, Heterodera glycines
  unsure (1)..(3698): unsure at all n locations
cgacctagtagtttttatgtcttggatgaattaaaattcatttttaattcagatcatgtaaaattacataataagcataatcacaaattattgataaaaacaaataaagttaaatattattattcattaaattatccggtcttacaaattttttaattaattgaaattattttgtgttgaagatttaatttattataaaattttttaattgtttttagcttatcattaattgatttaaatttttaattttattttgcaattttttgccggtactttatgcttaagtatctttgaaaaagaattttatattaaagtttaaatgatttttgggccatcgtttgtatgaataaaattgaatttgacgaaatttattttagttaataattatagtaataagggatagcaataacaatattctaaactaatttattcattagcattttattttttatatttataaattaaatcaaatcacaaatttaattaaatatatcaataaaacttggttaaatttcatttacgtttattttcagagctgacgagagcaattttcgctttttcggttcagatgaagatgatgataattgttgcggcgatgccgatacccttgtccgctttaaagatgaaattgcagtctgaataacggtcacctccttcctttaattaagtctatcaaccgagtggtatcatgccgcataattaaatttatctcgaactcttattataaagaaatttttttcttgttgtttatataatgatatctttaattcatccatgaattggtattataggttaattcgaatgagattatcatattcaaaatcggacgagcccaatgttctatcaatatcacaagtagtatttttattcttagtttaattataatgaatataatattgaaagtttgttgggatgacgcacataaaagcacggtgagcgtaaggtctgcagaaagcgtatttataagaataatttatttgaattttaattcctaaataattggttatcgttttttaataagtgaaaattatggctttattttttaaaattcgtatttcatttctgttctgtttttttactttaatattaattacttaacaaatcgatgtcatctacttagaatatgttgaattttttttgtttaataaatgtactgaaggtacattcactgccgttttatttattctcagccctgtcttatatattttttaaattttaaattgttttaatatagatataatttatgtgccggatgttaggcatggctgtggcaccataatataggatatctttatttttttaaatttattactatttcattcaaataatctatatttacttttagatttataatgacttgttaagtaggttcgctatttcatttctgttgtcttcacctgaatttttttcaattttttgaagaaaattttattaaatcatatttattctataattatttaaattcttgtttgctaacatagggtgcgtgccaatttcttcttcagatctggattcttttttcgtatttttttccttaaatttctgtatgatttgcgaaagtataaatttttagtattgaatttattaaatatatttataattttggtaattaattcttaatttgcaaataatttaatttttctattatcaatattttacctagaaatattttcatccttcatgagaattaattgactttaattttaaatagtttggtatttatgccatttattttatattttcttcatgtataagtttataaatatttgtctttttaattattctatctttgtttttcttttttcatgttttttttgtttatccgttaaatgattaattattcaattatataacactcgatcaatattggctttttaaaatgacattagtcaagctaaaatttatttagcaatcattcctgaaaataattattaaaatattaattcgcgtaaattaattttggtgttaaaaggatttataatcgactcattagttttttaaatgccattactctatttaaaatgatctattcactgatcaaagaactttcatttttatttttgttgattcttatttttttttaaataggttcttcaaataatatacttttgcgtcgattattttaactaatcgtcagagattttcttatcttttatttccttaattttatactgttaaagtaatttttgcatgtgttacttactatgtgcctcatttaaatcttcaattaaaacatttacctttttatcttttaacaggaaaattatataatttatacaaattgataaaattactttttgatgattctttttgttaatataataaaaaatagtttattatttaataaattgtgttttgagaatttttcatttcgcaatttaaatgaaacaatttcagtaaatgcttcccttcgaccctggggagttctttgccgttatacacagggcttctattgattttcaaaatcagaacatcgggctcaaaatataagattttggtttcgaaaatcagaacattttgcaaaattgcatcaaaacagttatttttaatttattcgatcaaaaatgtattaatattatatttattttcacctctccataatcgattttaataactttggggaggaaataaacaaatagtatatttcagtgcattcggaatcaaaaaaatgagattttaaaaaatttttgcggctcattttacaaaaaactttttgtaagtgggcgaggtgagagtgtccggcggcgccgattggcgccgcaggaaaaattttgtaatttcgttattatttgttaacagattttcacaataaaacgccaatttttgcatttaaacccagtgacgacttttttcggccaaaaatcttattttcttgataaaatagtgacattatgccataaaatttcaaaaattataagtttatttaaaaattttgctagctacaccaaaatcagaacatttcttagcaattttaactcaaattttcaccgtcggaaccatggaaattttcgggtatttttatttaataaattttggcagatattttagttttttaaatttttttcatttcatttaagcatgcttttatctttgtgtgttaattacttcctaatcgacataattaaaaataatttaaatttctcaaacgatttgagcattattatatttatacaaaatttgatactaaatgacagacgatatgtgctcgatttttccgcccaaatacatttataactacataaataagctagttaaaagttaaatagtttaatttattaacaactttttgattgatacaaacttattttctaatagtatacaataatggacaatagcttttacctttttgctaattaattttttaaagggaattatttattttttattcaaaagtttaaataaaagattgaaaaggcatagagataaaacgagagtttaagatgtttaaccatttttatgcatagttactgctcttaagtcttaaaaaatcatcttaagcaaccaatagaatcaaaaaatatttttgtagatatttggccattttaaatttatgttataattttaatgatcattttttaattagtaacaaattaactaatttaaattaggccacttattatttaattgattttcccttttctcgaaggcaaatttgtagttacccgangttttaaattatttaattagtacaaattaat

SEQ ID NO: 10514 - DNA, 2440 bp, Heterodera glycines
  unsure (1)..(2440): unsure at all n locations
ctctnnagagtcaaatgaaggaaaaaaagaaaaaatttatttttatttaaatatttaataaaattttagttttttgtttcaatcaaatgaaattcaaaaatacaataatttgtgttaattgatcgaccaattaatttccaaatggtcatacatttaattaatggccggcagacgcaattaattcacagaattccaacaattaaattattataatttgttgagcattcccacacaacacaccacgtcaaagcccttctcacaacaaatgctgccttcgtatttgtcatccaatcgctgtgcacatttggcactttcgcaagggcaatatttttgcacagtgtccgagcaaatttcatttttagccatttctttcaatacaggcaatcgatgctcatcttggccatgatttgcgatcaaattctcttccaattcctaaatttgttgaaaatttgtttattgttttctttttcttataaatataatttttgttaatcagaaatattgatgctttttattccatttataaaaaattattaattaattcttttaaaattaatttttcaaaaaatattaaatgaaattatttcattaaactttaaatattttctcttaagaaaggaactttgcttgatagaaaaacttgccagttgttgaatagttccagttgtaatgtcaagagtatcctataaatggtaaaaattgaagtccaaattaaataaatatttatttaataaaaaataaaaaactagtttagtttttggtgcattttttaaaattatcttttacaaaattattttacgaaaaattgtgattttggcaaaaaaaaaattgaaaatttcatggttaaatttaaaccattttgcaggcaaatttcgaacaattatttggcatttttcgtccagtttagctcatatttggacatttattgatttagcttatatttctagttttttggcacgtattaatcagggccctgaattattttttttgtaagaatttctgaaaatgtcgaaccaatgtacagcacaccaagtcgtacccggcctggcaacacaaactcgcattccatcccctcctctcatggcatcgtgcccaaccgcatttgcaatgttttttcaccatcatctggcacgtttcattgtcacgctgcatttccatggtctctttctaaagaaaagactttttaaatcgttaatttattttttttcttttaattaaacattaatttttacattattaaataaaaacaattgtaataataattaataattggaacacttaattttgcacacagagcagccatttcttcgccgcaacattcgcaggtcaatgcgcgattggaaccatctaacaaaataaagcgcaactacagtaaggaatttgtcaagcttttagttatcataacactggacttgcttataattagcaaatgtatatgtaattttaaacaggattgttgttgtgtccccgagtttaaggctttaagcctttcaaattaccattattttaatgaaaggatttattgtaaggaaatcattgaaaaaaatttgtaaattaaaaatggatataagtttggatcaaaaaatctcagagcatttttgatgagtcagtgcaattatgttccgttccaaaattataaactcaaaacttgaagacatgtaatttttctatagggtaagaaaaaatctaaaaaattcatttaagcctaacttttcatgctgatcaaaaaagtcctttgttctaccgtgatcagatcactccttcggggtgatctgaaaacctcaaaatggcttgaaatgggtccccggatttaatgctttaagcattacgaattacctttattttaatagagggtttagaattagatggggagaaaataggaaaatttacattatgcaaaaaatttggaatttggcaaaatgtaatttcaattttcttattttattaatttttttgaccttttagatgatttttttctcatttaaaggcaaaaattgaattttttttttgtgaaatgaagaaaattccgaaaaatatgtcaatcttagagagcgagaaaaaaatgtatccaaaaaacattgaaatacttttgattagcattgtgctagcgaaatggataaaaagagattttttaagaaattaactactatttttgattaatttaatgtttttgcacgtactttggcttttggagttttagcacatttaaatccgttccatgttaatataatatagatattttttagaagtttacctatccgagcacagcattcccatggacatttggggttcagaattgggtgtgcgacacaatcctttttagatttagtaaaaatttatattgctttaaatatattaatacatttttagtatatatttcataattttaaagtattatatttttaattgttaattttaaaacataattatgtaactgatg

SEQ ID NO: 10515 - DNA, 1870 bp, Heterodera glycines
ataaataaaagaattgaacaaatagaataattaatcaattatttagcaaaacatacgacttcgagatactgtgtctctggaccctgttacattgtattggattttttttgttatattaaaaacttcaggtaacaaaaccacgcacctcgaaggaacccttaaataaaaaaataactaaatagtttctaataaaatattttgagttatttctttttattgtttttttatttaatttttttccttttttttgaaatttgtgtatttgataaatattgaatattgcatgacttttgttgtctatcttgtttattaggctgtttctgtttgaatttgttaatttattaaagtttattaacagatttacttcaataattatattgtaaaatttgagaaatttccggatatcttcgggattttcattaaatctggcacaaaagtttgggatttcttaattggaaactggcatttcggtctacccgctttcatcccaatacaacttatgtttgcacataattttgtttgtacggcttgccttggtacagcatcgccactcatagccgtccatgcagcacgggtggctgttcacgcgtacatcgttttcaacgcatgaaccccatacaaatgggtggcatacattcatcgccttgtaggaacagttggtcttgctcaattcggggatccatgttgacagataggcaccaatgccaggccgggaaaaggtgccaagaatgccgatgccggcgactgaccgattttggccaaaaaatgatgatgttggcattttactaaaatgttaaaggattcactcacttattcgctcggcatccgatgatttaaattaattaataaatgaatttacgtctccaggggatcagcagatttttaatcatattctatcatcaaaaaattacgtgatcaaaacgctcaaaattatttggcgctatgatgttactcaaaaccaaatttaatttttgttatcattcgatggctacgccaatattgttctaaatgttttcaattagcctgcaaaatttcaaatgagttattttttgaaattttattatctaatagagaaacacactttacaatttgtgctatcgaactaaatcaaaaaattaaaaattatggttgctgaggaacaaagtgatgaattaatatttattgaaaagctttgaaatttgaattgctgaaaaacaaatctgatcatgaatatgtaaataatataaacaacaatcagtgtaaaacctgctgttgttgttcgatggtgctaatgcgtaggacaccaatggacagatgagcacgagaacaacaaataattgagaaaatgagaagcaaatcattttgcacatttttaaattgaagaaaaactaaaagtaacaaaaataaaaggaaatacataaattttcaatgctaaaataatttggttaataaaataatttatttctatcctttattgaaaaaaatatttgggcaataaaaaaatgattaacgtttttcattcccatccaaaaatctgaacaacaaaatgcatatgatgaatcatttgctggtaaattatgcataattatcttctaaaatgaatattaaatatttataaattacacaatatttaagctatattgttgtggattgtcgattttcatttttgaaaaagtaaatataattttttacagcaattaaagaaaaatataatggaataactttttgcacacattaaaattttgaaaatttttagggacttaaaaccttttatttaataaaatcagattttggtaaataaaaaaattttgtggatttcgacatcatttttgtgttttactcaccttcggggtgccggaaattttctgcaattttatgttatgtattatta

SEQ ID NO: 10516 - DNA, 1653 bp, Heterodera glycines
ctttaaaaaatttaacaaattatttttatctaaaataactgtatttttaaggaatttctgattaattacccagccttatcttattgaattatttacctttattgggtgggtctaattttttcctaaattaatcattttattttggtgaattcccacttctttagcaattaagaagtttatttttcattattttactaggcctcttaatcaatgagcaaattttcaaggaacatcagcagttaatcataccgattctgaagtattttttattttgttacaaaggcttgactgactcattgagattattattatgataattagagacgggttttgtttttcgtcagaaaatcccccaccggtcctattagaggcagagcttctttttttcttcaattataacaaagccaagcacttaatcattttttttaatttattcaattaacaaattgtttggtcaaacaagaaaatactattttgttttgtgaatgggaaattaataaattctccagcattattttccgcttttttaattgtcattatatgaacatttctccacgcattttcccgtctttgtgttgcggaagattcccggcttacagtcgcatgagcatggacatgcaattttggtgcaaatctccggtttcagcttgtcacaactcggctcacatccgttgcactttttgtagccgaattcctcatttgcagggcatggaacctaaaatgctttttttaaacattaaaatgttaaaaaatatttttttaaatacataattttatactcacaaagcaagttggcggattggttccttgtgagagaatttgcacaatgagaaggaaaaataagaaaagaacgttgaacaacattatattttattttctaattaacttaaaatttatatccaaaatttaacaaaataaaatcgattaaatttcagcaaatggcgtttttttttagcactgaaatacaaaatgaaaacccatctaattatactaggattattcatttttgcgttaaaataaacacacaatttatttacacaagggttggagaagggatttaaatgttattaaataaatatttgattaaatagtatatgttgtttttcataaatatttgcctatttaccaatgagaaatgttatgggattttcatcaaaacaaaaatagaattggatgggcgaacctgcacaattagggcaaaaatgcacaaacaatgggctaatatgcgaaaaagaattaaactctctaatctgatgaatgaatgaaaattcgtgaattaattgaaaagaaaaattctgaatttgttattgccattgccattttcaatttttttttaatgcttaaattgccgtttttttacacagctggcttaattaaaaaattgactaaaatattaattttttttatgtaaagtgaaataattgaataaacatttaaaaatatcaaaaaatttacaaatcacaattaagtaatattaatgaattttattagtaatattaatgaattttatatggatgcacgcaattgaattttgtaattttggttaattattgctaaaacatttttgtgcaaaaacattcataatgaatgttatgtttggtttgaagaagggaggaaaatttattgaaaatttggaaaatttaattttgattg

SEQ ID NO: 10517 - DNA, 2998 bp, Heterodera glycines
agagtaattgcatttgggcggcaccgacagagaaatgagtgaccaaatggcgggggaaggcaatggcaccaaatttggactgaaattaccaatggcaattcgaaattagcaaaatgaaaagtgaaaagataatgggacagatagccaaagggaaagcagcagagggaaagggagccgaaggcgttcggaagagcagcagcaacaataattaatcacattctgtggggaaaagcgccaagggaagcgaaagggaagggaccgcccgattagaatctctcctctcttccggcggagggaaagaagagtcaatctgctggattatccactcggaaaaagaggcattagcaaatttatggatattcataaactgtacaatataaaaatattattattttcactttgtggggaaagcaattgtaaaaagtgaacggaagggaagggaaggcacagattgcgtgagtaaaacaacagacgaatgaatggccgaacaatccaatttcgaaaacaaatggcactttatcagcgagttcgtgggcataaaatgtccaaaatttcggcgaaggacggcctcgaggcgggcgacaactgccaacagtcgtccatgagggaaaggatcagcgggggagtgccctcgggcgggtccatccgatatcccttttcgacatgcctcagcacatcctggatgggctgaagggacacaaaatggatgatcagcaatggtcaattaattagtgccttaatgagccgtgcacttacaattcgggggtagggcactctgccaaaggaatacacttcccaaagcaaaatgccaaaggaccaaacatcgcttttgttggtgaacagctaaaaatggagcatcaaaatgccaccatgccaatgaatgccaccgatcgctcacattctgtcggagtgcctccggcgcactccatttgatcggaaactttcccttcgccgactcttttgacggctgattggccaattgagcgagtccgaagtcaccgattttggccaccaatcggtcgtccaacagcacattgcgggcggccaaatctctgtggacaaaattgcgcgactccaaaaatgccattccttccgccacgtccctgaaaagaagggggaggcaaagatggcgcggcattttctcacacgaagtcacttcaaaaaaaactaactgcgcaaattgaacaagtcgcggtcggtccacgtggtgacggccgcgggaacggagaaaatccaccaaattgccattggccatgaactcggtcagcatgtacacttcactttcgcgcgggtcctcaatgacaacgccgaccaaaaagaccaatttttcatggtgaaggccactgaaaaagtgtcaaaatggaagggatttgattaacgccaaaagattgttctcacatcataaaacgcgcttcggccagcaaatcctggaccattccgttcttcagcgttttcactgcaacttttctgcctcggtatgtgcccgaaagaacgtctgacaatgaacagaattcttttttgtattgtatttgtaatggtgaccatcatggatacgtggtttttaaatatttttcgaaaaaaatattttaaaaatgataattctttgaaaaattccctttctagagtaggaaaagagttgcttccaagaaattaaatagacattgaacgcgtttctttaaatgtgttttgagtaattcttgaaacctttcaaaaaaagcggttggagtaaaccgcgtaaaagacacacctccgaattcgccgtgtccaatgacagtgccaagccgaagatggtcaacggagagtaacagcgccgcttgctcgaactcctttttgcgctcctcaactaacaccaaatcgatgtgagttcgctgcctttggcattcctcggaaatgtaagggcacaccaaacgatggcacagtccgtcggcatcccttttgtagtgctcaaaagcgacgggaatgagtgcgtgaaacaaaactcattagcttttttttttggttgtggctgaaaaagtcgcccgttttgcatttcttaaaaatttttctggacaattcgtctaatggaatagcaatcggaaaaccaaccgaccgatacgagctgagtgagcgtgtcgaacagctcctctttgtcacacgtaaagtggtcattcaccatgtaaatcctggagattcgaagcattgttcaagccattttcttgcgatgtgtgccgacctgtaatgctcgacccgcaaattgcaagcaacgcaaagtgtgaaatcgcctgaaaattacagtcttagagattataactaaaaccaaaaataatgagaaatatgtaagtaaacaacgacttaaagcccaagcaaaacttcttccaaaaaggttttttcaatttcgaaatgaatattcttaaattacccggatagtttgttgaatttctgatcaggaaagtcccatctgcgcatgactgtaagcaccttaaaatcaaaaatttattgctcttccaaaatgaattcggctcacttctcagttttctcgcgggaaagtgacccgtaaaaccaaggagctgaaaaatgtaaaaatgatggataaagaagacaaatgggaatttgaccgtgaaaatctgcctccattctgcataagtgctctaattaatttatacaacaacaacaaacacggagttattaagtcataaaaaattaattacaaaaaatggaaagatttgaaaatttttctgtatgaagaaaataacaaatatttgaataccatttccaataggaaaagaatgcaaaaaaattcactaggactacgaatgtttgatttttttcagctccttggaaaatcaaaatgcttaatttaataatttctcaaattctaataaaatggacaaaccgtctaaggattaaactttcagcatttttgagcatttagtttatacacgtaaaaagagagagcagagcgtaacatttgatccgtgatcatcaattttaacaataatttgaccatatatatataact

SEQ ID NO: 10518 - DNA, 3238 bp, Heterodera glycines
actttgcacatgcgcagtccttccattggcacgttcgcttgtgtcctaaaaaagccattgaaatacaaaaatggaaaaagtgccgttctttgcgcatggactcacctttcagtgctgagacggcgccgtgattgcggcactgaaacgtttttgataattttgccattccttgcctttattcgcaccaacccgcgcgcactttggcgttcgttgcgtgcgttctgcgcgcatgcgcagcaatctttccaactcagcaccactcagaggcactttgccgggaatggcactattcgaagcagaatttgttgccaggggcaaagtgtcgattgattcgttggcattcgttgagctcatcggcgcgcgttaattgggctgagaatttgcaatttttatttgcacaatcattaactgttttttatgcttttccttttcccgtctcttctgtttggctttggtactgtgcccaaagggtcatttgcactgattggccaaagggaagagaaaaagggccgtggggcaattggaagaaatggcaaaacggcgaaggattgggcggaggcgggggggggggagaagggcaaccgaaggggcgggacgggcaattgtcgcctccgccgcccccggggccactcaagcgaagtgttggacaaacttttggatgtgttttgctgctgctgattttctcatcaaattcattggtccatttttttaatttagccacaaagataaattgaaaataaaagacaaattaattaatttgtcagttaaggaggagaaatcggtcaattgagcaaaggttaaaaggggaacggcacacaaaatgaattcggcaaaagataaaagaaagtgaaaacaaagaaaaagagagaaaatttggcagaatgagagagggacaatcattgactgatcagtgaatggcaaaatatcaatcgaaaagcaatgtttggcattcattggctgtcttcggccgtcgccgtttccatttcctcttctttttggtccaaccaattgaaaatgcgtgaacgaacctaaaagggaaacttccaaagaatagtcattaattccttcaccgactcaccgccctccgttccttcgtgccaaactttttcagccgtgccactacaaggcgcgcgaacaatgcgtcttcgtcctcattgttagccgttccgttggcatttgccgttccattgcctcgaccgtccgcccattccatggcatcggtccagcaatttgtgacgttgttcgctttgccactgtttgcttcttcctctatttttgtgtcaccgtccccacaaatttccgtcggtgacgaacacatagaaacgatgtcaaatttacgaacagaaattgccgagtctattaaaaatcaatcaattgttttcatcaatcggacgaacccggaggcgggagagtgccgctggcaaggcgaccccgggattttgaaacgccaaacccttgaaggttttttaaaattaatttagcactttctgcgcttttttatcgtataaacaagggtacttctcggttatgcacgtttgaagtcttagcgccaaaggaattcgcacaatgcgctgggaacatttacaaatgctaggatgtgcgagagtctcggtaaaaatcatttctcgcacatccctaacacatacgcgcgttttttcttttttaaaacgcgcgttttttcttttttagaaatttgaaggtgcgcccgcataaccaaaaagtacctaaacaagttccggtgtcacagtattcacctcgacggatgaggtacggtggctgaccgttgccactgccgttgtttcgaagtgatgtgccattgccattgggagtgctgacaaagcgatggtgacgcgtcggataagtgacgggcgatttggacgcgggtgcgaaagcggacaacgcacgacgctgatcggagtgatcattgtcaatggaagaagttgttggtgcgatcgggttgagcagtgtcgagccgagcagacggaatggcgaagatcgagcaaaaagtgaattcagaacgaattccgtggaaggttcggcggaggcggggcccaagggactcgaagccgaagcggagcgacggagcagcgaaagttcggcggcaaagtcggtatggcactgacaaatgaggagggcatgacgatgaatggcaaggcaaactaatgccatggcaagtgttgagcccacctttgctgatgggtcggcactgtgccctctctccgtgccctcctcgtcgtcgtctttgctatcgacaggtccttcttccgtctcctcctcctcctgttccattccaacatcctttggtgatgctgattgtgaacatctctgttccccagtggtggtgttcggctgttccgttccgacccctcccattaaaatgctggacgatgcgcggatcagcagttcgttgtgcagcgattggctgtgctgcggctccgccgcccctccgtcgccttcgctcgtcgacgcttcggcgctgtccgttgagaagtcgccgttcgtatcggctgaaccattttatataattgagaaaccatcgaacatcacaaattgaacttttgtgttgctgctgctgcaaaagtgcgctgctggcggccatcagagattcgagaaaagaaacggtgttgccgagttgggagagacgaagctgttctgaagagaagcgaaccatcaccaatcgacaaataatgccgaaaagtaccggcaaaatcgcctctaaaaatgccaatttggtggttggcattagcggaaaagtccgccaaagcgttttgttgttgatgagaagcgccagcggagacggatttgatgttcctgtcaatttagtcaaattaggcaagaaaattgccaagtttcactttgcgtccttcaaatagggatcgagccatgccaatttggtgaaatagggccatttcggttggatggaagtgcgcagtgccattttcaactcctttcggtaacggtcgcgcatttgcagccatcgctttttcgcaaattcgccttaaaagaacgatcaacgaaattcaaaaccaattattttatctaattttctctgaccattaacggaatcgtcaatccgtgaggcaattacttccttaaaaacgaaagaaattaatttaaacaataaaattgaatgcgcattcacccaaattgcattccgttcgccattgtcagtgcacaccttaacatcgttttgattaacattgatcatttagcggggagggcggggggagaggggtcg

SEQ ID NO: 10519 - DNA, 2115 bp, Heterodera glycines
tcattcatccgaccgtccacattcatcatcttcacggttcgttccattcccttcagttggtccttttgcgacatggtttcttgaaatcggagtttctcgtcagttatttattggtaatccgccgggggatcactcccccctcccctccctcccttttcttcaatcatcgcttcttcaactgatcaggacctgtccgtcctctcttttcttctttcctcccgggtcgcattatgtgcattttttggtaagtgcctaagagacttggatcagaaaaaacgcagcgcaccaaatttaacggcgcgcaatgcgacgcgaaatgaaacaaaagggggggggggggaaggaaccggattgcccactcattgccttccctttgcccctgtcactcccgttagctttgtggctcggtcggacaagttggatttgaccaacgaaccgaatgaggggctaacaaaacggcggataatggcacttttgcaacaaaacaaataacaatattttgaaaaataataaaggcggtggcgcacgccaccaaagtgccgaaaacaacgcgataaagcctgggggaggggaaggaacaatgccattgcgggagggagggagggaagggattagtgcttatttacaaacaatccatctaattatgtaaattattattattcagtgaaattggtttcgcaattttgtatcaaaataccatagcttttttgtgtccttccgtatttttgggcatattttgacactctctcacccaattaacaactcagccatcagtcagacttccatcctttcactatcacttccttttgattattttctccaactgaatgcgtttcgcgggccgcctcaaacggagactcaacctgacttgacagaacgaaccctttttcggcttggccttcccttctccgctaaatttccatcacattttaaagtgtcagtcgcacacactccgatcgacagaaaagggcattgaaaccggagaaaagaaagaacgaagggaaatggaaagaatgaaaacaaaacgaaacgaagggagggaaaggaggggggggggggggaattattattttgtaaagggaagggaagggaaagggatgagttgatgaaatacagtacgaacacgttcaattgcgagtgaacttttattagtaactgttgttaatgcaatgcaattgcaacaaaataagtgaaggaatgttcccaatttgtccagtgatttggcacaaatttaaattcaacgcattataaaacaaaaagctgcacaacttcgtcgaattcgtatgtccgtttgctcaatgtgtcggttaaccgaatgccagaaatagtctaaaagggagaaaagttgcttattttaatgtttcctgagagtttatgcgaacaaatggcctaagaattgcctgacgaaagtacctgcaacccgggcacaattggcaaaacgttcaatgaaagtttaaagcattggtttggcagaatgagcggaagcctccgaccactcagcgacaaatgaatgaaagtgccgaattgggggtgggagacggacgacgggggacgattgaatgggggagcgaattcatcgacggaagggacggacggagggggcgaaggcgcacttagcaaagtgagaagcaaatccaacgaacggtcactgaaaaggaggggagttttgctgaatttcgagtcatgttttggttggaattttcaacattaattttatattattccattaattaaaataacaattagggatgacaatttgtaaaaaaagatgaatatatgaaaaatgaaatcgcaaataattgaatttaatcaaatgtttttggattccccccccccctttttttttgcgcgtttcaccatttattttgcagttcaaattccgccgtgaatgcttcgttcagccgaatttccttcggactttgtaccaaagtcagttgcaaatcgtcacaatgagattcctaaccaaatttacaatttaaaaaatacccaaaaatagtctaaccgtttgttgtgccaccgtttcccaccgaatttggcccctttcgcccattgcgctgcgccatcgaatttccaatggtccgacattatttgcatttttatttttttcaaataaca

SEQ ID NO: 10520 - DNA, 2862 bp, Heterodera glycines
gattttaaataaatgattttaaaaaatttgattaaaaaagtcacaaaatttatttattttttaaacaaaaatgatttttaatgtttatttaaaaaatcaaaaagaatattaaaaattatcttttaataaaaagaactaattgtcagaaaaactatatcgcgggataaaaaaatagaataattattaataaggatgaaatttttaagttctaaaaactgccaaaataagcaggtcttatgcctaaaaaactccaaaaataaagaaaaattcttcttcttttttttctaaggtgtatattttttgtttttattgcattttgttaacaaattgctctctaattttcaaatttttcccctcagcgcctatcggcaccgccagaccccttaactcaacaattgtagtaaaaaatgatgtgccaaaaatagttctgatcataagtaagtaattttaaaataaaatttaaataaatctatttctcatttttgataaaataaaagtggattttattttagtttttttttttttgttttctaaaattacagaaaaattgttttattttactataattttttcacttggaaaaaatatattaatttttatttcacttctttgaatatatagtaattaccaaatagttttgaaattatatttttgtttatacatctctacaacatttatctttataaatttttttaaaaattatgctaaagactaaaatcattataaaaattgtcaccttattgcaacgataattaaagaaatgatttctaattaaggatcttaaaagaaataataaaaaattaataaaattataaataaaaggtttcaaaatgaaaaaatgatcaccataaaaaaacaattttgaactttattaattattgttaataatattgtaaataataaatgaccaaattaaaaatgagaaaaacttttattaaataaattcaaaatatttttttgttaataatacttttttctttaacatttctttgaatattatagtaattatttaaaaatttgaattttatttatcttaaagaaaataataaaataatcataatgttgaaaaaatataaaataaaacaaaatcaaaattgaaaaataaattatctataaatttacaaaattaatgattaaaaaaagaacagagactaattgtagtaaaaaaaaaattaatatcttttttaagcagtaaatattatgtgaaaatatttttattttatatataaaaaaatttgcattaaaaacaatattaattttttaacaattatgctatataataaaaaatatatattaaggtaaaatatataagtgtttcgggcttcgagctttgtgttaattactcaaattttggggaaaatacactctaattcttttattattatagggaagtaattaagcaaaacaaaattaaaactttttcattttacaaaaacaaaaaagaaataaataaataagccgtggcaacaagaagataattgtggtcgtattccacaagaaaaattataataatctggaatgaaaatgcacataagcaaaaatcttaaataagacaaaaagaaaatgaatagaaaaccaactatgaataaagtatgaatacaaaataaatatgtaattgtaaaatatagtataattaatatataaaaatcatcattattatactatagaattattatgaattttcagttttagtttaaaaaactaaacacagatattattcacaaagcgaagttacggcaaagtaaataactaaagtctaattcatttatctattattattattttaaataacaaattaaaaaacgggcgcgaagggcccgtttggccccaacaaaatttaaaacgggcgcgaggcgcccgtccaagcccaacaaaattaaaaaagggaaacgaagcacccgttacccctatttgatcaatcccaaattgctcggatccaacaatctcttcacaacgcaatagcatatctatttcgaaacgggcgcgaagcgcccgtccaaggccaacaaaaattgaaaaacgggcgcgaagcgcccgactgaggccgcgaagcggcctaacaagctaaaaaacgggcgcgaagcgcccgtcttgagcctcgatgtggactaaaaacccctaataattttttttaattcaaaaaatctctccaaccaattctatcaatttgaatcgcttcacagcctaggtagcgaagctcaagaagcgcgaagggaagcttctggtttgcaaaaaaaaaatttaagtaaccaagtcttgatcacggatcagacatttactaaatttgataaaaacaaaattaaataaattgaattttttaatttttttttgtttgaattcgggttagggattacgaattaatcaaaactatttttaatccaaacatttattgtattagcaaaaatcactaccatcttaaatatgactttggacaggtgacatgaaattagataaaataaaagaattaaaacacatggaaaattgtatttaaaaaaaaagaaaaaataataaaatattatacaaaaaataatattataaatgataaactggttgataattaaataattaaatgttttaaaaacgagataattaaataattaaatgttttaaaaacgagataaatatttaacaaattcaaaagaaaaaaaataccttaaacccatatttaaatttaaaataattaaaaatcgttaaaaataaaattcaaaaataatattgtaaaatataaaataataatatattttctaataatatttttttatcaaatttcgatttattttaaaattttaattaaaccgcacatgccaatggcttcgcagcgatgaagacatgagatattaagagcagcataaataacagtta

SEQ ID NO: 10521 - DNA, 1346 bp, Heterodera glycines
  unsure (1)..(1346): unsure at all n locations
aaaaccccttataaattttttttaattcaaaaaattctctccacccaattctatcaatttgaatcgcttcacagcctaggtagcgaagctcaagaagcgcgaagggaagcttctggtttgcaaaaaaaaaatttaagtaaccaagtcttgatcacggatcagacatttactaaatttgataaaaacaaaattaaataaattgaattttttaatttttttttgtttgaattcgggttagggattacgaattaataaaaactatttttaatccaaacatttattgtattagcaaaaatcactaccatcttaaatatgactttggacaggtgacatgaaattagatgaaataaaagaattaaaacacatggaaaattgtattttaaaaaaagaaaaaataataaaatattatacaaaaaataatattataaatgataaactggttgataattaaataattaaatgttttaaaaacgagataaatatttaacaaattcaaaagaaaaaaaataccttaaacccatatttaaatttaaaataattaaaaatcgttaaaaataaaattcaaaaataatattgtaaaatataaaataataatatattttctaataatatttttttatcaaatttcgatttattttaaaattttaattaaaccgcacatgccaatggcttcgcagcgatgaagacatgagatattaagagcagcataaataacagttaagaatttactgttttcaaattaaaaaataaaagtaaatcttctaatatcattttaaaaaccaaaaagagattaagcaaaaaataaatgaactagctaaataaaattattttatgaaattagtaaaaaaaaatcctttatgatcaaaatcatacttatatgcatattaaattcaatatattaatataaataaaaaggaatactgactcatgaataaagaatgattgatcaaaatgtttaaaggaatttaaaagaagaaaaaaacaattttcacatattaacttggtgcaaaatcattaatcaattattttgtaaattttgcaattcaatgtcaaaaatttatgatactcacagaaatttttttaaacaaatctaaatatcccacgagataaaaatagcacttacaatttattcataattgtgttttttctttctcaccctaaaatttcgagaaaatccctttttggaagttcatttgaaaaaatcataaaaattcataaattcaaaataaaaatcagaaatatgactttatttttaaaaaaagtagaaatttttgtgaaagggaaaaagtcaacgatattttttcaaattattaagagaaaatgttttaaccggcagnnactctaga

SEQ ID NO: 10522 - DNA, 4194 bp, Heterodera glycines
ttatcttcccatttaaattgcttaaaatttttttttatataggcctcattagtacttaattaccccacttactggaccgtatagcggaggatttcttcaccggcgattccggtttctcaacaaacaagcgcgggccggaaagtgacggatatggcccagccgcgttggctggcgcgccggtgccgccctcgtccggcgccggctccgccatcggtgtgggcggtgcagcggctggcattccgccaccgttcatgccgccagtgatgccagcgcaaccgcagccgccgcctccaccgccgccgcagcttccgcaaatgccaatcgcgcctccgttgaggtgggtgagcgtgcggagatccgggcactatagggggacggaacaaaatttcgccgccgaaatctcgtcgagacaaaatctcgccgcgaattttcaaaaaatttcaaaccaaaaatttttcaagaaaaaatcttagaaaatttgtttataagaaaattctattaaaaatgattccatcaacaccgtaggccgttgccgaatgcgatcggtggcgccgccggcgttgcgcaaccgccgcagccgcccccgggcaatgcggcgccggagccggtgcgcccgtccgcgctgcttggactgatcaacaaagcggacgaaggcttcaaccaagtgatcacccactttgagcagggcacgcccatcgaagcggcggccatcgacataatggaggtgggcgcgtgagaaattttagcggatttaaaaaatttattcgataaaaaattttttgctacaaattttaatttaaaaaacccagcaatttaaaaaaaagctttttcaataatagaaatatttattaataggccttaattacaatttggaaatttgagaatgatgtgtgcttattgaggtttaagctaatgaaattgtcaaaaaaaagtttcaatatgaaaaaataacgaaatttttctgaatcataaaatatttggcgccactgtaaaagtggccgtttttggaaattttttcaacaggggggacccttttgttttgcaaaatttttttgtgatagtcataaaaatttattctctgggttttttggggtccccgatcacgaatctttcaattattttgatcaattccgatttcctaatctaaatttgaacaaaaaatcataatttgaaaaattcaaaatttcgatttttattcgagttcgggttagggcttagaaattagtcaaaatacatgtcagattcgtgattagcgacatattgatgggcattaattcaatggaattttttctttcaaatttaccgtaatcccaaaaattggttttaaaatttttcaaaattctgagtttttaatgaaaatttaatcactcatcatttttcgaatagtgatcagcagaagctcaccaaattttgtaggggtactaaaatgaagagaattaacctattttaaactttttcatctattattggttttaaatttttttttcaaaattttgagttttccattattttattttttaaaattttttgcaagttttaattctccatattttttaagaaagtgctttgaaacccaccaaattttattgccatgttattcataaactctaatgcttatattctaaaaatggctcataaattctttaaacaattttttacgaactttttaattatccctattattttaggattatattttaaaaagttttatcgaatttaaccccttctataattaatataatctcaccaaattttataagcatactctccggtacaggactaaaacttaatctgaaaatatctcaacgcttattcgttttaaaaaaattttcgaaattctgagatttcccattatttttttttccaaaataaattaataaatattttttcagagaatgctctgaaacccaccaaattttattgtcatgttattcatgatgaactctaatgcttatgtagtgaaaatggctcataaattctttaaaaaaaattttttttacgaaattctgagttttttcttaaattttgtcccacaagaactgatcagaatcgtaccatatttttaagggtatttttaattatatataattattttattcatattttaatgccccgggagggctctattttagggaatacggtaaattaaattttatacaacaggtggccttgggcagtcaaaagttggacagtcaagctaaactgctctcccacgtggaccgcgcatttggactggacaatttgcagaggttacagcgttgggcaaacactggtggagcattggatttgctcaaggaacaggtgggaattaattaattaattaaaaatttttgaaatttttggtttaataattcaaaatttaaattcgcgcccttttacagttcgccaaaattgccaaaaactacaaaccccctccggcactggccgccatcacattgccaccgcagttggactatttgttgcaaaacccaagcggcggtggcggaggcggtggacttggcggcattggaagaaaatgaaaaaaataaataaacccccagggcaaaatatttaaatttaattaaaatttatttttatttttgcaaaatgccaaaggagtaataattccacaatatacaaaccaccacaaaactgattatgaatgaatgaactgttgttgttccggttccaatgcttttgtcgtgctgttccagcgcttaatttccaaattttaaaaccacgaaatatcataattcattttggcatcggtgccaaaatctgctaaagggcaaaaaaatgccaaaaacactttgttctagagctcggcctggacctggatccaggcctggatttttcctggacccaggtccaggtcatttttcggcaacctggatttttcctggacctggattttcctggattttgtccaggaaatccaggtccaggtccaatgtgaaaaaaaatccaggtccaggtccaggcttttttcaaaataccgagctctactttgttcatttggcatcggtgccaaaatcggcaaaaaaaagaaaggtaaaccaataatgccaaacaatttttagacatagtcccaaaattttccaggtccagaaaatcaatgccaaaaaattaatttgttattttatttgaacaagattaattaatttatttttaattaaattttctgactatccgacaattaaatcataaaattaaaattttaaattgaccaaattagtggaaatgcacgacaaaatgaccactttttttcttcacttctcttcaatttatgcatttctgcacccaatcatttttctttcacattttatttgggcttactgtggcgcttacagtatacgcaatgcatacccacgcctaccgtagtaattcccctctctttaccacagtaatctcgcttcatatttttttttcttttaaatgttgctcttctcgaaatgctgaaaatttattttcgaaatcagaattttgaaaacggcattcttgagcagcaacagtaacctctatgtacaagtcgtttgagtaccgtacattttagtacactgtatattgtcctaaaaatgctattccatccacgcaggatccaaaaatgacacggcactaaaacgtcttgcaccatttttattatgcttcattcattattaattactaattaatttatgccttcattaatgttgtattgtaccaaaaatggcgctacagtatccacgcactttgtgttttatacattttcattccctcttccttcgctgttccattgcatgagattatgtactgtatttgcgcgcttttgttctttcccatttcttggttactgtgcaatttatttccatttttaatatgcaattttcagatttcttttttttaaataattttaatgattttttaattttgttttaaatataatttttccgataaaatatttgtttttccaattttttccctccctcctacggggacaagtgtcgatttcagcagaagaatctccaaatgaatatgtatcatgttcagtataaacaaaaaatttggtggtaactgatggttatatgggataaataaaattaaaattttcaggaaaattttttttatgtttaaaaatatttacagattgacgaaaacaaattttataatttttattaaaaaataaaatttcaacatgtccaatgaaattcctttttaagaattaatttttttttttaa

SEQ ID NO: 10523 - DNA, 1391 bp, Heterodera glycines
ctgattgatcagaatcctgtgcaaaatgccaccgaccattgaatgatttggtgggggagtggctgccgggaagtctgcagcagatcactcatcccatctcacctcaatccgtccatcagtccgtccaaatcacccaaaattctcgggagacaattgtctcgagaatatgtccgtccgtccagccagcacttaaacgcccacacaacacatccgccacccaacatttttccagctcattgcaaccagctaactcatccttcttctgccgctgtcgctggccattccgatcaccaaattaaacacttaaccaaccaaatctaagggccaatcgctcaaaaatactcaaaaaattagtggttttcttgatagaaatgaaaaaaagaataattttttattttgtaatgaaaaacggcaattaatgcaattcaacacatatatttgttcttactattttttttcttctttttcccaactttggttaaaaatttccgtgtcagccccccttcattcgtagcaatgcttttattttttggacccgctttttcttgaacgtggcgctcattggtccgaaaaacactctaatagcctcacaattttcaaaaaatttagcttatcaaaaaattgttcatttttattttcatagaatccattaaataggaattttttttttaaatttatacaacactatcccgtatataatatgtacaaataaattaacgaactcaaagttttcgaaattttaaaagaaaattagcacctaaactgtgccattcattctctccccccttttctgtgccattgtttgaccacccgtgccgtgccgtctttccaaaaccctctcattttttggggatcacttttcgcctaaaccaaacgcatacattcggcggcaaattcaacaagcacatataaatgaaagaaagaatgaatggttggttttgtgttgaaagcccacccccgtccaatccctggtgttgtacaaatggaataaaatgtgcaaaattgagaatttgtgcaaacaaatgaatgaagaaagggcaaacggtgggccccgcggggagagaattggggcattaatgggcatgggaaagcgatggacaaattttgagaataattttttttagtgggggggaggtgggaattattattaattctactgatcaagaccggaataaatagagcagctattttcttttttacatggcttcttggccgagcaaatcaaaaaatggttaaaaaattttatttccgatagaaaacattttttttggaaatttttattcaaaatgataaaaaactttttacaaaaaaatattttacgaaaaaaaagattttactgaaatagaggccccggggtctttttttttcaccctcctcaaaaggggggcttt

SEQ ID NO: 10524 - DNA, 1552 bp, Heterodera glycines
cgcttcgcaacaatagccatttttagtcgagcctattttttcacgcaaagttttacaattacatttttatttgttcattttttggttctcccaattttaaatagtatttaatttttggaatttttactaattaattatttatttgctatattccccatttattttttaatgaaatttttcatatttttttttataattttattcccttttcaattgattacaattataaataagatttaactcctttccccccccccccaaattgacatgccaaattggaatttgatactaatttaagggccataatttatgtaaatccaattacctttccatgtacaattgtacttttttgacctcatttgttcttttcttttcatttttatcctccacattttcattattttttatttattcattaattctttctaaagattttttcgaaaaatcttttttaactttattttatgaccaaatttgccataaaaaattctgatttgccattatctaaaaataatttgtttaagctattgaaaaatatcatttcgagaaaaaaaattttagcagtcagtctcttcttttttcattattttttaagcaattttttatttaaccattctttttttatttattttatagctttccatttccatttccttttactttactcttttttctccatttcattttcctcttttatgtttttccaacttctctttttttgttattcaatttttttttattaattttcctgttcctttcttctcctccatttcttctcctcatctccatcgtttttccaccttttctttctttcctttttgcttttctcttttagcaaaaatttgcgccattatttatgcaaagtttgctgtgtgtcccatggaattattgcacaaaatattatgcaagaagagctaaccactgacaatgggaccgatggtcacacataattgggggccaattccaggtcaagctaagctaacaacacattccctgtgccctgtgaatgatccccaaaatttaatatggaaaatttgcataatattcaaatagctgtgccatttatggtgacagtgaatttcggcattgtggccaaacacaaggccaagaattattatttcatttttagtttttttatttgtttgttttaagggtaatttaaaactcaaaaaaatatatatatttaaaaataacaaaaatattaaaattcgttttgtaaatttattaattttctaataaatacttctttaatttaaaaataaattaatcttaaattatgtgcgtaattggaaaaactggtcggaagtttagcaaatttatttctaaacaaaatcatgggaaatatagtccttaggcttacattttttcataataagagtttagcataacaaaattaatttttgaagaatattatttttatccctcaaaatgcgcgtaatttggcctaagaattcattaattctttggcctattcgctgctaattatgctcaaaatctaaagcgaattgagggataaaccatctgcctgccgggtaataattagcattgaaca

SEQ ID NO: 10525 - DNA, 1751 bp, Heterodera glycines
gaattcccattttatgctttctaacactgcctaagcttaaaatttttaattttcaatttagaaattaagggaaaactttgaaataaggacatttgggaacctggccctaatggtaaattgatcccaacaatgaatgataatcttaagaaaattttaattttttatttaaaaattatgataagcttcaaaattaggacaggtgtgaacccctgactcataaattgcatcaattattagcgaatttgtccttctccagtccgctaactggaaagaagcaattcaggcttttttttgaatatttaactttttaagaatcggcaagttgcaaatttaaaaaaatgcttgaacttttaaagttttgggaaaatttcaaattttccctccaaaaaaataccaaacccaagccaacattccgccgaggtgaaggaaagtttagcaaatggtggtggacacggctgtcacaatgggcggacgggggtgtttagcgacggtgtgtcacccgcgcctcttaaaaatgctaatacattgaaatgacagccgatcggagtcgtccccccccccccctccggcgattaatccccccccccggtgctccaaccgaatcgacacacacacgcatttcaatgcacaacatcgaagatgacataatcgttttaaattcctttttttcaacagtttttatggttgaaaacaattttcatatattttttattttactttaaaaaaataccctaaaagaagtaaagttttttggtttcaaaaaaaagacttttaattttttttaaataaaaaagcacaacccgccccctccaacaattagtctaattcatctttgcaacccattaattttgtcggttagccaaatcgaccttaaaaaattaattttgtatatttaatgaaaggattaaattcatttttcaaatttatcatatttttaaaaggaactttcagtagctgaaaattattataaatttttttttaatattttctttgtttttatatgaagaaaaataatttattacacaggaccaaaagctttgtcctcgaaattttaaaactttttttttaaatatttaaaacccaaatatttgccataatccatcattacaccacattcatttgtcataagcaaaattaagtaataaaacaaataccccatgtttttttgaagaagagacagaaaaaatgtattgtaaaatttaccaaaaaagcccaccattttcattcttaatctcccccattataatccttattttccctaatttgtcttctgcctcccaaattaggcaaccaaaacaatgtctcgagagtcaatggtcgagaatttgagtgagtcattcattggccgatggggcagcaaattccccgctcccccccccccccccctccgccccgctcacgaaaacttcaagtgttttgtccacgaaaagcaaagggcaaaaattacattttcttttctctaacaaatagaaaacaaatttggcctttcatctctaatgaggagcaaagaatggccaaattcattgtgctgcaacaaaatgccaaatgaatgaatgccattttcatttcgaatattcccccgggggccaatgccgccgccccccccccctaaattgagaggaaattgctcgatttcgtgcccggtcggagactaaattccggcacgaaattccatgtgccaaattgaaaactagcagcccatggcacattttaatcggataagggattgccattgttcattttatttattg

SEQ ID NO: 10526 - DNA, 4260 bp, Heterodera glycines
cccaggaaaaacaaaaataaaatttttaagtttattttctgtcaattctacacctttgccggtagtgtcccatcagtagaagttcaaaatgtcttcctcctcctcctctccattgttttcttcattgttcaattgtgatgattccaacctttgtttccccgtccattcgtcgtccgtccattttttgcgttcgcccgaccatttttacaacacattactggtccgtttttccgatgtatttgcaaatgttttttaattttggtttcatcaaatccaatttcgtgattttctcatttcgttttcttcccccccccatgtgaatctcgaaagattttaattttcgattttttgttcgaattcgggtcctggattcagaattggtcaaatggatgtcgggatgttaatcagcgaccccgttaaagccttggaaacatttgcaaattttgcaatggatgcccctccaatcctctaaaattttaaataataaaatttatagaaattcaaaattaggattttccaaaaaaaatttaatagtatttacggagccccgacatttgcgtctatgtgcagaaacactaaaaaaatattaattcatatatctaagaaaatttttctggtcattttttattgtttttaatgcccaaccagccataattcggagatttggcccatgatttttctatttgcctttaaaattcccccgctttttcagcaacgcgttgagtccgcaaagcgtcgcgttgtgctgtccgccctctatttgggcaccgacgcgttggagcagcgattggtccatcggttggcggtctcggcaaaaactgtggcgaccaaacgccccgtcaaagttcgcatttttgctcgagtgtgtgtcgtgtcgagggttggaatataattttaagattaatatttgtttttacatacgacaaaaatcgcaactctactgattcgttacaaatcaaaaaccctacttaattaaaataaataataattaacatttttttatttgttttatactgaacaatttattggcaagaatatgttaaataatgattaaatttaattttccattaattacatttttattatggtcacgaaaaaaacaaaatcgtaaagtatatctaatttatgaaattaaattaaaattgtttcggcaatattagtattcgttccgagagttttgttgaagtccaaatcagggctgggcgaattcgagcttagaaaacttcgcgttttttgggcttcgaacctcgggtaatttacccgaaattttgggaaaaatacacctttaaagatcgagcagtcccccccccccctccaagtagtagtgtttcttctaatttttaaattattcctttctcgatggaaattcactacaaatttaataattccgttagaattttctcagttgaaatcaaaatcaaacttttacataaacaaagtataggcaatattctgaaaattgcgcataaatcttttaataaataaggcccaaattccaaaatcataaaagcaaaaatttgttaggaaaagcctcaaattattaattttttaaatttatagaaacttttaatcaatttttttctcggcttcgcctctctggaaattttcgatctctaacaacataattattattatttttgattgcaaataatttttaccacccactaaattttgttagggaaaaaatattttttcaaagacttggtgcttcgaaaacttcgcgttttttggatttcgaacttcgagcttttgaaaaaaaaatgagcttcgtgtcgagcttctgctacatgtgtgaaaacttcaaaataagatataaatgaattaaattgttttttcattttgggttgatttttattttaaattttaaatagaaaacaataattctcctggctaatttcttcatttgcatgtcatttctccacatgaacaatcagcatcatatttcaatagaacaaattatttgaataattatttagaaagttatttaattaaaatgcataaataatcatggtctatattattttgttttaatttagccacttttgtgtaaatctttttttgttttaattgcatcgaattatgcttaagagaagttgatcagttgtattctttttatacaaagggttattacaattaatttttttattaatttaaatttatatcgataatgtttatttaaaaggaagctaaaatttattttaatatattcatactttttacaatattaaataattctcttttctttgtcaaaaattatgtaatattatatttatagaaatttagtcaatggaagtaaaatttccatcatttttagatgtaatttttagtaaatttaaatatgctcattttaatgttagtttaagtgtttcttcatccatcaaagtaaaaattttcttgttttatttctcatccatagtttcccttttttatgcatttcttattttaattacatatatctaatcaaaaaaatcttttctaactaattaagatattctttcagttcatcttggtcagccaaatgataataagaatctcaaacatgctgtggttttcttacgtgctgggtcgtttcttaaaaactgccaccatgggcgtttcttaaaactgccagggcgtttcttaaaaactgccaagtgggcgtttcttaaaaactgccaagtgggcgtttcttaaaaactgccaagtgggcgtttcttaaaaactgccaccttgggcgagaattaaactacaaattaaaacaactatatagaaatattttatctaaattttattgatataaagtttgtaaattaatatatatattccagtatttcttttttaaattttcttattctttaaaatgttcaccaaaaacatgaactgacaagcataacaaattctaaaaaataaactatttaaaatactaataaatacagacttttgttaatgaacattcagcactttcatacaaacatttgcaaaagcttttgtcgcaatcgtagcgttttctagatttgtttatatagcataaatcatagtaataacagcaatcatcgactatatcatttaaaaatttataataaatttaaatttttttaaaccttttttaaagttgcaaaaccatattactggtgctataaagcatgagtcaaaacatgaagtgccacaataagtgctacaatatttctttgcaactttcaaagggaaattttaattataataagcttatcagtaaaaaatttaaataattaatttatcaagaaaaaatattaaatatatcgttgagctcatttgtaaattttattaactacaatcatcagaagcaataaatttattaatattttaattctactgagcttggtgttgaagatagtgttgacaaacaaatgatgtaaaattatatatatatatatttttattatttataacgttggcaaacaaatgatgtaaaaattatatgtatatatatttttattatttataacgttggcaaacaaatgatgtaaaaattatatgtatatatatttttattatttataacgttggcaaacaaatgatgtaaaaattatatgtatatatatttttattatttataacgttggcaaacaactgacataaacattttttaataaataaatatatttgttttgcagtttttaagaaacgcccacttggcagtttttaagaaacgcccacttggcagtttttaagaaacgcccacttggcagtttttaagaaacgcccatagtggcagtttttaagaaacgcccacttggcagtttttaagaaacgcccatagtggcagtttttaagaaacgcccacttggcagtttttaagaaacgcccatagtggcagtttttaagaaacgacctagcaccggcggcaattgccccccccccctcccccaccccaaaatgaaaagatttactaaaaatgaaggtttgtggatgcttccagggtaaaaaatgaaaatttctgatataaaataagtcattctttgaaaattatcaaattttcctgacgaaacataccatgatttaaaaagaactttttcaaactgtgcctatcggcacctccgaccattaatttcctttgttttcaaacaaaaaaggataaaattcttgtcaataatatatcggattgtcccactaaaatttttctaatggctcatataatcggtctttatgtaaaatgtatccacccattcttttttctgtaggtttcgcgttgcactggtctaaaaattgctgctgatgggcgcattatcactttgtctcgtc

SEQ ID NO: 10527 - DNA, 1744 bp, Heterodera glycines
cctcgctcagttggttggagaatggaaccctacactctccccactgttcctggctttggaaacattctgccgtgccatccttcagctctgcgtgactgaagggggcgaccaccctgtcttctcccgccccgagtgtcgccgccgataagcgcgacgaaagatcaaaggaaagagatgatgattaatcaaaatggggacggaaaatcatatttaagaaagcaaaaagagagcacttcatcattcatttgatcattcaattgtgcaaataaatttgttgaatcattgggaaattcgggagaaataatataatttaatattaaattggttaattcctaaggcataattccttagaaggtcgaattaaacaaagagtctcgacagtcaaattacggatcaaaattacggaaaaatcccaaaaatccgtaacccgtaatccgtaatccgtaactcccaaaaccccgtaatttccgtaatccgcaatccgtaatccgtaattgcgtgcagccctggtctggatcctttaataggacatggggcaggggtctggacccttaatatgacaagggacatgggtctgagggtacttaatagaacaccccggacccgaattcgaacaaaaacctgaaaatttttttatgaggttatatttttcatggggtaaaagctttcaattcatttaacaactattttttgatgtaaaacaatgcttcaatagttaattggttaaaatgtctattttcgcacaaaatttgaccgattagagcttatattttggaaaaaaaaattataattttgttcgaattcgggtacgcggttcggaattgggcaaatccgagttcagattcgtaatcagcaccctcgaaaaccccttggaacttaatttgaatccaaaataaaaaaagtgggaccacaattctttaccattgccagattttttaaattttgattaattttgataagttagcataatgttttacaattatttaataatttgggtttttaatacatagagcatcagaacgaaacgaaaatagaactaatttttttccaaaaaaccacaaaatagaatttcttactgaaaatctgctaaaaaatggtcaaaattcgcccataaaaatcctttattttcttaaaaatttgctcaaaatcgcaaaatttggtcatttttgtggtcaaatctgttaataaatcgtattaaaaatcacaaaatttttcccggcggcgcctatcggcaccgccggcctcccttttccccaagtttttttttgaaaaaagcgctgcaaaaaatcaacttcgatttttcgtgctcagattttcacaaaatgcttatttctaacaaaaaaattgctcaaattgatcatggaaaatcaaaaatataataatttgaatatttttaatgtgttttgaataaatttgtaaaaatgaggctttttgacccaaaatgaggcttttttgcctgccaaatggtgatgcgacatttgcgccgcgccatttgcgcccacagcaaaaatggacatttgcgccgctcagcaaagtcgacacttgcgccgcgcaatttgcgcctcagacagttgcgccgcggatatttgcgccgctccatttgcgccgcgacatttgcgccgcctagtaaaaatggacatttgcgccgcgcagtcaaaaataatatttttcatttcaatttcactaatatcaataagattactaaaaaccaacgacgaaaataacgaagtgaaaaatttcaaaa

SEQ ID NO: 10528 - DNA, 1300 bp, Heterodera glycines
  unsure (1)..(1300): unsure at all n locations
ttgctgacaaaggaaggtctggaggtgtccgtggagtttcggaatgaaatttggtgggtgcataaactattcgtaaaggcagtaacccaatacttcgaggctttaaggttaataattttgttttctccaagagtattattggcagcaatggcccattttctgaggatttggtcagataaactcaaattcattgaaattttttcattaaattgatttttcacatggctgtcaatttgttttagggcttcaactttgcatttaaaatttgtttcaaaccttaaattattatataaaaattaaaataaagtaattttacctccgaagcattttcagatcagattcatttttgataaatcgaaatttcgatctcatgcatgaaagtgatcggtgccccctttgtggtgaacgataaaattccagtgcccttttcttatccgaatatgaaataaaatctgtttttggcattttttttccggagaagggaaaaaactcgatccacttgatttttctgaaataattttgttaattagaaaattatttttaaaaatttttaaatgaaaatattttatttctgaaaaatcaaatggacctgaacataatgggctatcaatttcctcaatttgctcatcggaatcttaatcaaaatcctcaaagttttcgccatcaatttcatcaaaatttgcgcaatcgtcaatgaccaaatcctctcgtaattcaatttcctcctcatttttaatgcacctttcaattgatgctgcaaaacttttggccaagaatatttcatgctcgttggttggggtttcctcattatatttagaaaaatatttattgaggagggtgagaatattttagggatttatggacattttatttaggaacggggacgaaaaataaatttttgggtgtgagtgggattgattttttggccattcaattgcataaaagcaaaaataagatgggggaaattaatttgcataagagggattcgaacctgtgggggcaaaaacaaacgccaaacgcacaacctccgcaccaccgaacaacacaaaacggtgcaaatgtttattcgatttattgggatagaaaaaagtttggcacgtcatatctcggcactcgtactcatttcgcagaaaataaaaccacttttcttaagaacccatgggtgctctatgcacccaccaaatttcattccgaaactccacggacacctccagaccttcctttgtgagcattttttggcaaataaaaagagaaaaaccaaaaataagtgacaaggaaattggaaanaattttgaaaatt

SEQ ID NO: 10529 - DNA, 4794 bp, Heterodera glycines
ggagggaatgttttccgaaaaatttcggaattccgaattattttaaaaaatttttaaatgttagaaaattttaaaaaaagatgttttttttttaattggaaaataagtttatacaaagtcttaatgcgtttttaaaacttgcacaatttccttagcgaaatctatacaaaattttaaaatttcccccccccccctgtccccccaaaaattttttaaaaaccacgccgcaaaaaaacgtttttttttttaaaaagtcgtagacttgccaaaacatcgcaaaatttggcccggaccaccctaccccttcccaaagagttttttgaaaaacgcgcagcaaaaaaaggtttttttactttcttttttttctaagactttcgcttcgaaaaataatccatttaaaatgtgacatacctacacatcaaattagtgtagtggattatccaaactgactccattaggggtcgattaccgtctctgatccctgacaaatttttgccggtttctgggaaaaaatatatttaaataattcgtcttactcattccccaacgatttcgcttccccgtcctcatccccgttgtctcctccatcactgatgctttcggattttcagaaattcttgtcgcaaatcaaattcgcgacattccttggccgcaaaaaaagccgttgtaagagaaaaaatttgttgatttacatgactggctccgacacccctccccccccccgacttattcttagattttgagaattttgtattgagttttattattttgcccaagaaggtgaaacctaagcgtcggattctgaaaaatgaaaatctttttaggaaatttgaaataatttgttcaattttgaatttaatcatttttaaattttcctattagtcaaacaaatgagatagtgatcagatttcgaatttgatgcttttgaggtggtgtcaactccgggaacaagcggcgccacgggtgccaccgctgtgtcacaattcattgaaggtactaacgtttgtctttgacacttcataaaattaatcgtaattgtgaccaaatttaaatttagaagacgaggaaaaatgtgcaggttgtgccacagcatcagccactgtacgaaggattgcaacaagcgttgaatcggaagaattatttttattatcatttgtgcgtttgttttgatgtgttaagcataaaaatttttcaattttttcgtgcctatcaaagtgcctttttcacgatttttggcgcctaaaaatttttgaaattcttttttttaaagggagcccactttggcgattttttgaaaaatttggttttttacaaaaatgtcttttttggcactcaaattcggtaatagtatggtttacaggtcccacaaaaaaaagaggcaaaaagggggttttatgcaattcttcaaagtcctttagggttctcgagggcgctgatcacgaatataatattcatttcgaccaatttcgaaccccgaacccgaattcgaacctgtaaaccatactatcactatgggtcaactccactgtgagcctagactatctcgtcgtttctctttttctttgtaatttctctctctttggcgtactatctcttcatttaatggtgtaaaaaacaacatttacttttctatgtctagctttttttctctatgttaaatccgcaccaaattttgcatagcgatagagaagaaaaatctgcatttttctatactgattttatttttgtttatactcccattcaaaaattataaataataataaaaacgtatttcttttttctctcgttttggcgcactattttcatgtctctaacacatgaaaaaacataaattcgaaaattctaataattttggttataagggtacaaaatcactttgaacatttagaatcaataggaaaaagaataaatttagcattttggttagaaagagtctgcctaggacttgagttataacatgataaaagtttgaaattcccacaatcaatatggaaaattactgaatttgaatttattagtacgaatattttggggtaatagcaagggttgtcccccccctccccaccttttttcaaaaaaatgattttttttttgaaattcatcaaaacgtctttcctggggttttcagggtcgctgatcaggaatatgacattcatttcgaccaatttcgaaccccggacccgaattcgaacaaaaagtcaaaatttcatttttcaacaaaattcacatttatcttccaaaatcgattcaaatggatggaatggcaatacaaatgcgttgaagacatgagaaaagaagaaaacaaacattaccagattggggcggaatttgcgtttgtatgtggaccacataccctcgatgttttgggtgtgaacatttgggtcgttgggattaaggaaattttcattatggtttactgtacgatgtttaatttttttaatatttcatccctaaattgcttaggacatcgcgccgtgcaaagattttgacgccgaatatacggaaacgaacgaatggatggaaattttggcttagccgcaatacgacaatgtgagagaatggggagggtttggtcttctgatcaatgcttaatttagggatatggtaggtcaaacaaaaatcattattaatcatcaaacataaaaaataggaccatgtcaaaattatattttaacaaatttcaatgggctatatgcacagtaggccaaaaattgcttgaccaaacactcaaaaaagtaatacgataatgatttataataattcggctaataataacagtcctttttaggcctactcttttttaaattctgcccaaataacatttttctcctcctgctcctaattttgaaaaatagcaatgagaaaaatttttatgggctagagaaaaaaagtcttcggactcccttctctaaattttttttgttctcttttgttggaattccagaaaaatatttcattctttttagtgttcagataataagtaataattttattatttgttgattggactaatttaaccatcccccgccccctcttcgcccgaaaatggcccctaaatgggggatcccttcgcattccccatttttgtgcattttttggcacattgattgatcatcccccatttttcatgcgaaaatatacaaatcggtggttaaaatctccgagaattcgtagatattacttttttagagaatgctccaacaaattctgcgtgctgcaattagtgccattgctaccttagcatgcaaagtgcccgcttagcctcattaaacattgtaccatcagtgaacgccgtcgtttcgtcgtcatttaaaatttgttcggtgttgattttgtgccgaaactgccctttattcataatttaagcaaaagaagtctaatttaagtaattccatttattttacgaattgccacccgtaaatcatttcattaatagaacaatttatttattttccaatttatttaataatttcatctcttcacaacaggattttggtttcaaataatatgtaaacagtttgtttaccaaatttgacaaggcaaatcaccgcataaattattgacctatcaatttcaattttccatttaaatgcgaatgcaaatcagcagaaggagttaagtcagtaatgaatcaaaatttactgaagaataaattctttcactttaattgatttttttaaaaaaatgccttttttcgaagtttttttttggaataacattaaaaggaaatttggaaaatgagaagaaattgatttatattcaaattgattgaagttataattttcatataattattcccctataaatgaaataatttaaatttttaaataaagaagacccaatgttttattcttcttctggtttatttttattattgtttttttcatcaaagtttgtttgaatttcttttattataaataaaaatgataataatttattaagctaaaaatccgaaggtgtcgaacaattgccactagagttgtacgggaccgagaattttgagaaaaaccgggaccggtacaactctgtttgccatcattggtaaagccagtgtttattaaagaaaggagttattttttcctgaactagtgcggagggcggctttgatagaattactttggctggcaaatacgtttcctgcacttattgaaactatttaaaaaactacattacaaattcagtttttctttgagttcggttaatggatttgtttggatttatttttggcacaaatatacaatttttagacgcaccaccggtactgtaggctaatcaaaaaatagggtagctaaataaaacgaaaacccgtaaaaaagtttttcatttcgatttttggtggttggaatttaaatttaaaacaattctgtaaattccagacaaaatatttgttggaattttttttctttcattttcgcattttttaaaaataaaaagaatataattacaaattcctattcgttaatttaaggtgtcatttgaagtttaataattaaaatgcttaagtataaaaaaccagcaatttatggtttgttaaatttttccgcattcattcaaagcaacgaaatgaataaaattttcttattttaatggctataacagcttatatatttgaaaaattgaagacaaattatttgaaataagtgattctcgcaattaaggcaccaaaaagcgcaaaatggcactgaaaaaaggcacaaaaatcccgaaaaaggcatgaaaaaaagcatttaaattttttttattaatgatttttagggagcaaaatacgtaaaaactaacccaaaactaaatttt

SEQ ID NO: 10530 - DNA, 4323 bp, Heterodera glycines
ccactgcagcaaaatacaaacactgatgttttatcataaaacatttaaacgcattattgcctcataaacactaatgttgtgtaaatcaagtaatattttgttaaattaaataaaaagattaaaactcacaataaaagcaacccgaagtcaatttttcaaaacagtccgcaatctttgaagcacattgaacaactgcaatttttgtgaagttcataaccacaaattcgtacggcaaaggagtatggtaaacagaaccatcaaaacgctcaacaacaaatcgttgagctttaagaatcgacattttaattacctaaataatgctaatatatcgtcgatacaacccaaccgtaattacttatccaagcgaacaaatccttgaaaaattttctgaaacctttttgaattcagtaacagcaatgttttcacaagaagcacaagtcatcaaagcggtcaatttcttctcagatggcaaaatgcttacaatttgtccacaaaaaaatctgaaccaatttgctttaagcaaaaaatcagtcataacttacgcaagttgcgtgccacatggaattgctccgagctcttccaatgtactaagcatttgagataagcctaccggcagttgtgtcagcagaaatgcgaaaaaataaatagccgaccggcagttgcagaataaatatttaaaaaatacaaatagttctgctaaaaaattaaaaaaaacgaaaaagcataaatgaagcaaatacaaacaaaaacaatgatgaaaattcaatttttgaatgaacaacaaaacatgcattaagattactttttaatatctgaaaattcaattagactgtaataaaacattgaagggaattgaagcactgatgaaggtcgtgagtcagtgacttcatttcttaaaagaataaaggtctcaaaattacaacaacgatacaacatgcggaaagtcagtccaacaaacatttgtctttttcattcggtgttttacgttctaaagttttgcatatataattaggcatgagaaagcaaaatcctaattccaaacaaactaatcccggcaacctgacataacataaactcagtcacagcaagctgaatggacgacagttgaccgacaggtagatttagttgcatgcagaacagtttcaaaaaacactgaatggccgaccggcagacagtgccgggttttaaaaaatattgccgaatcggcagagcattaatacaataaacctgtagaaaatgaattttaaaatcaattcaatttagctaaataacaaataaacaaaagcaaagcataattattagggctgctaattttatgtaagaaaatttgcgaattatgtaaataaattcatttgttaattgtgggaaatgcctcgtagaaactccaaaataatgtaaaattgattgggctggggattggatggaagataatcatgatcattcaacacattcaacggaaagtagttcctaaccatattcagaattcgtctatctgctgccaaatatttgcctcgctttttctcaggtgacaatccagcgatcgcagaattgtatttgagatcggtgattttctgttcaagtcgaagaacatcaatgaaatgccacaacgatggatgacgacaattgaacgcgccttgcaaacggtggtgctccgcttctgcgttgttgttcgtcctcgcatctccatccaatgtccgttagtagacggatcaacggttgcgaccacgtgccattgggacgaggacgtccaacataattgtccaaaagcctaaaaaattattctaaaattctgaccaatcaatgagaggttgaaaagccgacaaatttccaaattccatgtcaagtgctgtcactgcattcctgacatcacaaaatggaacgaaagcgactgatgtgagcatccgaacatttaaaggaaacaccggatcagcacaataacgcttaaattttgaaaaaatttttaaaataaagggaacattacctgccataagccttgctgtttcactttcgtttgtaagttccgtataaaatgaaaaaagcaaaaccgaatctggcatccgggaaaggttatcgtaacggcatttgacatatccatttcaaaatccacggaaaaagaagtgggagcaaaatttggcccgctgcacgcaaaagtgtgaacattatttcgcacgatgtttgcttccgtccccaaaacacgcatttattctgtccgcaaaacgccaaaatgattggcgaccaaacaataaaattctgagaaaaaaatttttgcttttttttttgcaaaattaccgttgcgggttttgatttccattttcgaagtatacaccggagtggcccaacaaaacagctcctcaacgccatccgtcgacgtgtaggtcttgtatgcttgggcgatctcaaaattcaaattggtcgggactgctggtggtgcattgatttcgtggctcgcccttttgattaactaaaataagtttgcttgttagtttttaatttgttaaaaattcgtcatacgtatttgaagcatttgcggtatagtgtgtggcgttgcgagaccaatgaagtgcttgttgaggtccgtccaattagcctttacatttgtttacgctgtccttgaattcgcacctacaaaattttgtcgttccattttgctcattttatcaaatgtgtaaagatgttcaccgtgagaaagcttcactttttgtttgtttgtttcagtgtgtgaagccatattcgatgaaactgattaactaaatacatttgaaaatatgtaacgcgtaaattagttattttctagagcctggaaattcctagaaaatattttgttttttgatttgctgattttaaccaagtatttgtatttttataatttttttggcgccgaaacgcaaaggcataaaatgtatagcattagttattaatagggcttcgtttttaggcaaatgcctaaaatttttgcgcacttaatacgcatagataagcacgaaaaacgcgttttccgctttgtttagggtgtctacgatgacttttataatgcctattttggactttttgtgcttaatgactatttgcctatttttgtgcctatttcgccatttttggcgcttttttcagaattttcggaaaaatccataacaacaatgaaaaatacacccctaagaatcgacttgaaaattttttagaaaatacacccctaagaattgaaaaaaaatttcacaaaaattgatcctcgaaattcaattattttttcataataaaaatttttgggttaaaaaattatttttatcgaaaacaactttaaaacaattgaaatataagcaaaataggttttttgattaatttttagagttttgctacctaaaaagcgttaataaaaaaacttttttgcctattttagtgcctatttgatgatttttgtgcctatttaatgcctattttgcgatttttaatgcttttttaggtgcctatttcgcgattttttgtgcctaaaaatcgcatccctattaatcacccatatcaattgcgcgattcatctccctccattcacagcagcggcgtctattgccggatcctgcgcaggattgcggatttttggaaattttgaaaaaatttcaattaaatttaaaaaatttccaaaacgataaataagtgttccgatatatttttagacaaaaactggtgaaaattaatatgaaaaattgacatcaggaatagaatgaacaagcgcgtcctcatacctaatccatatgtatattataaaaacaaagtttctgtatattttgcattctgtcttagaaattttttttaaaaagcaataaaatcccgcataatcctgcacaaaaattcaaatttgcggatcctgttgcaggattggaattcaaaaatgtttgcaggaccggatccggccggattaatcctgcaatcctgcaaatcctgttttttccaaaaaatgcaggattgcggactgggatcctgcaaaatcctgcgcaggatccggtcctgcgccgggctctagttccagacatatcctttagctaattttagtaattactaattaccctcaaaaaatgtcgcacaatcagaaagaagcagagaaagaaatgtaaaaagcgatgcaataatttaaatttggctctagtcggttttacgcgtcccatcatatttaatttttttttttattttcatcaaagtggcgaatggaagattgattttttttaaatttgtttacgaatgatgtgagttctttcatcgaatttaaccaattattttagtctgggcctttttaattaaagtactcagccaagtggagatttgaatttcgttctc

SEQ ID NO: 10531 - DNA, 3935 bp, Heterodera glycines
attctataaattcatttttgatatttttaattaattcttctattgacaatattattaagaaaaaatatttgaattacctttttaaaaatgtaaagattaattttatgataaattttatttatatatttatttattttttgataaataagttcacttgtaataattattttttaaactttttctgcctttatgtttgacttcgaatttcatatataaataatataaaaatcaaataataaatagatttatattgatatttatttatttattttataatgttttaataatttataaatttataaaatattatttaacaaagtcgtatctaactttaggaggttttattgtgtggagactgtataggttgtgcacataatttaatttacttttgggtatgaaatggccaaggccaaaacatgcttttaaaatatgaagtacataaataaaagtttttcaaataaatttaataatatcatacttttgttaaatataaattaattgtaattgcggtttaaatattagataattattacaattttatattatataataatttttaattgatgttttagaagttaccttagattttgataaaaatttatctaaataaatatacaatttaatgtataagaatttatgcttatttttcatgttaaaagttttcagtatcaaatatttaataaagtataatattgtcctggcattaatagtcctgtttggttccatccatggctttgaaagctttgtccttgcaaaatgttgcgggaactactttttctcgttatatttagaaaataattccgttctataacttttaaaattaatgttaaaatttatttatatttttaattatttctatatgatttatattaatgatatggttattataaatctcttatttacaatttttgctcgaagattagcatggcccctgcgcaaggatgacacgcaaattcgtgaagcgttccaaattttttattcccctctttttccattcccctctttttccattcccctctttttccattcccctctttttccattcccctctttttccattcccctctttttccattcccctctttttccattcccctctttttccattcccctctttttccattcccctctttttccattcccctctttttccattcccctctttttccattcccctctttttccattcccctctttttccattcccctctttttccattcccctctttttccattcccctctttttccattcccctctttttccattcccctctttttccattcccctctttttccattcccctctttttccattcccctctttttccattcccctctttttccattcccctctttttccattcccctctttttccattcccctctttttccattcccctcttttttccattcccctctttttccattcccctctttttccattcccctctttttccatcaaaaaaattcaaatcgataattcccacaataattatcctcctcaattaactataatgagcaaacgacttcgcagtgaaactgacgaacttctttctgccaataatcccgacctttccattcttgaacaacgaatgtcacgactcgaaaatttgcttgagaggcttttgccagtgggcgtgggtccaattccagaagatcctatccagcgccttgaaaagcggatggaaaaattggaaaatcaagtcacggcacttgttctggcactcgaaaaacggccaatttctcaacaacaacaaactccatggggttgtcccccggaccacatcatccggcacataaatgctgttgttttggactctgacatcataagagaaaagtcaaaaagagctgttgtggagaaactgcctgagggaatcgatgaaaaggacgtggtcaaatcgattgctgaaaaatgtggtgtggctgatgaccttattttggacgaaatccatcggcatcccgaggaaagaagtgagtcgaccagccaaaacacaagaaaacccagaattctcaaaattccattcgcatccactgaatctcgtgatatttttctgaaaaaattccgtatggcactctccaatttaccaaattttccaaaatttctgagtgccagacgggatatgactcagtccgagctctccattctttacaaccttcgctcccaagcttataattcaaacagtagctgtggacttttttaaatattatgtgtccgatttgacgattcgtgaatttgctaatcccgaaccctttagaactcgatacgaataaccactaggggcgactgagcgaaccacctaaaagtttaaatttaaactcgagaaaaagcaattagcaaaatgccttggattaattccatattaataaatgcccgttcaatcgcaaacaaaatagctgatttagaatatctaattgagacaaataaacatcaaataattttgataaatgagacttggttaaataccaggaatacaattacaactgagttaacacttaatggtaaatttcaaactgttctagcaaagacaataagagaggcggcggatgtgctattttggttagcaatgaaattccatttaaaataattttatcagaaagcagaaaccaatgtgaaatcattcatattattttatctttaaaaagtccaatacatattataaatgtttacagacccccaaattgcacaacacaaaacactaaaaaaatgctaaaatatttaacaagtgtaaatgaatcaaatagaataatttactgcggtgattttaacgccccaaatattgattggaacacaaataaattattagcaaaaaatgacccagttgcaaatgctttcattgactttattgaccaaaatcaattattacagcacgtaaaagaaccaactcgagaaaagtcaattttggatttgatttttttctggaaagccttccattgttaatgatattaaggttttagaacatttttctacatctgatcacaaaatgatcagctttaaagtttctcaagaaataaataaaacccgtgaacccaaaatttttgtaagggactttagctacaaaaactttcaaaaattaaatcaaatgatcttactaaataggcttagttgtgtcattaatacgaaattttatttagaagaaaaatataacacacttttgatagagttaatgaaagcatttaatcatactattcccaaaaaaccacttaaacaaatagttaagcaatcttatccacaaaaaattagagatttatacgatgaaaagcttaaactacacaagcttagcaagaactgcaaggggaatgaaaagtataaattaagttacaaaattgtttccagggtgcataaaaagcatttaaagcaattttgggataaaagggaaaataatattatctcttcagggcaaaaagcattaataaattatgtaagaaaaaaattaaatccaaaaaactccattccttacttaatcgataacagtgggaatatttgctttgatgaaaaggaaaaaagtaagctattagcagaaacattccaaaaagtatttattaaaaacaatcaaattttcgattattctgaaaataattctccaagggaaaagctttctgatatagaaattaatgtgggaattgtatggaatttactcagaaaactgcctgggcgaaattccacgtctccagataatattccatatattctacttaaaaactgctcggaaacactagcagtaatattaagtgatatattcagactaacacttgattctggtcaaattcccaaaatttggagaacttctatcattgttccaatatataaaaagggtgaaaaatctaatcctgaaaattacagacctatctcactgacgagtacggtctgtagggtatttgaaagaattttgaggaagaaaataattgaatttttgaataaaaataattcttttcg

SEQ ID NO: 10532 - DNA, 1627 bp, Heterodera glycines
  unsure (1)..(1627): unsure at all n locations
tgcgggattcccttcccttttcttccattccctcctctcacgccgtgtcgcccgcccctttcaccgaatttgttcccgtaattccgtgccattccatccaattgccttttgggcaatggcgccgaaagtgccgtccatttttgaattggaaaagtgcgtaaatttggaccaatgtaaaataatactattaatgacaacaaaagtgccaattttggaaaaatcagtggcattctccgggggaagaaattgggaaaattaataaaagtgaattaaaatgccaaaataataattaatggcaataaaaagagggctttccgctgcccccccccccctttctctccccgtttttctttcgtcgaattgcattgtgtcccccccccctatattttgctcaatttcgagaccattttcctctttttgtcccacatttttcccccctatgctccaggcactttttgtggtttttgccacttttcgggtcgattttatggcattattggccaataataaatggccaattcactgcccattaagtgaatgccaaactcttcaaatggccacccaattcaattctcaaagtctcacatttgacatcagttaatgatttattttggtcatatttcaatggcatttcttaaaaatattccgaaattcaatgaaaataattaaaactcacttcttaattgacttttattgcttctccaacataacttatcccattttaattatttttaatttagcgcggtaattaaggcttaatggtcacttaattaaataaaggattatgatgcattaattaactcattattgccatgatccgcttctttaggtccatcccaaaatccgttcttcggccttttcccccactatttttccttccgtccttttctctcgtcacactgacaatgtgcactatttcatttttctgcccttctctaccatttaattaattttcaattcttgggccaaagtgccatcgcctttggtccgttcatttttgaatcttcgcttggcattcctttcactttttcaaatggccaacactttttgccctcacaaaatttaccgtaagaaaatggcaaaaaacagtaacccaaattatttcattggatttattttcagttttcgttctctttttgctccgtttgtttctgcttggcactgaggcggtggtcagcactcagatgaaacttattcaggatttgctggagaattacgatcggaaggccaaacccacttgggacaacgttagggtgggcaaaaaacgatcagaattcggcattttttcaaatccggcactttccctttatcggaacttttttagagaaaatcccaaattacctaatatttttccaattgagacgaatttcccgtgattctcccaaatgaaattttctttttggtcgtgactttttccgactttttcccgaatttttaactaagtttttgccttttccgattaattcgcccaaaatgtaagccaaaaattcattcttctgccnaatgcctttccgttgtcattttgtcacgcgaccatttctccttttcatannatagcagaagagcagtcaattcaattcaaaacattanaataattaaatatatttttccattaattgactaattt

SEQ ID NO: 10533 - DNA, 3838 bp, Heterodera glycines
  unsure (1)..(3838): unsure at all n locations
gataaaggccaacaaatattgtagtttaaatgtcttaattttctctttctggtacagtaaccctccttccatccgttacagtatttggctgcccgacacgacactgtacaattcgttggtgatgaaagacgacgactcgcgtcgccttttgaatgccaaactgacaacaaatatgaccagaaaggtgttgccttattcctagatatttattttttttaatatttatttttatttatttccattttaatatttttatttcccattttccttttttggccgttttggtggaaatgctttacccgaccatttacaagttctcgtgtctgcttaacctgcgttactttccgtacgatctgcaggagtgcacaatgactttctcatcgtggacttacgacaataagggcaaaacattggaaaaataaataaacaaaaacaaaaaagcaaattgaaataattgctgaaattccttttgaaggcattgattatgtgccgtattccgacgaaattggcacttccaattatttggagaacgaaggatggtgaggaagaagggcaaccttccttttgcttctgatcattttcaatttttcataatttatgctccccatttttccctattttaaattttctccgcttttccttttcaaaatgatttcctcctcaatgtgtcccccaaaaggggtttaataattaactttggccccctttttgccaatttttcaaaaatgggtttattaatttcagtttatttcctgctgatcccccattaatctaatcccaaggtatttgctgagctcgacgatgcgtcgggaggaggtcaaatacacgtgctgtcccaacaaatacactcttctcaaactcaccgtttgagtgttctcttttcgccctaattacttgactcccccctgattttcagctttatctccgtcggaagccgctcttttatctgattaatcttatcattcccaccgcaattatcactttaattgccatcgtcggcttttttacgtctgtttttaatttcaaatataattatattcatttctgtgctcattttgcccttcagcacttcttctgcgagcggaatgcgtgaagagaaagtgtccctgggaatcaccactttactttcaatgagcattttgatgctaatggtcggcttaattggaattaccctaattaattgttgaaatagcaaattgaattgtttttttatttacatgaatctttttccataggtcagcgatcaaatgcccacaacttcgacttttatcccgctgatcggatggtgtttaaaaacaaaataaataaatcaaaaatgattaattaaggttcattttgggaatgatcggcgtaatcagtttgggcacactcgcctcctcagtggtcatagcagtgcaaaaaaggcacacaattcgcaaattcattttaattaataaaatatttaaaaaagtgccatccttaaattattatattcaataattaattttattttattttaattacgctgtgtttaattgctttaatttgttcagaggtcgcctcggcgaacggctgacaaagcgcgcggttcgaattgccaaaatatttggtgccatttcctacactgaaggtaagtgaaatgccattccttccattgtaacaacataattcgaaatgcctcctccaatttaatttgggaatgaattcctcaaaatgtcagtgccgcttcacttgcgcaagggaacgagcgagcacgcggaggcaccgccaccctccgcctcttaccgacgggcggccaaattggccacgcggttggccaatcggcgtacggaggacgacgacggcacagcgacgacaacggcaccgaagaaaccggagcggactttctcccaattgttgcgcagggcgacggtgccgtccccagcggcggcggcggcgacggctaacggaggcggcgaatcaatcggaaaaatgccaacggacaaatcgacagaaccgctgatcgaaacggggggagaagacgcggaaaaaggtgggaaattcgttgagagagcttaaagtggagagcacctctaagtttcagcgtatgatcaagccaagcggcattcgttcgtgcgccgttgcggcagtgccgtgccaatcgacgcaatggcggacccgacatcagttgcttcggcgcggagcagtgcgatgccatctccgcgtgccccgcccctccatagcgcagtcaaaacgcagccgctccattccaacgccaccgttttgatgccgttcagtctgtcgctgatcagcgccgacgacgaaagcgaagaagcgagccaagtagggaggggcaaatgcacagatatagctgaagcggaacggaaacaaagcaaatttaggccagcggatttgtgagcccaagcggaaggacggcgcccggcggactgcgccatggcgttgggatgttcaacggttcaaaagccataatgcgcaaaaatttggaatttttcagaaaatttgcgtctgagtcgccaattggcggtcaaagagttcgaatggatggccacaatcgtcgaacgctgttgcttcattgtgttcgccacaatgttcttcttcctctccattggcatcaatttgctcggtgcgttcattagcgtgcccttttttcgtttttctctcatttttcggcatttttttgcccttttaaatttgctaatcaataattaatataattatttcctaattcactggccttgtcactgactttatcagtttatcagcctaattaagcatcactttgatcctctaattaccttttgttttcccttaggctattggcactgggccaaccctgaattggcattcaacaattacacttttgtcgaccaaatctgaacataaatttcgaccattttgcataagtgtcatagttttcttttctgctttattaatttatttctgctgttataaatattggcctaaattttgtttatttttaaattaaattttaaacattttccattatttattccttttttaattattgccaattcatttgacattctcgcacagaatatgtccaaattggccacttttatgctttttgccgtccattctttgtcctccgatgcctttaatccctcttcaaattctagcagttttattctcagcagtgcaaatgaaagacaacggccaattgacgtgaaatatttttggcattttattttatttttccaatttattaggccattggccacagtgtgcagcgacggcgcgagtcgacggccgtggccatggtcagttacacggaaggaccccccgaatttgtgtacactgccgggggcgccagtgacgcggccaaaacgcagcgacggccgtcccccgccagcgccgaccctttcaacgcgttcgccatcactgatgttccgctgatgcgactgacaaagtcgggcaaaattaattggagataaattttgaaattggtggggtcgaaattcggaaaaggggggacagaacgccaaaataagtgcgggagggcctaacccatcccattttgtgatgagagagagaatctttgctgaatttcgtcattttttgccagggacattttggcccccggccgttacgacgttcgcgtccggccgatcattgaccacacgaagccgctgaaagtgcacatttcgatgagcctttaccaaatcattgaggtgaacgagccagcccaaaacatcaaaatgaacgtttggatgatccaaaaatggcacgacgaaatgttgcattgngacccgaggtggacggaatgccaaaaaacaaaaaagaaatgccaaaacgaaaaaaaacggcagagaatacgacatgatcaacagcaccattctgc

SEQ ID NO: 10534 - DNA, 3898 bp, Heterodera glycines
  unsure (1)..(3898): unsure at all n locations
acatccaccgcaactcccccgtcacaaaatatcactttgccggacattcactcattttcaaccgaaaatgccgaagaatttgaggagtgggtggagcgcttccaatttgcgttggattgcgcggcggcaaatatggcggatgaagcgaaagtcaaattgctgatgactaagctcaacccggtcgctttcggcgaatataagcgcttctgcctgccggaggaaatcaccaaattcggcttctcggacaccaaaggtcgtctaatcaaattgttttctcatcccccatcgttagctatcgatcgctacgaatgcttgagagtgtgccgagaggatggcgaaaattttgaaatttttgtgaaccgactgaaggcagccctccgcaaattccgtttttcggaattaaacgaagaggaattcaaatgcctggtcctgctcacatcgctgaagtcaccaagcgatgcaaaattacgccagcacatcctcgcgcgactcacaacagaggacacaaagacgacgaaaacagccaaattattcgacaaagtcgtcgaggatttgaacacgcagctaaaaacggaggctgaagcgaaaatcctggagcggccaaaattcaaaatcaatgctgttcaccacagcgatggccaatcatctccaaatgacgcagaaaaaggcaatcgatccgacaaaaatcgtaaattttcggacatttcggatggaaaatctcctcccaacaattgttttcgttgcggagagctgcactgggcgcaaaattgcccaaataaaactcaaatgtgcagcaaatgcaacaggagggggcacatcaaacaacaatgcgacaaaatccaggcctaccatcaaaataagaggaaaattgttcctaaaatcaacatggtaaatttgcctgtggctttcaaaaattcaggcaaattttcgaagcctttgaaagcgaaaattttggtaaatgaaaagccaatcaaattcaaactggacagcgcagcggatgtcaatgtcatcaataaagctgcattcaaggcaatcggccaaccaaaagttcaatattgtccagaggaggcacaattatttgacggcacacgtttcaaatttattggccgtggaatcgccaatttccaattcaatggaaccaacgcggaacaacaattttatgtggccaaagatggaacaccaaatcttttgggtgtggttacgttagaccgacttggattcctggaacaaataaaacgcctgatcaatgcctcgaatcncaatcaaatttcctccgaaataccggccaaaattaaagacaaatttcaacggtcaagtgctaaaataagaagggagggagctgtcagcagtataaatttcgacaaatttcgccctgtccttcgcacaccgactgtcacggccacggaaaatttctcaaattaccggaaattcggcaccaaatcccaaccgcccaagattggagagatcttcagtcgacgacacaaatcagcggcctggagccccggaaaaatcaaccaaattcggcaaaattcctacaccccatttcaggacaaatctcatggtaaaattcgtgccaaccaaccggacaaaatgaaggaaaatcataccggcaattatctcccgcaaattggtgctattcagctatgccatcgagggccgggtgatcatctgcgatcggaccccaataaattgtcccatgtgtgatcaatttcagggctgatcagtagacttaaaaggggaggtgttggggcgacccacaattcaaataattgtttatcattgggtccgttctttgaccgaccaaatattgatttgttcccctctcccatccaattccttccactcatgtccccaattcattccattccaatttgccttcgcattgttttccctcctatttttgctccattcctccgaccaaatatttgtattttatttttccattttcttcaataaaaatattttattgtgttgtccaccggcacaacaactgaattgttcaccgtttgtcttaacaacagcttcttccttcacaatgctcaattcatcataattcatttctgaaaagaaaagaatttgaatgtttttaaattattaaatgatatcataccgtgtccaaatttatttcagtatcgtttcccaaattttatattttctacgttcatttctgaaaatatacaaatatttttattttattttatttattttaaattttaattttaagtcatttaattttatatcgtttccaaattttaaattctaccgtttccctttttctcattaccataatcatcagatgaaaaatcgccattatttgttgaatcggctgaaattgacattttggaatcagcttttaaaactggaaatcaattaacaatacctgttttttagaatagctttgttcatgttcgaacaactcctatctttttggtatcattcgaaagcacaaagtctgaataaggtaataatacgagaaaaaaagagaattcgaacagctaaagaaagttacaaacgaaaataatcacaatatttaattaatcaaaacttttttgacaatggcctaaacgcttttgtgctttcgaatgatatcaaaaatttagggtttgtacacgcatgaacaaaattattgtatacataaaaaccaggtattgttaattgattggattcataaaaacctttggactcataaagtgcaatagagccatttttgaaacaaataaagtgaatttatatataaaaaataataaaaaatatgatattttaaataaattgaagaagtaataaatgaacatctgctgactctgctgttgcttatgttcacatttacatgactcatttatccattaatttttgcatttctgcattagtaatttctataaaaattatcgagcaaaatgttgacctaaaaagaatggcaccaatttagttctttaataatctcagagaatagaataaatctttgtaaaagctatgtaaatgtttggtttttagcatttaaaaatttggttttattgatcgaatgacctgattcttatatttaatttgttgtgatttcttatttttgtttaatccatattacccgaggacgacttaatctatgacatgtccacagtgaaagtggattactctcctttgtggaacttttttttttgcaaaaatttgcattccgtagcccggagtcttgccccacctactggccgccgtggttcgagtgtgtgctggtttttagcgcaataagcaaaatattttgactcagtgccccataatttacttttatacaaattggaaaaaattggaataaggggcaaacttttattgtggataaagtgctttttgaataataggacttttcgtgttaaaattggggatgctttatcctcaagtaaaaaagttacctctggcgttccccagggatctgtcctggggcctttactatttttgatttatattaacgatcttcctgatgctttgccatcaggagtgaaattaaaattatatgctgatgatgttaaattgtatatttgttataaagcaagagcagacacagaaattatgcataaagcattgcatatttttatccgaatgggcaaataaatggcaaataagtttcaattcaaaatacttttgtattatatttgggttcaaaaaaccaaaaagaaacatataaatttgatggaaatacaataaatgctgtggatacaattagggatttaggagtaaatattgacaacaaattacaattttacgtatgcgttctttatttcgggttattaaatcaaaatcttctaggatttggattattttgtacaaaacttatgttagaccgttattggaatatgctcctgaggtttggaatccatctcttcaaaaaaatattaaaaaaatcgaaaagttcaaa

SEQ ID NO: 10535 - DNA, 1424 bp, Heterodera glycines
ttttttttttttaatcccttaaggggctttaactatcccttttacaagttttactctaaaattaaattgggaaaaaaattcattccctttggtgggagggtaacaagaatgtggaattcaactcgataaagacttaataaaaacaaattcttaaaatcaatttaaaccaaaattaaaagttcactagggtaatatgtaagaccgggaaagctagaatataacaaattcctaagtgatttggtaattttatgttttgacctcatttgactttgacctcaattatttatttatttattttcacatattttgtctttttaattcctgtgatcatcactttattttatcacttactctacgacagattaactgacagtcgtcagagtaagtggtttcgcccttctgatgacttttttattttttacgaataaataaataaacatatttttattattatattaataatttaataaatttgttatttaatataagaaatgctgtttatttactattgcatttttttgactgaaatttcaaatcgtcaagccaaatttatagtttttaaaaataaaaaattacattcttttcccttatggcaatggaccgttaacttcgtgatttcgagttcattttgacaagcgttggcatcccaacaattttgtcggaagtttaaaagcgccttaaaattcaaaaccaaaataatttatttaaagttttaaattaaatataataaaataataatttttaatatttctttccattatttattcaccatttgcatctgcttctcattattatcttccattgaattgttttttcttttctgctcatcttgcaaattttcgcttttgaaaatagaaactaaataattagctaattaactaagctctcgaaaatctaacgatttttatttaaaaaagaaattattgaaaaaataaaattatagccaagagaataaatttaaatggttcgattttcttaccgcccctttcctgctgcatttgtttctggtgcttctccaattcgttgactctttccaaatatttcttctgctcttctttcaactgtctgatttggccaaccaattctaataacatgaagaatatttttatatgaatataataaattaataatgaaatatttaatttaaaaaatgtaaatttatttaaatattacttttaacaactcaccgtttgactccttttccccttgctgcttttggtgtttttgttgtccctccaattcaccgattcgcccaaaaagtgtcttttctgaaaccaattaaatttgaactgattatattaaacaataattgaaataaaataatgttacggtatgtacagtaatccttgtctattttcccttacccttttgcttttccattttacaatttgtcaaccttcgcttgcagggtcacatttttttcc

SEQ ID NO: 10536 - DNA, 1518 bp, Heterodera glycines
aaagttatgtgttgatttagtcaaaaatttagcaaattttccactttttgtccatcgacatagcaccataataataaatgaaacatttaatgcatttgtgattcattaaccacttatgctctttcaaaatgttccatcggtcaacagtcccttccccgcccgccccgtttcccccgcccccgtcccctccgaggtacaatccgtccgttgggtcgacaaagtcaaaatgtttgattcattcgcacgccctcccccccccccgatcatgcaatggtccttttttccaaaagggcaaagagtgtttcgatcggatcaatgtttccctgtccaatcatttggccacttctttcctatccaatcgcttggccaactgttcaccaccttattgggttcatcaccatttctctgcatttcccttctgctgtacggcctggtctcttcgacaatgccaactgagtcttcttcctcctcctctccatcgttcctcttctcgtcttccgtttctccttcttttcaaatcatttctcctgaacctgacaatgccatcggtgtttcctcctctccacaattttccttaaaattggcacaaaattcgttgcacgagacttttcagcatcaaatatttggagagcacaatgcattcgaatcgacacgatatggtcttcgtattggtctcttttttacggggaatgggggagaattatgaggcaaatattcgcatttttgaagatcattgtccaaacggaggggagcccgaggattccgagcaggatgggaggataaagctttgtcagttggacgccgagtgtaagctgaccttcaagtgtgagaacatagtcgggtaaaagcaacgggtgggcaatggacggggaaagccatcggctaatttcacagattgacccattttggcaaacaaatgcgcttctgttgtcccacaaaaagtgagtgaaacctaagcaattgaaaggcgccatgccattttcttgttatagtttccgtttgcacattaaagccgaaattagcgactgatgtttcggcatttcccgccgggtgccaccgacctccgctgagaacattttacttttttgacgtggaccggcagaaatgcgcgaagggtcggatggctcaatgcgaagggtttggcgacaaccgattcgccacggagttggaatgccggacaaagtgcgaaacaactggtcagcagcagaaccaacggcacttacttctcccccttcccatttaaatttcgtattaatttatagtttttgtcccccattttcttattaatattacccccccccccccccctccctctttcaaagcttgagaatttggtgagtagattctgctgcacaacgacagtttcgatttgccttttctctgttcttcggatgacgattgcccagtcggttacaactgtcgtcaagatcacatttttcggcgcagcgtttgttgcggctttctcaatttgggtcggccgctgattccatcccagggtttccgtgggatgagaaaaaa

SEQ ID NO: 10537 - DNA, 4131 bp, Heterodera glycines
  unsure (1)..(4131): unsure at all n locations
ttaatgaccgattgccaagcattaggcaaattcatgctctttaaactccttcaggagtctgtccacatgggcaccaagcttacattcatccgttgaccgatggaacaattaaagtttgatcacatcacacaaataataccgtacataaatcactgtttagtgcaatcttcgcaacttcgatccaaccacttcgtgtccccctggctacgtttgccttgaggctgtttttggctccatttggggcttttgttgtgcccagacaatgactggtgcatttatatgctttccaaatctgtcgttttaattgtgccattccattcccttttggcaagttgtctcgaggagtcgcacccgcagatcaatttgatcaccaatcagccccagcgatgcgaactcacgcaacagccgagtgtttgcacgtcggtttatttgcttaaagtcaatggggcgagacaaaccgaacaattttggaatgtcaatttagaagaccaaatgaaacaataattaaaatttaatttaaatcgcggaaatggaaaatgttcgcagactaaaatgaaaaataagctaaatcatttttttgtttgatgccttccacagttacaggaaaaaatatgtgtattctcaaatttcaaaccttcaaaaaaatgggtaacggttttagagaatttaatttttaacaaaagcgctggttgactacagcatgacaaaaatcctgttttgtcaatggaacgccaaaccagattttatgtattgttcaatttcaaatgatcgatgttgacaatttggccagcattaatgttaacatgtgagatatctttaaaaattttcagaattttgcattaaatattttttcagtttttaatttaaaaaaacatctcagtaccagaaacccattccggttcgggctctatgtagtctttatcttctaaaaaaattttctctgtatcaacagaagcgaattcgaatgcgaaactgacgaagcgacgcatttgggggttttgttgcagcattcgaagacacgaaaaggtgaagccaacggcggaaccaatggcgagaaaacgaacgaaaacgacggcatcgacacacaggactaggaacacaacagaagaaatgccaatgacgacaacaacaacaacaacaacaacaacaacaacaataaaggaaaacagggcagaagaagaaatggaactgaatggcacattgaattncaattcagtggaaaatgagagaaaaaggaggccccaatcannatgaatgngcagagagagcgcgcggaagggagagggacggcaaagaaagaggggaagatggaaggaaggaaggcgcgaaagagaggcagacagcgaggggaaagtgcagagaaggggggagggcaatgatgggataccataagagacccctattaaggccattgttcctcctcgtcatcttcagagcagtcggagaaagccgacttgatggaactgtccacaaaacttgaccgatttatcagcggagtgcgccgaagggcaaaactgcccaaggggcacagacggacgacgcggccaaaacaacggaatgggaaccgaaaccgaacaaaatgggacaggagagaaaaaatgggcaacattttcgggaagagagagcatggacgaaggagaagaaagagtggggaagagaaacacgaagaagaggaaaaaagcggaagacggaatgaacggatgggagagggagaaggaagagacgatgaagaagaggaagaagggggaaatgggagagaagaggaggagaggcaaaaggaagagatagcgcaaagggagcaccagaaaaggagggaaggaaacagtaaaataccgaaatgtccacacgggttcagaccaatgaattatcccggaacccggtggacatttttggagtgtgtgatggatgaagaattgaagttgatgaagaggaggaagaagacaaagagaaggaagcaaaaggacaaaaggagaaggagtaagaggaagaaaagaagggggaacaaggaatgggaagatgaggtggaagaggaagaagcagaggagcagcaaaaaagaggcgacgaacggcatcaccgccagcaaagtgaaggggacacggaggtcgagtgggagacagaaaggaggaaagagggaacagtccagcacaaaagaaaaagggaggaagaagaagagactgtccagcacaaaataaaaagaggggaagaggaggaggaggaagatgagacggtccagcacaaaagaaaaacagcggaagaggaggaggaggaagatgagatagtccaccccaagaggaaaaggggcgaagaggaggaggaagaggaagacaaatcggcagtctgtccccgttggttcattcaaatgtcgaaacaataatcgtaaatatttgatttttaggcggctcaatttgtttaaatgcgcgggatgacccatttgggagggcgttgtgttgtgtgaagagggggaaacatttgaaagattacaaattgggaatggaagagatgaaggaagaggaggacaaatttcggaaggaacgaaaggacggcgatgaaaagaagcgaattgaattggccaccgaaatgccaacagcggcggtgccaatggcatttaagagaagcaccggtaaggcacagagagagagagagacattggcattacaaaaatggcattctgtagaccaggcatgcccttttctgatcgcgggacgcgtttgtcagcccgggtctaccgacatatgtgtagaggacggctttttctgtcagtacaacaaggagaggagggcattcgtttgctgcacctttaacgaagctgacgtagaaggcgagcaaagcgggcggaagagaaaagaaaattaaccaaaaaaagtaattaaaatgcaaatattaaaaaaaaaaatttccacaccaatgctgccattgtaattgatataatttagtttaaattatagctcggaaaaaaacttggtgagcggttggtcgaaagttccttgagaggagcgggatcccttaaaaatcactctctcctaaacccagtctatttttgacgggagtcaagggcgggtgcgggagtaatttgttatatatgtaatttataaaaaatattttatgctcaaattttgaaggaaaattcttattaaagcaaaaaataaaaaataaaagcagaaataagcaaatttttagtgaactgtcccaaacatttttgaaaagatagagggacggattgttccgctaggcgcggtcggggattaatacatttggtaccaaaaggttaattttgtggggttatgggtcaatggattcatttattaacagcttttaattaaaaatcgttacttttgccgaaaaaccccaattcttaaataatactagacggggaaaagcgccttccggcgccatccccccgcgttaggtagtcgatgtattattgagctatgaataataaaaccgaaaatggctcggccgcttcgcggcctgggactcaattcttcggcattccaatcacttggaataactcaatccacctgcattccaatcaccaacaataaatctcgccgattcttctgcataccaatcgctgggactcagttctacgacctttcaatcaccgttactgaatccatcagcactcgaaacacctgaactcaatctcaccaattctacataggcaaaacattttaacattctactggcctttttgtttcttgtcatttcttaaacaaccctcggcatttcaatcatcggaactcaaccctccagcatttcaatcactgggactcaatcctccggcatttcaatcactgggagtcaaatctacggcattccgaacactgggactcaattctccagcatttcaatcactgggactcaattctcctgcatttcaatcaacgggactcaaccctccagcatttcaatcactgggactcaattctccagcatttcgatcactgggactcaatcctccagcattccagtcactgggactcaattctcatgcatttcaatcactgggagtcaaccctcatttcaatcactgggagtcaaatctacggcgttccgaacactgggactcaacccaccatcattccaatcaccggcactcaaccctccagcatttcaattactgggactca

SEQ ID NO: 10538 - DNA, 3151 bp, Heterodera glycines
  unsure (1)..(3151): unsure at all n locations
ggggatctcagagcttcggaagcgtcacctagtcaaccgtttggggtttgatcatcataatgaaaagacagatattccngggaaaaaaatcatattcggagcagcatgagagtcagaaaatgttaattatcgagacataaacccgagaagataccccacaagattatctggtgagatatatcgtattttagcgccggttaccgtatccagttttttgttactgtgtaaatcggctctttcaacgtcacgctgagaaccagatgattttaatttagtctaaatgttgtgccatgattgtggacgaatcaagaaggcggggaagcttattaatcccaaaaaagtgccaataagccgtcgtcccgagtgccagagatctctcgtctaccttcacttggtcctctgccagtgctggctggcccgggcgttggatacgcttcttcgagtacggcttcttcttcacgggcgtcatcagtgacggatggacgtcgagcagcgcggccagatgcatggccgagcgaagcgaggtgaacatgccgcggtcgtacgcctcgcgcacggacagctcgcgttggaagcgcgggtcgaccaccacgcctttggacgcgtcaacgaggccctggatgaaaaagagcgtttattttgcgaaatttttatttttaaaaattgtatttcataaaaaccaaatttttcgaggtcccaattgagaaatttttgaaaaaactaaaatagaaattgcaaaatatgctaaaccaagaaaaaaaaagtgaaaagtgccacaatgccaatgccccaccttggaaacggcacggatcagcgacacttcggtgccaccctcggacaagccgcaaggtgccatcaggatgtcggcgagtgccgagtcgaccaacccttggcgtgaggcgtcgctgagcgacaacgtctggcgtaccgcctggtccaaaacccgctcggtttgcacctgagaaaatgccaattttgggtctaaaatctcctcctgtacctgcatgattccagcttcaaccgcttcgttgaagctcagcgtggtgcctagctccgcgtttttgacgcccttcacgtcaaagattgtgtgccgtgcgcggcgcgtcaacaggccctggcggtgcgcctcgtgtaagtccagttggcgctccgggtgcgccccgtctgcggcccagcccagcacaattttgccgtccggcgacaacaggccgcgctccaacgcctccccgatggaaatcacttcctggtcctgctccgacacaatgtgccgcacctccgcgtcaagcagtccagagttgatggcctccatcagcgtgaagcggttgccccggtcgctgaagtgcccctgcgtatccagcagtcccttctccaccacttcggtcagcgtctgcgacttttggatgagtccctggtcgtacgcttgacgcagcgacagttccgcgcgcgtggccaagtcggtgaatttgccgctgcgcgggttgagcgcatgcgctagcattgcctccgcaatggtcagccgttggttggtcgccgtgttgatgcattcgcgcacgttgtccttgaccagcggtcgttggcggtccagcgcgtcacgtagcgtgaatcgctcgccggacgaaccgaaacggtccacaaactcgccggcatgtgcgtcgatgaagccgtccacgatgcagtcggtcagcgtcagtgcgagcagcggctgcgcactcggaaattggatgtagccatgggcgagcgcgtcgcggagcgaaatgggatcctgcacatatttaccgcggaacacgccgctggttgggttcaacacacctaaaacgggcaaaaaaaaacttagaatgatcagcatttctatgcgggttataatttttccaattgtttagtattacaacgaatttctgatatttttttatctatcagaggaaatcggcgatcacttttcgacattcatcctttaatcccctccatttggtaataggtctggtctaatcgcctaattaagcgctaattgacatagcacacccctcaagcggaccattcttcaaagcctgctccagctccatgggcggcagcttcagcacgcccattttgatcaaccggtgctgcacatcggtggggcaaatgtgccgcgagtcgaacagggacagcagttcgcccgttttgatgtcacgcagctggcgcgagtcgggatcgtacaggccaatttggatggcctccagcagggtcacttcttggcccgtttccggatgctttatgccatggcgtccgtttagaatttcggtgatgttctcactgatcaggcccatgtctacctggaaaacatagaaaatttttacaatcaaaaatattttctcgtaaattttcgaatttccaaagaatcaagaatccgtgaatcaatggcatgaatgaaaaacagggggcacttcagtccccccgctccctctcatttttgtaatttttttcttcaaaaaaagtagaaatttttttgcgtatcttcataaaaatactttccaaaattttcacagaaaatttttctgtattttccttttttaaaatttcaagttcaaaaacactaatgtttttctgaatggtaaaaggaaaacacataggaccaaatccaaaatcttatagaattataacaaaatattttgttatgaatgtaaattttctataagtcgagactctcgaactatcattagatccgcgaatgctctagaattaatcacaaaccacattttaatccaatttttcctcaccgctttgtccaacgaaacgctttggccactgacaatgccaaagaattcgccgcccgcactcaaattcagcaggccttgtcgaatttcctgcagggaaaaatggtgaaattattattgttttttaattatttcatatagccctaaacctctggggtccccagacattagagacatttttgtccaaaaacatttcaattgcccaaaatgcctgattcccagaaatatagtcattaaacattttcggatatattctccgaccatgaaaaactacagtaacagttaaacgccaatggaacgaaagaagaaaaaaaaatcaaaagcctaaaactgatttttttttctgaattgcagtccgtaaaaagtgttacgaaattctattgcgtcttttaatacctttt

SEQ ID NO: 10539 - DNA, 1997 bp, Heterodera glycines
  unsure (1)..(1997): unsure at all n locations
aaaaaaaaacttagnaatgatcagcatttctatgcgggttaaaatttttccaattgtttagtattacagcgaatttctgatatttttttatctatcagaggaaatcggcgatcacttttcgacattcatcctttaatcccctcccatttggtaataggtctggtctaatcgcctaattaagcgttaattgacatagcacactcctcaagcggaccattctttaaagcttgctccagctccatgggcggcagcttcagcacgcccattttgatcaaccggtgctgcacatcggtggggcaaatgtgccgcgagtcgaacagggacagcagttcacccgttttgatgtcacgcagctggcgcgagtcgggatcgtacaggccaatttggatggcctccagcagggtcacttcttggcccgtttccggatgctttatgccatggcgtccgtttagaatttcggtgatgttctcactgatcaggcccatgtctacctggaaaacatagaaagtttttacaatcaaaaatattttctcgtaaattttcgaatttccaaagaatcaagaatccgtgaatcaatggcatgaatgaaaaacagggggcacttcagtcccctcgctccctctcatttttgtattttttttttcaaaaaaagtagaaatttttttgcatatcttcataaaaatactttccaaaattttcacagaaaatttttctgtattttccttttttaaaatttcaagttcaaaaacactaatgtttttctgaatggtaaaaggaaaacacataggaccaaatccaaaatcttatagaattataacaaaatattttgttatgaatgtaaattttctataagtcgagactctcgaactatcattagatccgcgaatgctctagaattaatcacaagccacattttaatccaatttttcctcaccgctttgtccaatgaaacgctttggccactgacaatgtcaaagaattcgccgcccgcactcaaattcagcaggccttgtcgaattgcctcaacaaaggtgagaatttcgcccgtttgcttgtgcagaatgccttccatctcgtaaaattgggtctttgtgacggtttcctgcggaaaatgaagaaattattttggaattatttcatatatcccaacccttgaagtccatgatattaaggacatttttgggatttcttcatggacaataatccccaaacatttcattgcccaaaatcccccgattcccactaaatttccttttttaaatcacctataatcactaatcattttcggatacgttctccaatcatatcccagacaataccttttttgaaattctcaaaattatttaaatgatccatcccactttccaatcactcgcagttaaaacttgatgattttgatcaagatttatgatcattacagtaagactaatacagtaacagttacacattaggggacatgaatcttttgctggattttcatgatcatcatcatacatcccctctggaccaacctcctggaacatttggggttcctcctcatgttccgtgatgcgcggcatttccggaatcaccggtggtggtggctgaaactcgtgcacctcttccacacgctcagcttgtcgttgctcttgggcctatattttttaaagggtggaaaatgcgcgagacgacaaattggagcagtacaacaaggtgaaaattaaatgagaagaaatagtggtgaacaatggaatgtgacagccaaaaggcaaaaatttaatgagaataattaagatgaaaattaggaatcgaacaaagcgactaataaaagcaatttagcaaaaaaaaaaaaatctctcaggcttaaagctgattttaatttggcatttctggaaaaaagctaacaaatgatggcgctaaaaggccaaattggatctaaaagggtgactttaagcttaacattcagcaaatcaaatgttcaaggcttaaaaatggcaaaaaaatattttttttctcaa

SEQ ID NO: 10540 - DNA, 1293 bp, Heterodera glycines
ccttcaatgagcttaattcatttaaggcttcaaaggctttgaagcgggtttaatcctcccagctttgccatcctccccatattatgcccttcccattgtttgccttcggtctccgtttgcttcggtgctttcgttgctttaggctcataggtctacgcgtctttcaacgactgttcatattttctgtccaaatctgcctttcttctctttgctctttctttctttcttttccctgctttttgtgaagagagaagcgtacgttttcgttggcttccggtgagcggcacaaaggaatatccatgcatcatcatcatcacttgcttggcccatttgagttcatttgccgtctattcccatccgaattttgccccctctccccgcctttcaatttctttcgatttgtttgccatcaaattccccccccccccacctattcccgccttggtcaaaattaatgcattcgcaaatgagacggtacaaagcatgggaaaggcacaagtccccttccttctgtgtttcactttcccaccactcggccacttattattagtcattggcattggtttcccttttccgccacggtcaaagccaaaagcaatggcatttgattagagtgaggttattaccatcattattattattattactgttattgcgtgtatgcattcgttcctcctcttctcctcctcctcctcccttttctcacggcttttccctcccccccccccaaacctccgtcaatttgttgtgctaagccaattagcattcattcctccgccctttgaccctttcttcttttcctccacaatttgtttattcacctaaaaaaatatttttcggtttgacaaatggagaaggtaatacaaaattgcgaacaaaaattcggcgttgaattggcattggatgtgtgtcttcagatgttgggagaactgtttcagctgaacacttcgcagatgccgggaagtgacggaaacggaaggaatggcaccgaaatcggacgatgtgccgatgagaaagggggtgagacgggggacgaatgggcggcatattttgcaaaatttggggatgggttggattgttcgctctgtcccgaatgccatcctccgccatttgtcagcttcttctccttttacccacaatcgtgaccatttcgatggtccttgcactgccttggaattgtggacattgcgctttgtttttccgatgttgcaatttctgtgcctcggtggaaatctgctgaatctcctcgtctacagctttccctactttggagacaactcttccgtccatttg

SEQ ID NO: 10541 - DNA, 4191 bp, Heterodera glycines
ccccccccccccgcctccgcaaatgatttttgaggatttctcattcttcagccccaactgggccaatccttttcccagcggcgaaagtgcgtcatccgactgacggtggctaccaccgtgtcccatcttttgctggagggtccggctgcgctcggttacgcctttttcgccctgcgtggcgcgtcaatgccggaccaacgcgaatggatgtgcgcactcaccgcgtctaacaacgttctctccgcgtgcgttggcctattcgttggttagcctcgcaaaatgtgtttctattctgtgcagactgaacgcaaccatccctttctttctgtttctgttctgctctgctcagtttcgtcaaatgtccgtcttaggcatcaaaagtcgaatttccgcccctgggcgtgccatgaaaatttgtgccgacgatgggcccagcctttgcgtcgcagcagtaacccaacaaaggcctaacgaaaatggaatgatcgggcggaacaattggacaaggcaattgtcattcggcggttcccccgttattgcggaggaggaggaggaagacgggcacgacaaaaggcactcactaacgctgaaggaacgcaacggcggaaggggaagtgtcagcgaaacgacgacggcacttttgacgaggggaggaggggcggacacacttttgtaggaggaaaagggatggagaagaggaaataggcaaaatgatatgtacaaaaaggaaggaacaacgggaaaaagtgatatcctgtacattagttgagttatcagtgatcacaaatgatctctcccctcctcctccttctctccctctctctctcccctccgccgccttctctccctctctctctcccctcctccgccttctctccctctctctctcccctcctccgccttctctccctctctctctcccctcctccgccttctctctctctcctctctgtctctctctccctcctcctccttctctctcattcctctctgtctctctcccctcctccgccttctctccctctctctctcccctcctccgccttctctccctctctctctcccctcctccgccttctctccctctctctctcccctcctccgccttctctctctctcctctctgtctctctctccctcctcctccttctctctcattcctctctgtctctctcccctcctccgccttctctccctctctctctcccctcctccgccttctctccctctctctctcccctcctccgccttctctccctctctctctcccctcctccgccttctctctctctctcctctctgtctctctcccctcctccgcctgctgtctcactctctcgctttgattgtgttcactgcttcatttctgatcactccctgttgttattgtttttctgtctgtcttacggacacattcctgatcacttatctgtctgatacaaccttatcatgtgctcttccctcgttttctcagaccgttgcttcttccaacagtccattacccatcgtgaacactgtcttgctgtctctctgtctcctttgtggcccctttctctctccctcctctttttctctttgtcgttccctccgtcgtaaatgaattcgtttccgattgctcaaaatgcaaatggcaattgcggtcaaagcgacaataaccaaagcgagcagaagcaatgcgaagaagcgaatgagcggtgaagagacggaggggaagagagtgccaaaggacgacgccgcgggggcatctgctggcttaatgtggcacataagcagataaaagacttttacgctcatccatttacctcactgattttatgtccaaaattctcatcctttgaattcaattgagatccaatttctctgggaaaaagttgcgattgctgacgacaaagtgccgacggtgcataaggcctatcgccaattttaggcacatggcaatggcacgaagtgttggcattcgcttcaaatttgggatgcatttgagcacagtcaagttgggtgcagaaggggtcgggttgattaaagcagcaggcacatctgcgaaaggcgaagccgggacagatcaaaagcaaaaagggggaagggtgggaagaatgcccttgggggataaagtcgtggtaatgcctttgggtgaggatagaactgactgatcaagccgaagccggtgctggacatgcttatgcgtcccaccgaccgagtcgtggaggggccgtcggaagcatcgcgtgagaaactgagcgcagccaccggcgccaaatgtttgccttcgatggtttgggagaattgagaccttctcactcagagaagagcattttacaatcggcactttgatcttctctttgttttggcacctgcaaacgcagaccgaaggcgctttttccggtgccattcgctcgtaagaggataatcggacacagaaagcatccgcccaatcggacgcgcaacggcacgaccgatgcccaaacggaagtgggggaaagaagggcgaaaactctgaagagaaacgagtgtcagaccaagaaagatcggtacagaaggggaagagcaacaaagaaagagaaaaagagaaaaagagagaaaaagagagagagagagagagaaagagagaaagagagaagagagagggaaggagggagggagagagggagagaggggggctgatgacgagctttagggaatttcttgaaatctgcgtaaaatgtttacatattttaccctgtaagtctaaaatattttgctactgattgattttaaatttttcggagaatttttggcttcattcgccgcttcaccgcctcagacaggcgcttagcgctttttaattaattaattgggaccgccaataagtgaatgacagcgattagtgcctgattttcttgtcaaaactcaccgggcggcaaagtgcagcgcgacgacgagagatcatcggaaatggaagagacgatgagtaaaagcaacaaccaaaggaacgggggtgggataaagcatccgattagtgagtcggacatgctttttggtcattggtagcgcatttgcattggcattcgtttagcacattctcttttggctaatcgaatttttacaacgcatagccctataaatcaaagccaattgaattgaaagatgaaaagtggcggactgagaagagatcgtattgaataagagagaattgcagcagaagggcggaaggggggagagattaatgcaaattggcaaattgatttgagaggcaaaagcaaaacaaatcccttgggattgctgacaacaaaaatggcaaattggctgaagcattttctttgccaaaatctggcaaatttcagattagaagaattgccagaagaaaggaatcgcttcattacacctttgccatttgccattgcttctcatcgatgtgtttagcaaatgcaaatgatgtgagaaagagagagcgatgtgaaaagacaaaagagagaaaaagaaagagaaagaggaggaggaggaggagagagtgtttagagggtaattaataggaggggggggggaagagagaatgacaaatgagcaaatgggaagggacagacagaaagggagggaaagaggcaacggcagaaacagaagcagcagcaaaatgcgcaatgttacatattgtataataagaaactagaagaagaaaagaaaggaaaaaaagacaaaagagacaaaagagaggaacagagagagggaaaggagagagagggagagagaaagagaggaaaagaaggaaaaggaaagagagagagataaaaaggaagaaggagagagagggagagagaaagagaggaaaaggaaagagagagagagataaaaaggaagaaggagagacagtgagagagaggatgaggaggaaaggaagaaagggaaagaaagaaaaagggacagttacaaagaaaaggggtgggggggggggagaagaggcattgacagcgaggaaaagaaaaaacattcagtaaacaaagaaacaaacctataaacatttatttatttattcgcattcaattgaaaagtgcgttagccatggagcaatttgtcatcggatgggctttggcatttgtgaaataaagtgatttatgctttggcattggcaaatggcttcttccgccttctccgcttctgtccgtttccgtctttcgcttggcttttccttttatgggacgtcaatttccactccctcaa

SEQ ID NO: 10542 - DNA, 2104 bp, Heterodera glycines
aatgggagggggagggggaggggagtaattaatgtctttattgcccggaaggattgttttggcattaggcaatttgttttttttggtgggtagggtgtgaaaacatttgaccacaggcaaacgtgaaatgagatgaaacaatgcaaatgggtgatgggcagggctgggaagagaatgggaaggaatgtccccgagggggaaacagtgccctcaggcaatttcgccccaggggaagtgccgtccccgcctcttcaaaatctcatttcggcctaaatgctaataaagtggaatttcacaacgagtgcatgaagggcaaggcaatcaatcggccgcctgcttctccccgcttgctcaattgcccaaatcgtcgcaaaaagtccgtccgtccgtcgggggacagtccccgccgattggccaaccgaagagaaataaaggcgaaaacatttcggaaatgggcgctgaccaaagtccaccgtgtttgttgtcgttttgtccgttttttacctttcgcgcacattcccatcaccaattgctgcgtcccaagccaaacgctgaaacattttttgcatttaattggaaaatcggaagcaaaggcatttttcatccatccgtctcatccagaaaagaaagaacgacagggggagggaggggaagggaagtccttgaaaatgggggacgggggagggcatccggaatgggagggcagggggggggaaggtgcgattcggcaccggaagggaggggggggggggggcacaaacaccggtaaaagagaaggcaaaggccacgaaaacgcaaaaagggattaaattattgctaatttactgtttgtatcattggaaaaggggaaacaataaacaatgccttttggcataattttagcaaaagcacattaaatgtttttttattggtaattcgcaatttctgtttttgatttcatcatttggaggtcattagcaaaacgatgtacaagtcaaaacaacattaatacatatgtaaattcgatcagaaaatgattcatttcgccttcgggaaaaagccaatcgctgaagaaaaaagcattggatagccaaacacatggacaaattgaatgatgagtgacagtgggaaaaaagaaaagcaaaagtttatttcggcaatttaatttaatgaaaattttaatttattttcatgttcattgtgcattttcgaagaatacaatgtaaagattaattttcaatcattttccttttaattacggtagatcagttattttctataatgacaattttgaccactctctatctctgtgggtataattcgtaaatcatcattcaaaaggcaattcggtagagatttgtgctcttttctattagcctacacattttttccagaaaaaatttcccaatcacgtaggaattttcagaaaatttcccgatttcattgtgtattcgatttacagaccaagaggagttgattggtactgtatataatttttatacattttcaaccccgacagtattcttcactttttgggtgggggacagagtttagtctggccggtttagtctgagccaagtttaaagaatcataaattttttctcagctggccaaattttataaatttggcatcattcgaaagcgctacatgtttagaagcttttgataagctaattctaagcgattaaacaaattataaaagttgcaagatgaatactactaaaaagtcagaatttttgcatattttaatttataacttcggtatatctttatgatttttggaagccgatagagcttgttaagagtagtgatgcactttttaggctctaaaaactgccaaaataggtaggccttaggctctaaaaacccctaaaataggcaaaaaatggaaaataggcactaaaaaaacctcatttttaggggtgtaaaatgacaaaatgtattaaaaaagtaaaaaattaggccaaatcagtattgaggtaaatagtttttaaatcacaaattcaattttaaaaccaaaaattcttctcaaaaaaataaataaaaaattttggagatgaattttaaaaatttttcatttcttaggggtgtatttttgaaaaatttttaggtcgattcttagggg

SEQ ID NO: 10543 - DNA, 1844 bp, Heterodera glycines
ttgggaagggactgaagggggaggggggtgagtcagttttaaatttgcacaggagttccagtcatggtaaaccctatgattttttgtatatccagatagttttttatcggcgcgatttgtctaaaaacttatgggtcctgatgggaggggggtggatctggcggggtgcaatagggccgcgccggggaaaaaaaatttttgaaatttcagtgcaatttggttaaagttttgtaaaaaatgacctattttgtgatttagagccaatttttttaaagaaaaattaaggttttgtcagctctgacggggaaaaattggaattttgaacgaattttttgagaaaataatgcgttttcaaaaaaacaatcgctttaaaaaattttctttataaaaattttacaaccaaaaaatgcgcggcgcaccgcgcaaaaaaaaaaccgcggccgcgcattcaaattgccgcggccgcggatcgcgcaaaaaaaaaacgccgcgaatcgcggtcgcgctccagccctggtgtatttttcgtttttattgcgtttttgttaacaaattttgggcaaaacgccaaaataggcaaaaataggctctttcaaaattttttaggctttttaggctctaaaaataaaagcctagaaaataggcacttataactcgaaaagtagcttaacaacagcccaaaaaaacatgtttttcttgcgtttcaggccacggggagctcaggaaaaaaataggcttttgcctaaaaagtgcatccctagttaagagctttcgaatgataccaagattgttggatttggtcgacaaagaaaaaagttatgatactctaaacttggctcatactaaaccggacagactaaactgtcccagtccgtcactttttttccttttttcaaagatgataaaatttttctagaacattaagagctatcgaatgacatattaattaattaatttggttgactttgtttaaagttataacgattttttgtcaaaaacaatacgagttggggtatgtacgagggtaggtaatactttgatttgtccctcccactatttttctaaattttttttaaagttatgaaaacatatttccaagggtttttggggtttctgatcacgaatccggcagaaatggatgctgccggattcgtgatcagcgacccaaaaccgttggaaacatgttttcatgactttaaaaaaaaattgccttcataaaaatttttgaaaaataatatcactattttggcgttttgcccatttaattcttgacaagaattttggttttaaaaatttatatctcaatacttgatttggcttaattttgttactttttggatgacattttacgattttaaaccaaatttgaaagcttttagtttatctttatacattctttagacatacaaaaaatggcggatgaacaagaagaaacgcaagtcgctccgcctcagccagttttacacacagaaaacgtctcttccttcttggatttgcaaaccgagttcatcaaacgtcgcgatgccgccattgcggggaagtcgcagtcattcgccacggagccgatgcaccggcgcactccacgaaataacattttggccataagcaaagaggaaaaggcacaagtttttaagtgatttaaatttaaattaaattttagaaagcaaaaagcgaagtttcaacgctaagagcacagcgaattcgtcaaaatgaggaagcaatcagaaaagaggagcaacagagggccaagcagcagcaaatccttcagcaaaaggcggcaatttatgaacgaatggcaaagggcgaacgattggtttacgacgacggaaaagaggccgaatttt

SEQ ID NO: 10544 - DNA, 3199 bp, Heterodera glycines
gagcctatttgtccatcgcccagtgaagttgtctatctcccataatgaccacctctgctgttgaccattgtccattcattatttttgcttgttgcatttctccccatttcgttgcttcgctcgtccgccacttttccaatcaataggtccattcatagtgctctctgccgatgtgtgttatctttttatggctcttttcggtgccaacgagcatttttattttgtttttactgaaaatgttgagttgaagagtttttatagattttttggaatttacagactttttggaaacaaatgatggcatcctttttctgtttccaaaatttgttaacaatcgcagaaaatttcaaaaatttaacccgagggcacttaacggcaccgccgaaccaacaattgctttggttcttcaaaatttgagttaaaaaagctcacatattagtcattttcatgaaaattcaaaaattacatttgtacattatctttagtgtcaggaatttaacaccaaaacaaaaacgcggttttccatttaaagcattaattaagaaagttctcaaatttttattaaaggacattgctttgaaaattgcctcccatcaattcgcttcattttttgagtcaaatttttgttggacacattacatttttggtgatctcacaaattctttatggccaatcattcttcaaatctatccaatttctttactttgtttatttaatttgtaaaattattttagatataatttaaatttagtttaaaaaaaactgatcactgatttgtgtgtcctgccaaaaattgtgacgcaaaagacccaattccgatcagcagcaggggcatttttcccatctttttgaaaggttttaaaaaaatattttttaattaagggagtttaaaaagaaaactataaaccttttttgtcatttttaatgataaaacaaaggataatattacatgtaaaataatttcaatttttcccattatgtgcccctttaaatgagttaaattatttaattgagcaaatatttattttggttattcagcgcctttttaaaaattttatagttttttaattttttaataaaaacaaatcgacaaaacaaaataaacttattttatttgtttatcgagaaaaaaacattattattctttaaggtactttttttttggaaataaaatggctgatccaatcgactcgaaatattttgattttgtgccagccactgaagagcagcagggtaatggggaaaatcacaataaaaaggaaatgcaattaaaataaatgattgaattcaagaacatacattaaaaaggaacaatgtgccaaagggtaaaaatgcgacagttttatgcaaaaaattctaaaaaaggcagtttattactatttttattttacaaaatttacgggttgaaaatctgtaataaaatgaataacgattttcaaaaaaattccaccggcatcgcttatgatgaatgatctcagcaaactcgctttatctttgaaatcctaaaaatgttcaaatggttgaaaatttaatatctaaaagattctcaaagattttcccatcatgtacttgaaaattaaaaactgagtttcatttaaatgggtatttgccaaaacaggcacttctgctgatgtgttcggtttgggccaatttgtgcccagtggcgccgtggtgtcgtcatcatcaatcggtgctgctgctggtgatcatcaacagcaacaaggacagcagcaacagcagaacacggcgatggtgggccaatttataaaagaaacaaaaaatggtggccaagaaaatttaaatcatttttaaaaatgacaaaaaaacaaaaaattatcaagcttgaattattaggtttaaataaattattcttcgaattgttatttttagagcccggaattttgaagattttgggcttgggtatgggcttagacaattgaccaggctagggctgccctatcaaaaaagcccgtttaaccgagcttcccggtcccaaattttctggggcgcccgcctggctcgggctttttccataatttgtggaagtttagttataaaataaaaaaatgtgtaatctctattcagaaaagagatgtaattctattacattaaatttaaaattttttatctgcggctaattatatatttttgtaatataaatttaaataggaccaaagaccagaccaaaaaaactagagtgcagcgggaccgggaatcccggtcatccgaggtcccggttccggttcccggattttgaaaatttatttcccggtcccggtagggcaaccgggaaaaacaagcactggtaagaatggggtctgagtgtgttggatagggatcaaagatcactttcccatcattgttatcgactattctctctccccctttctctgtccaacactatttccattctctctctctctgcctatctcctccacatttctctgaccccacgtctttataagtgcgtccattccctcactcatggctctccgctccattcattcgcattggacatttttattattttattctcctccgtcgctgcactcctccgacctcatcaatttgtgcatttatttttattggtgtttattaataaattgttgatacacaacaattttggcgcagtcagcagcagcagataaattctgcacatcatcaagccaaatcaaggctaattctgcaaaatcttcaagccaaatcaaggcatattctgcacaaccttcaagccaaatcaaggcataattcagcaagcctaattttggcatttcaaaagcctgagcggcttccatcggacatcaataaaaactgatcacctgggtggtgtaagttccgctgggtgcggtttctcatcgacaaaaactgatcacctgggtggtgtaaagttccgctgggtgcggtttaatcaacaatcaaaatggacgcacaacaacttcagcaaattttggacgcggctctaaaaaaatcagcagaaatttttgccgccgcactcaacattcaaaatcaaaacccaaacccagggtcatccacaacggcatcacttgcggcatcaatcaatgcccgcctcgaaaaattcaattataatccggaggttggacagacatacgatgcttggttgaatcgatacggaaaaatcgttcaacaagacggcgcttcgctcccagagcagtccaaagtccaacttttggtcggaaaa

SEQ ID NO: 10545 - DNA, 2350 bp, Heterodera glycines
tgttttggcatattttcaaaaaatgaatttttaatttcaggattagagaaaccgtcataaaaaaatctcaggatttgagaaaataaaaccgcccaaaaggtttggggtcaaaaaatttaaatttgcaaagaaaaaattgaatttccttcacctgccactttggtgacaggtggatgattgatgatgaccttcccgcggcgctgcgcggccgggtgaaaaaagcacccgcgaggatttggggaaatcggatttggttctgcggcaacatcaaaagacttcacccctcccataggctttggttcttggcggtaaatgtccacgggcggcaacttcatagggagtacaataggtttggtttggaacacacccccctcccctcctgggttttgatggggcggcaactttaaagggctgcgcccctcccatagggtttgggattgtgcgggaaacacccgcgagaaacccgcgaggttttgacgccatatactacttgcatacttacttaggattagggtctaaaaagccacaatttttagaaaccaagttttttggagttcaccttattgtcggggattaactgaaaaatcgtttctgggtttgcttggtccggaaatttgtttgtattcggcatttttaattttctctgatccaattcccagtaataaaaaatgataaatcctaaaaattgcattgaattagttaaaattcccgagaaaaacaaatgatacgatctctgaaaaagtcaaagtttgagggtcggataaaaaactttaaatgttccctaaagcagacaaattccgaggacaacagaaaacattctgatcattttgatgaaaaagaaaaattgaaaataattaaagaatttgacaaaaggagagaaatattgaaaaacaaaaacatttacaattgtaagcagcggaggctaattgaacgagaaattgccagggaattggggacataccttcacaaaattgaagaatggaaaagggaatttggactgataaaaagggcaaaaaaggaggacaaagaaacaaagttggcactgattgaacagtttgacagaatgaaaaatgagcgcaaaatgaaaaagggatacaaaaatgccgagaaagtcggcattgaatgtgaaattgccaaggaattggggacacatcggaacaaaatttacaaatggaaaagcgaattattaagtgggtgaaatagtagtgataaatagggattcgttgtttaggcacaaaaaatgtcgtaaaattggcatcaaataggcacaaaaataggcaaataaaatgttttattaatacatttttaggtagcaaaacaaataaaaaattaaattttagaggatcaatttttgggaaaattttcaactgcattttttttttttggtcgatataggggtgtatttttcttctttattgcatttttaaaggatttttccggaaatcctggaaataggaaccaaaatggcaaatcgaataaacaatttgaaatgtaaaaagtttattctttataggactttttgacattgctaaaatgaaaaaaataaaaacatttagtaatttgagaatttttttaggtccaccgacaaaaaagttttcaatgcagcaaagaatggaaattgtcgacacctttgaaaaagtgaaagagttatttgtgaaaaaattcaattttaaaccaacggtagaaattgaagaaaaaattgtggaaaaatttgggatttgcagacggtcaatttatatttggaaaaacattttcgagctgcgcatttgccgtaagaaatttttaactaaaaaatatatagttgctaaaaactgccaaaatcatttcttaggggtgcattttgaaaaattttcgggtcgattcttaggggtgtatgaaaatttttttaggtcgattcttaggggtaaatttttcgtttttacataattgcatttttgttaataattttgggcaaaactccaaatagtttaaaatagttttcaaattttttttaaagtttttaaaaatgtaaaagactaaaaaatggagccctaatcatgtaaatctttttttagcgaagcataaatactctgaagcggaaaaattggaattaattgaaaaattcgacgaggccaaaagcaaaaacccaacgataagcgacgaagaattggaaaaaatgttaccggtcaaaatttccacgataaaacaatggaaaagaggcaccaaaagaaggaaaactgtgaaactttaggctaggctttatcccagagtggccaagtgtccttatttctaagatttgtccttattgggaggtgccattttggcacgacctccttgctttgtgcttattcttggatttgaaaataaaaat

SEQ ID NO: 10546 - DNA, 2836 bp, Heterodera glycines
  unsure (1)..(2836): unsure at all n locations
tagggccgcaacttntagtgacgaaaaatcccaaaatagtgaagaaatagtgacaaaaagtccaaaatagtgacgaatagtgacataattttcagccaaaaaataagccaaaataatttttattcactgattgcagttgcaaatgagtaggactgggatttttaagaccaaaaaacccaaaagagttacctaaaaaaaattttttaattaaaaatttttgccaagaaagtaaatttttaagaaaatttttttcatttcataggagtatattttgaaaaattttagcttgattcttaggggtgtattttttggttttattgcatttttgttaaggaattttccaaaaaatgtcgaaatagtgaaaaaatagtgacaaaacgccaaaatagtgatttttaactattttagtgacgaagtcgccaaaatagtgatttctagtgaccgataatgacatcagaatcgaaaatttttaatgcagaaatgcgttttttaagctcctttcttcaaaacaattgagcaaaaaaaaaagttttttcactaaaagttgcggccctacttatcatttcgtcactgatcgtttcgtcactgagacataattttaaaaaaatattgactaatttcaataaaattatcctatgaaattatgaattggtttaaaattctctaaaaattttcataagagtacaatcaagcttcctttcacttgccggcatcacaaattaaagtttatccatatcatttattcggcaatcctaaagtgggggtccctaatttaacttttttttattttacatttgagcttagaatgagtatttgggggtttttgatggtgctgattacgaatctgaactctgcaaaattcgcaagtattttatgttgttttattctgtttaaataattaaacatcaaattcataattgtctcatcaaaattaactttccttaaaattgaaattcggcaaaaataaaaaattacacatattttaaaaaattagcaaaaagcttggcggtgggcgtttgtaaataatatgaggaaaagcccttttcctatttaatttaattagaatttaaagcgattcagcaattgttgaaaatatagcagaaagattcttttaatttaatttgaatttgccattttagcatataatatttattacaatttaaaagtttgtcaaacaaaaattgttttttttgaagacatttccaatttgacagtcttccgttggttttattttatgttaatttttgataaaagaaattaattgtttcttgataaacaattaacaaaaaattcgaattctcaagattcctttcactcgccggcatcacaaattgcattaattgcttatgaaaaataaaatattatttaattaaaatattcaaaaaatagcatattatttaatttttatgattttaaatagggttcgagccccgtggggcgggggtggcttttcacgggggcgggggatgcgggggtcagagtcacgggggcgggggcacgataattccgcccccgcggggacgggggcgggggtttgctttgaattaggtccaaaaatctcacaaaaaaatattttttaagaatgatttctttggctccacattcctttatttgttgatcgcctcgatactatttcttttgacataaattgcacagatttcgactaaaaagtaaccaaaatttagggatttttgggtaatttttttaagaaaaaaaattttttttttttggggggggggcgtgccgataggggcgaattttaaatttatttctaacagatattcaccaaaaaaattaagactttttcgataaattttcgttttttaactatattaaattatcgtgatttactcaaaattggaactcagattttttaatcttgcggcacatttttcaaaaaaaaaacttgatgaatgtgcgagggaagagtgtctccggcggtgccaataggcgccgccgggaaaattttttgaaaatttgaatacaatttgttaacaaattttgtacaaaaaatgagcaaaattcgcgagcttgggataatttttaagaaaaaatataggaattttgggggccgggggtggcggtgccgataggcgtcaccggggaaaattttaagaatttatatgaattctgttagaacttagccaaatttttcagaaattttctttttttagatgaaaataaggcattacccccaaatcagaacatttgttagaaacaagaacataaagaaaccctgtattaatcagaaaaaataaataaattaaaggaaaacgttagccggaatcgaactcatgacaaaagtactgttagtattgaagcactatccaccaatccacaaataaaataaaaaacaagtaaaatttattttatttcataaaaatttctcgatagttaaaaaaaattcaaaattgtctaaattttttgccttatttcccacgaatgtgccattcttaggggtgtattttcacccccgtgcccccgcgggggtgaaggtcgcgggggcgggggtaagcccaaaaaacctgtcccgcccccgggggcgggggtggggtccgaaccctaaaaaaagtattaacaatttcggtgatatttcaaaaaaaaaaataataaaaacatttttatttgttaataaactaaattttttaaactttaacaaatttcttttactcgttaaaaacattaacattgcatttaattaattaagacaataattgattgtttcattgtgtctgagttcattggtaaattgacggatctgtcatcagagaaggtgtcggacccggccaaacatttccgacaaagcgaaggaggaataacgagagaactgaaattt

SEQ ID NO: 10547 - DNA, 1635 bp, Heterodera glycines
ctttaaatctttaaaaatggttaatcttttttaattacatacacttatcgaccgtagttattagtcgtatctttttgccttttgtaaaattagtgaccaaattgctaaatgtttttactttaaaaatataattaaataatttctttcataaaatggtgctgcttttctctgttcttctgtttttgctgtctctcgtcaaaattggtgattttaattaaattagggtaatgaattatttattttcttattattttcaacttgtgctgctaaatgggcgtcaaaatgtttcgtgggctttcatggcacagtgccggacgaggcttttgccaaaatgttatatgaaaagttcggaataattgccaatgccgacatgaaagagaaggaatgcagtggcaccactaattatcttaagcctccatccaaccgctagattgcttttgaaacggctgcctgtaaggaattggtatgcaaaaaaggtgaattaaaacacttgcaaatttcagttaaatgaatatgaaaagaaattaaaattcatcaaaagtaaaagaagaataaaaagaaaacccacaaaaaacgtttaaaataattaaataattaaaaagcgaaaaaatcttaataaaattgttttacataatcaattaacaattttcttaataccattcgaaaaatattctctatgaatctataaaaatttcaaaaatttcgttggttataaaaaagttaaataaaatcatttttttaaatttccaagtaacttttttttgtacttaatataattttttgattatatgtgactatcgaatgggtagtaagaatgtttgatttagttgactttgaaaaaacgatgacgacttttttgtcaaaaaacttcaaatcgttggcaaaactttggcccaatacaaatcgtcctttgcccccccccccccccaccttaaaagattcagaaattaaaaagcaaaagcagatttgtaagttcagatccgaaggatgccaaactgttgttcgtgttcaacatttgcaacaaagtggacctggccggagtttgccatggggaaaccttgataaattactgcaacgaggcgaaacatcacttgtgatgccgttaactctgtgccgttcgttccgttcaattcgttttgacatttttcggcatttttctgctgcatagttttgacatttaaattttcattttttgatcatctttttattttaattaatgttcgtttcgctctgatttactatcacagttaaagtcagatcggttttacgggaagtggtcaaaccaaggaaaatttgactgtcccaaatacattctacgaatttattattaatgtttaaaaaacatttccatttcgttatgttttccttctctccatcgctttttgattcatcttcattttacatttttacaattgtgtcatccaagcaaaagcccttcctttttttgtgattcatttcttccatttccccgttggttatattctcccgaataaaacatttatttgtaagccttttccgattggccaaacattttctcatttttcgtattattcgtagctctatttaaatgggtaaatattgatcataggccccaaactcaaaaatgcttaaaaacggtcagaatcgatgtaaaaa

SEQ ID NO: 10548 - DNA, 1219 bp, Heterodera glycines
atcaaatattttcctttaaatgtttttagaattaaaatcgaaaataaaatgttcgaaaactttcttattttgaccattttctgttgctttgcaaatgccattgcccaaggccaaaatgtaagcaaatttagttgatgaaaaaatggaaacaatattatttgaattgttaaaaaattgtaaattgttttagggttattactgtcagcaggttggcggcttctactcgtgcataagctgcaatgagccgtcgctcgtcaaactttgtaaaattttcttacccgaaaggcccctgggattaaaaattgaaatggcttttttcgtttgtttgctttcataattacaatacttaatgattaaatgttggcacatttaaaattaattaggcgagcatttgggccaattttttccaccgatggcggatcaaaaagtgcaaagcattaaagacgaacagcagcagcagattgacttgacgcctgccgcacaccatccggcacaacagcagcacatcactttcacattcaaatgccatccgacaaatgaaagccgaggagaaaaagcggcggaggacggcgaagcaaaagcaatgccaattggagttgtggtgagttatgccaatgttgtcctttttgcccaaaatgccaagtcggagcttgaaaatgattaaaaatgaaattaataattaagggcaatcatttcatcaatatatgaaataataaaattaaaaaatcattaaaaatataaatttttctccgttgacgacacattactccaaattatgaaaaataaccaattttgctgaaggtctttgacttataatcccatttctttttcttttttttttggttttgcaaatttttttaaattattttaatttcactggttatctggtaattaaaataattaattgttttacaatattctcagattctccttactgttctcggtgtgctgctcgtcgaggccatcgttggctttttggtatttttgtgcatttcgatgagaaaaggcatttgaccgatggacagagaaataaatcggaggaaatgtgaggacgaacggaatattattcaagcaaaagatgctttattagctgaccagttagcatgaaaatgctcacaattttgaattttggtggaaattgaacaataaatttgaaaatgcaaaagcactaaaattctgtaaaaatagatttattatttcttcttttccacctcataaa

SEQ ID NO: 10549 - DNA, 615 bp, Heterodera glycines
attttaccaatatggtaaagatgaaaaagtaaaaagttcagcacaaatgaatgcaacgatactgatcatcaaaaaaaaaaaattttgttttttaacaaaaatcaattgagcaatcaatcaattaaactcggtcctccgcctaaaaggcttcagcaatgtcagcggcactcttaaaaagccgtttttttgtttattgactttctatggcatttgttgcaattagtctgaccttcacaaatttccatgccttttgcagctttgtctcttcctccttcagctgcttcttcttccggctcagacgctgctccaccgcccgcttctcctcatccgtcattctgttcttctgccggtcgaatagctcctcctcctccttcaagtcctgctccttttggtaatgcacttgctcatcctcgtacaattcataaacattctttggaaaatgagacgacgattaaatcgaaccgaaccgatggggagcggggggattatccattttaatttaccaatcgaaaccgaatcattcggaaaagggaatggaacaaaaatccttgacaacacaacacccacaaactgcaaatgatggacaaataaagtgaaagcttaccttaccaaagg

SEQ ID NO: 10550 - DNA, 1020 bp, Heterodera glycines
aaaacgaaaactcaccttattgaccttccatgaaacctgattttataccattcttaaaataaattcgctcttttcatacaaaaattgctccgcacactgtggacgcagtcatgagcacctcggacactttactttcttcacctaggacactttccttactccagacacattaatcacttcggacactttcttcacctcttctttttttgactccttaaattaaacaaaattaaaatcctttaccctaaaacaacgaattaaaattcaataaattaattttgaaaaaaacagcaaaactattttggaaattacaacttttacctcccaagccttgaaggccttacaaccaactgcgacagttccgccagccacgagtgtcccgatgtcagaggtaccgcgcattggactacctccccgatatcccccaagatttgtccaccgacatgcttcacgatttgtcccccgacttgtcccacgatttgtcgccctatttgtcctccggtttgtccactgattgatatcaattgctgccccaaatccgcaaaaaaattaaaaaacattttttggcaagcagaaaaaatgatcagattaggaatgtgtttgagaatgcttaaattaagaaaagaaaaaacaatgcgtttataaccgcattttcttcattaaaaagaaaatatacatttaaaaataataatattaaatccatttgctgtgattgatgagaatcagaaatggaatattccaatttaaatggtgatttgtgtcatcgaatgagcatggaatgttgacgaatgaagaacagaaaatgacgtaaatattctgttagagcatgtaaatatttacatacatttgtttactgaccgaaaagggttctctttcctcctcattggtcaatgattgatcaaaaacagaaaccaataaacaaaacttttagctgtttcaaaggtacaaatgaaatttggaaagcggaaaatttttgaataagataataattaaaacaaaaatttaaaaaatgacactaca

SEQ ID NO: 10551 - DNA, 4150 bp, Heterodera glycines
ttatatatttatctaataaataaatgctgtttaatgtggatatagttattacatttttagagttgtcattaattgataaattatttatatatattcttttttgtgaaaaaattcaaaaaaatttcgcaaaaatttcaataagttttcaaaagttcaaaaacaggtaataaaaaatatatgaaaaagttgtgaaatttgcattttattttgggcatttcatgcctaatttatggtttcaatgaagatgctttatattaatcctttgtattttattggcttatctgcagaatttataaattttgttttcttgttgaggctcctttgattccattttccgtgttgagtttccatttatttagaactcacattcatttaatttattgcacttagtaagaaatttatcaacattcataatattaaattcttgtttatttaaataaaatttttatgttttttcaaaatttaaatgaatttacatgagtaataatattggtaattaattttttatgttcctttctcggtgcttcccttgtctgagtaccaaaaattattttctccgttgcatgttattaataattatattattcatgttttctaataattaaacttattttacatattttcgagttgcagtaatttatgacattttttattttatgaacaaaaataaataaatatttatgaattgcttgtgaaaagatattttatttctagatattgtattaagattgaatgttttttcaaaatccaattggtaggtttctgcacaatacacaaatgtgcttttcttttttaaatctcataaatttgtaaattttatgatcattccgattaaggcatttgagtttattcactttagtagtaattttcagattattcatcagaaaagtttcttcttaatgatttttattaaaattatcttttccttcattattcctacaagactataattaattattttactattattttttgttttgaccaatgctgtttttatacgaaatttattatcaaaaaaataaatttaaaaattaaatgcagaaagttaatacgttttaaataatccactttcacttgatccactggcattttatttcttggaggtttaatacattattttttttaaataaaacataaagttttttgtatattattcatttttgaatattcttttaaaattaaatgctgacagttcccgataatttatcaaaactgatttattaattaaaatatatttggattttgattttattttgcaaaatgcatttctgtttgctaaattgattttgttttttaatttagaatatcatttatataaatcacactctctatttgttcgaatattttgtttattatctgagaataattttattattttcatttaatttattattttaatcaaattctgattaatttttatatcagatttttaaaaaaggaaaattgcaacgaaccggataaaatataatgcctaaaaagcagcttctttttaataattaaaacaaaattttatcttgtttatgcttttcttttgctatttactaaaatgaaaataaaaccaaatgttttggacagggaattttttgttagcgatctttgcttcagttagtttttagtgtaaatttttgatgttttcaaaaagaaaaattaaataccatgtttttcaaattaaaaataatttaatagaatatttaaattaaatttaagatacaaccaaattggaacagctaatcaaatattggtttatttacatcttgtcatctttctatattagttccagtgtctgtttttaactgactgataaatataaaaatattatttttgaactaaacgataaacaattgttgttaatcataattttgcatttttatattgttattaaggtttgtgaaactattttgtattttacattttattttctggtagtaatatttttttctcctttgaataattaatttacattgaaattgacaagtatttaatttactttgatggtgcaataaatttaggactttattggttcccattcttgctcgggtaattaattggctttttccatcacaataacgatgaaacatttgcttgttttacatattttaaaattctagataaattttttcaagttatctattttaggctaatctaaataattattatttttaattcttaacaaattaaagataatatagacgaaaaattattgttatgttttgtatgtttgattaatgtactttttacatttatttatcttttatgaattttttattaaaaaaaagattagttgaatttaattgaaaatgattttcatttaaagcattcttattaattttcaagtgaactctccactatttgtgtgcatggcaatggctacagttcaaaaatacacttgtttagtattttttgacaattttttaaatttttatttattctgtttagttattatgtggcgaactaaaaatgaatgtcattttttcgagttatttaattttatattattgccgtttaatcaaatccaatttaatgaattaatgattatttttttccaatagcaatttcttgataaaatattaaaagttttttttataattttgtgatattttttttatatttttgcatattaaaaagttttcattaattatttatttattgtttattcacccgttccgacataataatttattccttttattctaataagtttgttttttattttataattgaccatattcattaattttccaatgttttcgcaatgtcgctctgacatatgtcgggtcctcaaaagtcaagtcatcaaatgtcgggtcctcaaaaaactacttcaaaacaatggtaatgagaaatgtattaccgaaaacatatgtttttataatcttactttgtgatagaaagtatataatgataaaatagcctaaaaaacaaaaaactataaatgaaagagattaagcatctaacatctcttcaaaatccactttcatagaacgctcaggcataaatgaagataatttgaattaaaacaatgcatcaaatcagtaattaattaatattaaaattcttaaaatcctaatgaacatgatatggctacctgatactcggtagttgaacgtactgattgcaaagaggcatggggaaaaaagaatgcaattattgatagatagcttgcctgaaattgcataaaaatacaaaataaaataaaacaaaaactcaagttttaagcgcaaaaataagaaacattaatttttaaaaataaataaatatacttaagcatgaaaaattattaattaagtaaaacaaataatacttgtatattcattagaaaaaatcatttcaaattattaatagataaaaataaaataaaataaaacctgatgtataagaatagaaaataaataaaaatttatacaatataccgacgaaagaatacaaaaccgacctttgtaatggaaatataacattttaattaaacaaacaatgaaatactataatagtttaaaaaatataaacaataaataaaaccaccatgttagtgactttgggttgagcttgatggcattgagaaggaacagatagagcggcctggcatgtacacatattattggactttttatttgatttcaattttgcctttccttcgtttatttataaattaacagatttctataatttaaaatgctttattatttaggtttataaaaaatctctgccattccgcaccggcagtgcacgagggtggaagctcacctccgccagtaaaatttttttctttatttaattaatatttctcaaaataaaaatgatttagactattaacaaaaaaaaagtcctcaatactttgttgaatttttttgaatatatatttttctctatatttttgataaatgtttatgctatttcgattctcgctttcggaagttctcgttttagtacctatttgaaattatttttcacgatatttttgcatctaaattccaccaaaatctcaaaaaaaaaaattttaattttttattttacattgttaaaaaaccttgaattttcttaaattaaagtattttacctacattttccaaatattttattatttatttataaaaatcttttaatttttatgaatacttttggattatttaatttgtgaatttattataaatac

SEQ ID NO: 10552 - DNA, 2846 bp, Heterodera glycines
aataaaaaaaccaaaataattttgtattattttcacttgatataaattaaaaatttgaatttttttttaattttttaaaatttcccggttggtcccggttcccggtcccgaaaaaaaatcgaggtcccggtcccggtcccggcttctcaggtcccggcaagtcccggtcccggttttggcaaaaattcccggtcccgtggcactctagtttttcattccaattattattaatttttattgaaataaaattatattttttaaagttattttagtatatgttatttaatagaaatgttgaattttcaattcaaaggtcggtctacataaatttttatttatttactattcttatcaaatgtgcattattagatgagtaacaaattatctattggtctatgcggtaattttatgagttcattcttatttataaaattatttttttggaattataattttatttatatttttttaatttttttatataatctcggcatcttcactcagtcttaatatcattaatttttctatttttttagtatattttaaatattttcagttttatttatttgtatttttgaggtttaacattgtatttttatcattatctttaataaattcgttctgcttttccttttaatcttgacatcgtgaggctcttctctctcgcactcttgagccggaagtgttgttataatatgcatttgtaaaaatttatttatcacaatatttctgcatctaaaaacctctaaaatttaataaatcaatcattatttttttttgtaaaattttggaagtcttgaattgtcataatttgcaaacattttttctattttaatttctcatttaattaattttcattactaatgtataaaattattttattttacacatttattcagcttttgattacttattttttgaattttattataaattaccttatgtatttaaatatgcatttgaagtttggctgtccataaagccatgtcggaaagccgttctgcgctcgacgctcaaggcttttggagtatttactaatctagatctttattaacttctttatcttaatgataaaaaaatatgaatatcaatttttggtactttcctgttttgaaggcgcacaccatttggtacttgtacatttacacctcataaatttttttttgtttttaataataaatgagttaatcacgaaatgacatcatttcgaccaatcttcgaaccccggacccgaattcgcacaaaaatctaaaatatgtttttcaccaaaatccacctttattgagatctgaatgggtcgaaatggacatcatattcgtggggtgcgccttcataacaggaaagtacccacttttttgtagttttatagcattcactattaatttatttaattttttctgcctgaaaaaatgaaatgataagtgcaattcaaaaaatatattggcctggtttgaccgtgattttttagtactctgagtcaatattttgtttcatttgtgagccatctttcaacattcaaaattattttatttttaatatttcatttttattttaaatgattgtaattttatgcattttaaagttttttgttatttaataaagtttataaattaatttattatatttattaatttttttcttgctgaattctccaagtttttgaaaagctgatttgttggttttctatattttcttattccttaatgcattatgaaattcattttttatagaatttattcattttttaaatcattattttaaatatattttttacttccgtatattttttatattccatttttttaatgtataaaaatgttttaaacttttatttaattatttattaaaaatgcatatgaattttataaaattttctattatttcttgtctttggcctttattacttaccgtatatgctcgaattatcgcccagtctctattaatcccgcagtctccaattatccccccatttctgagtggtttaaaaataattccccatgggtgataattagagcatatgcggtagtttgaattcttaatttttaatataattgtaaatattcaacaaaaaatgcgattcgattttgaggcaatcaatcatttcaattcaatcaccttgctttttcaccttcgaaaccattcataagaattctttcgaagaattgggtgcattttcaattgtattatcttcattccttgtggttattaagacctattcaaagtaattaatgttttcacagttattagaaatcaatggtattatattaaaaataatattttgatataaatgtattcgtgccggttgttcgaagcggcatctcatttataaagctaattaatgagtttaatgcactctgactctctgtcattggaaaaaataattcatttaattatcatagttctgttttatttttaattgattttttaaacacatatattgtttatttatttttaaaaattttatgaatttgattttaatttagaaacctaattaaaaatattataaatatttctttattatatatttgatttattttcaatgttaaccgcggctttctcatcgtcatcttgatcgtacaacagcttactgcaaaattcttcttcggccataaggcatccaattttaatttcaaaattaaattattcttcaatttattatattttatttaaattatttttttatttaaaaaaaatataatgcttttaaaatcatattttttctctataccttttattaaattattttccatattcttggcacctttcaaatatccccccggaattcttcataacggcccttaatttttggtgttaatttatatttttttaaaagttaattttaattt

SEQ ID NO: 10553 - DNA, 2212 bp, Heterodera glycines
  unsure (1)..(2212): unsure at all n locations
attttcacaaaaaaatttccggaatttgggcttaaacaagtttaaattcatgatcatggttgacagaaataattttttttttagcgttatcaaaagtgacccaacattcgccgaaatggcacgatgtgtcacgtcgatcgcgtttctccgcattggagatttggcccccggaatcatttgctctggacagggctctccctgacgaacttactcccgtccttgactggtaaattgacaatctcacaaattgtttactatttattgttctttaattgtttaataggttcgtcatgaactacacgggtcgtcttaagcatgatggaagccgaacacgcccgcgatttgacccaaacatttggagtgtttacactcgaacactgcaaggcgatgaccggacgaataaccattcagaagccgcgaacagacgcctacaatgcgcatttgcctgaaaacaaccatcgatttggcatttcattgaccttctgcgaaaggatcaaaagttatcagatgatgacttcgcgaagtgttcaactggacaagaaccaccgcaaaaggcaaagaaatatcgtgaagcagaccgccgaattctcacgatggttcaaaattatttgccacttaacaacgcagacaccaacattttcccaattcatcaccctttcaatcatctatttatcattacatttttgatcggaatttctcgaaattatgaaatgagaccgtgatttgaaacaaataaattttttaaaattttcttggatttttaatttcactgtctttttaaacttttggtatggaaatggcccaaatgcattggtagggaattggcggtagggaatcggccggtagggaatcggccggtagggaattggctggtagggaattggcggtagggaattggcggtagggaattgggtcgatccctcggcccagactttttagaatgttgatataaatttttctttttcatttctttaatttaccgaccactaatgtttcagttatatgtatatactttttccttaattttccattccatctctttttggtaattaaataattaatgtgaattagcgtcgatcacctgattccaccgactttattattttcaaattatatacataaaatattttcctctcacattaatttggtggactaaataaaatttaggtttgggtatttgacgtggtgtttaaagggcgtggcaccattttcgattgactttgtacaaatcagaaataaatatgcaacaccactccaatcggttgagcggtgcctttaacggattggccatcgatggcggcagaacggccacactgtcacaacaacaaatccaggcaaatttaatttttacgagtaactcttctctggcatttcggttcatttttactctcatttttagacagaaatccaacgttttgagtcagttcatccgcgcatttatcaaatttatgatttgctgaagaaattgcgttcggaccaaagcaggcaagcggaactcattgaacaaatccaagagcaagtgatcggcattgaaggtgatcgatcatcgcaattttttgattaaatcccaaaatatgaactttccatcattttttttaattttcagatgcatttgtcaacagccaagaatggacaattggcaggacaattcacgaaattcgagtggtaattgtttgttttgtttttataatgaagttctcttttacatttttgaccattttactccgaattacagggagtaataggttcggaggacagctgcaaaaactcactgattcactattttctgacgcgcaattggaactgggaggatgcgcctgaaggcggacgcttcaaaaaggaggtgttcatcgacggactcagctacctgttgctgatcagggacgagggctctcgtgagccgaacatacaggttgatttgaattctttaaaaatatttgtttattttacagtttgcccattggtttgatgcgttgctcattgtttttgccatcgaaagccatcaaagctttaatgcggcacttgaattgcacaaaaaagtgcattattttcgtccgttagattcgaccgatgtgccggtttatctgatcggaatgagggtaacaaattctttatcaattggaanagaaggctatagtacatttttcaaaagatatgtcgcanatggcacagaaacgggcgataagcgaattggatgccncacggatgagca

SEQ ID NO: 10554 - DNA, 1239 bp, Heterodera glycines
  unsure (1)..(1239): unsure at all n locations
aagccgtacacaaaggaatgacttcatttgtcatgccatnccgtcctgttcttcctcatccgtctcctatcacaacaacaataactctgccgttttccatgcgccncaatcgtctgccaacggcacaacttttcgcaatcagctgaacagttacacatcatgcacaccgaacagcaacaacaacaataacaatgccaacctagtaatgcagaccaacagaagtgagacttaatggatgagttggtattacacggagcatgtcgtttaccccaccgaaaatttaaaaaaattaattaaaacttgtcagaaatttttcaagaaaaaagcttcttgttaaaacattttttatgagaaaattttctgaaagtaatttttaaaaaaatattcagtcgattttttcataattttatgataaattactatgtttttttcaaaattttcctaaaaaatcgttgataaaaattttcttaagattttctcataaaattttttaaaaatattttctgtttgcaaatttaaaaaaaaattcgtcagaaatgaagtgcacccgttattactatttacagtgaaaataaaatgttcccgaataaaatttttgaattgggctgaactgcttggactgtccttatttattgcctttagggcgagagtcgatggatcagcattggcctcgctctgtcaacgcccacctcaacaatcacgccagtcaccagcaacttcaacactcggtcggctcgccgtacatggtcgcctccatcccctccacgccctcctgctccgcattggtcggcccccattgtgccgttgtcgaacctttgacgccgtcggccatttcatccgcattcagtcacaacaatttggccacaaccgctgcacatcaccagcagcaacacaacaacagcaaccattatgcaagttgcaacagcaccaatggtgaggaatatttaaaccaaatttgagaggtgtcaaattttggagaaaattttgttattttggaccacaaatatatcaattattttttcattctgctcatttggatgcaatggaaaatgctaacaaacacctaccaattatttttcattgtgtgtcttctcggggccaacatttaattagttaaaatttttgtaaaagagtaattaaagccaattcttgaatacctcagacatccatttttatgacaaataatgcaattttctctttcaaatgacaatcgatattctatgaggtcattttaataat

SEQ ID NO: 10555 - DNA, 1012 bp, Heterodera glycines
  unsure (1)..(1012): unsure at all n locations
ccccttgtaacacctatggactgtagacaaagggacttntagaaaataacaggacttgaaccggaaactccggtccaaatcctgaaacaagtttatcaaactcattttcagttcggtctccgtcctgccactcaacaatgatcagtcaaacgcgcaatttccgcctgcttccagtttccctctcgttggaggcggcacagcggcggcgccgcgaagccgtacacaaaggaatgacttcatttgtcatgccatcccgtcctgttcttcctcatccgtctcctatcacaacaacaataactctgccgttttccatgcgccccaatcgtctgccaacggcacaacttttcgcaatcagctgaacagttacacatcatgcacaccgaacagcaacaacaacaataacaatgccaacctagtaatgcagaccaacagaagtgagacttaatggatgagttggtattacacggagcatgtcgtttaccccaccgaaaattaaaaaaaaattaattaaaacttgtcagaaaattttcaagaaaaaagcttcttgttaaaacaaattttctgaaagtaattttaaaaaaaatattcagtcgattttttcataattttatgataaattactatgtttttttcaaaattttcctaaaaaatcgttgataaaaattttcttgagattttctcataaaattttttaaaaatattttctgtttgcaaattaaaaaaaaaattcgtcagaaatgaagtgcacccgttattactatttacagtgaaaataaaatgttcccgaataaaatttttgaattgggctgaactgcttggactgtccttatttattgcctttagggcgagagtcgatggatcagcattggcctcgctctgtcaacgcccacctcaacaatcacgccagtcaccagcaacttcaacactcggtcggctcgccgtacatggtcgcctccatcccctccacgccctcctgctccgcattggtcggccccccattgtgccgttgtcg

SEQ ID NO: 10556 - DNA, 1244 bp, Heterodera glycines
  unsure (1)..(1244): unsure at all n locations
agttggctgggaagttgcgacgaatttggcatttttgagataatcgaagacaaatttggcaattgggaaagagttgaagacgaatttggcatgcgggaaggacttggcaatggcttttgggtgggaataggcgatggttggctgggaagttgcgacgaatttggcatttttgagataatcgaagacaaatttggcaattgggaaagagttgaagacgaatttggcatgcgggaaggacttggcaatggcttttgggtgggaataggcgatagttggctgggaagttgcgacgaatttggcatttgagagataatcgaagacaaatttggcaattgggaaagagttgaagacgaatttggcatgcgggaaggacttggcaatggcttttgggtgggaataggcgatggttggctgggaagttgcgacgaatttggcatttttgagataatcgaagacaaatttggcaattgggaaagagttgaagacgaatttggcatgcgggaaggacttggcaatggcttttgggtgggaataggcgatggttgggtgggaatgtgtgacgaattaggtaattgtgtggtcattgacgaacaattactacataatttgagtactgggcctacgaatgtatcacaaaacaaaaatcctcttcgaccccacggacgatagaatgcttctttgtcagcgtttaaatggctatacacaaaagtgaggcatttttgggaggatttttccagtaaatataaaataagcagcaaataataaaataaattcatctgctatacaccatagctttcaaaagaagctttacatccgatctgataaattaatgtgcaatgtatgggaaagggtgttgagcaaacgcttgaggcggagattaaattgtgaaaacgaaaataattaaaagaaaagggattttttaactagtttgtgaccaattttttataccaaaaaaatgaaaattttttgttgtcctacggttgatcatcctcctttttatcttcaatcccacattccttccgtcttcttttttttcctcatcatccagtacattccttcggtcaccactttcctcttcgcctttgtggaaaaaattgcggacaccatttggtggcacggtcaaagcacgggtggtgatatacggcacagcaactcttgtaaatggccacatattctccacaaagtgttggaaacgactcaaacgctggaggatacacattttgcgggcaaactganagcgaaaa

SEQ ID NO: 10557 - DNA, 793 bp, Heterodera glycines
tttgggtgggaataggcgatggttggctggggaagttgcgacgaatttgcattttttgagataattgaagacaaatttggcaattgggaaagagttgaagacgaatttggcatgcgggaaggacttggcaatggcttttgggtgggaattgataacgtattagacagttgggtgggaagttgcgacgaatttggcatttgagagggaaactgcgacgaattaggctgttgcgtgccaaatggcaatggtttttgtgtcgaaaattgtgaagaaattggcaattgggaaggaattgaagaagaatttggcatacgggaaggaattggcaatggtatttgggtgggaattgataacgtattaaacagttggctgggaatttgcgacgaatttggcatttttgagatatcgaagacaaatttggcaattgggaaggaattgaagacgaatttggcatgcgggaaggacttggcaatggcttttgggtgggaataggcgatagttggctgggaagttgcgacgaatttggcatttttgagataatcgaagacaaatttggcaattgggaaagagttgaagacgaatttggcatgcgggaaggacttggcaatggcttttgggtgggaataggcgatagttggctgggaagttgcgacgaatttggcattttttagataatcgaagacaaatttggcaattgggaaagagttgaagacgaatttggcatgcgggaaggacttggcaatggcttttgggtgggaataggcgatggttggctgggaagttgcgacgaatt

SEQ ID NO: 10558 - DNA, 2580 bp, Heterodera glycines
  unsure (1)..(2580): unsure at all n locations
ttttttaaactcctttcccattattcgcttgcacttacactttaagcacttggtccaccgttgaatggccggtgcttatgacgtcagggttatgggtataaaactcgggcaccacctgggatttaattaggcaattaaattatggaatttcccgtccaaccctgcctatcattatagaaaagccgcgaatagccacatttcgcgtgctgtgcaagtccaccgactgtacattggcatttgccacgtcaccgacctaagggaaacagaagcaaaaaagggcccaaacattagtgttaaaatgagaatgacatggcattaattaccatggccatggaagtggaaaggccgccgacgagagggtcggggatggcggacagaacggcatccagtttggtgaccacctgaaccaattaatgtgttaattgatggacgaaatgaacaattgatgaaaagttaaatgggccaaatagaagcaattaaaataaaagtgaggcaactaacagaccccaaaagcgatcattgtgagtccgccaaaaagcattgtgaccgaattggcctaaatttccaaagtattcgattttttttgaaattttacccgtgagtgggacgcgcgcccatggcgaatttttttgagtggccatttgggtggcatttttgtccgtccgtgccacactgtccttggggatcagctcaaacattgtcattagcaagcacagggaccaggagaacagaatagcagtcaaatactgtagaaaaacaatagaggagtaagtgatacggtagaagcaatgaaattcgaaatattttaaaaattaacgaattcaattccagtttatcaaactatgaaatatttttaattttacggacacagattgtcaacagaaatcaaaaaaaactgctcggaaataatcattcagttactgtttttttgaagtgtcagagtatggtatgtttgtgtttagtttaaaaattaatttataattcttaattttatcaaatctgaccggaaattggccaaaaacgttgaaacgaatcaatcgaaagcgtccgttggcaaagccggggaatgggacgcggagaggggccaagtaaagcacagtggcgaagagagcggttggttattctgcaaaaaaaacaattaaaaaattgggatttaaatttaaataagagatgccaaaaaatccgaatccgactgatcactggtcattttgccaaccattcccgtggcaccgatcagaaaagtgatgcacgaggaagacattagagtgccttgtatctgaacaacaattaaattatttttattttattaaagtgttgcgccttcttcgagtcatcggagaaaaaaggcgggaattttggggattaaaaacgggatggagacgagcatggacagggacaccatcacttggtaaagcggaaattaacaactttcattggttagggtatggtggggtacggtatgaaatgattgtgatatgcacattgatttattggactgatcaatcaatgcttgcatttgttttacctgaaagccaaacaaaaaggtctgcagaaatggtgggttttcgtccgctttgtacagttttctttgctgctgttgtcttttgtcggcttttccctccgtttaggcattgcccgagggcataaaatcgtggccattcatttccgctgaatttttgtactgctcgccattggcagtgtccaactccgattcgttgggacaaatcattaggtggacgaaaaattggcgaaaactagggggaacagagcataattgccaaattaattaatctgagaagaaacccttagcaagaccaaacaatacttatgccaaaggatgccaaaaaatcgacggaattcgtgcctttaaaattgttggggattcaatagtcggaggcatcggcggggttggttggtccctcccctataatatgccttgactgatcatctgactgatcagtgtgcgctttacatcgaccggtttctgctgcccacccaaatttcattatttcatttatatataaaattatttttgctgcatggaaaaatcggatgaattgccattgtcaacccaagagatttgggattaattactcttgaaacctgtatataaaggcacacaaaaatggttcggttgttgaccgatgctcgacttttaatattccaccaatcgcagatgaacattttgcccgtttggccgtattctttgccgttcattgaacgaattgcgatgacaactttttcgtttgtgtgcaaaatcgatccaaaaggcagtggtggtattagttcggacggaagttattgtgccgtaagtgaaaaagtatttgtagatgggcgattctgtggggaaaattcggatgaattgccattgccaacccaagagatttgggattaattactcttgaaacctgtatataaaggcacacaaaaatggttcggttgttgaccgatgttcgactttcaattttatcaaatgtttgcgccttgtcatttccttcacttcgtcgtccatcgaattccttcgcaaaggctgaagaaaaaaatcagattttaactgattatgacctgnncnaggcatgc

SEQ ID NO: 10559 - DNA, 883 bp, Heterodera glycines
atatttcatttttataagaaactaaatgttcaattttcttttttttttctaattttattgaacaatgccttttgtgtcgtatttataccccattttttccatccttttgtgccatatttaaattttaattgaaatttaaaatctttttttacatgaattttgtgaatcgtataataagtagggcgcggatttttaagtttttattttattttttctgcggctttaactcgacgagaaatgcacgaaaaacacattttttgttcggaaaaccttcgttttaacgcccctatccgaccctagcaatccctattttggatgttcgcccctaaaaatccctattttgagtgttcgcccctaaaataagtttttatccttattttggcgtttcgcccttattttcgtccttatttcgcgatttttaaatttttcacataaaattcacaaattctttaacaaaaatgctacgcaaaaaacttcttttttttttgccgcgatcacattttttagcgacttgttcaacaaatattttcaaaatacactaaaaattttttttcttgaccaaaatttttgtaatttgttttctttcgtgtcaaaattttgatttttgaaattttattattttgggaaaatgtattcaaaaatttcgaatataaataattatttgcaattgtaatcactgaataaaattgtttgctttagctttaacttatttacatagaaaaaaaagagcaatttaataaatttcacccatacatttgaaactttttcgcacctatttcgcgaattttttgcccctatttaggtcccatttggactttttcgcccctaaaaatccgcgccctaattataagatacaaattattttatcaatcactgagttttt

SEQ ID NO: 10560 - DNA, 1754 bp, Heterodera glycines
tttcagaaatacccaattccttcgcaaattctttctgtttgccttggccatataaacttttgaattcatcaaagcgttcaataaattttttctttttctgatcacaaaaactgttttccatcattttctttttatttaaatttaattcttttttccatttatatattttgtcgcgatttgcgcctaaaaattttccaatttttgtctcaattttgactctgttttcccatcgataatttcccctttgcttcaacttttctttaattgcttcaaatttttgaatcatttttcttttcttttgatcacttttgaagggttagaaatcagcgtaaattaatcctatacagtaagactgaatttattttaaaagagtagtaaaaaatcacaatttttctcatttttttgcataattttgcctactcttattcatctaaatacagggcgagtatcgaaaatttttcaaaataagaacatttcgcaaaattgcttcaaatcagttatttttacaatttattcgatcaaaaatgtatcaaatagtatatttttgtctcccattaacgattttaacaatttttgggaggaaattagcaaatcataaaattttagtgcattcgggataaaaaaaaatcagatttttaacaattttttgcggcgcatttttccaaaaaacttttgggaagtgcgaggggagggggtccggcggtgccgatagacgccgccggaaaattttttttgtaatttaattctgatttgttaacagattttcaccaaaaaaggccaatttttgtattaaaagccaagcgacgactttttttgcctttaaaaatactttttttttgcggtgcgttttttcaaaaacttttggggaacaaggggggagatggtccggcggcaccgataggcgccgccgggaaaaattttgttattttatttttgaataaatttatttatttaatttatattttcttgataaaataatgacattctgccataaaatttcaaaattttgaatatatttaagaaataagaacaatagcccgaaataaggacaaatcttacaaataaggacatttttattttgtaagatttggaccctccaagtaaggacaaatcttataaataaggacagatacgcgccctgtctacatataacagaccaaaaaaaatttcttattaaaaattgtgttttattgttacaaatttacgcattccatcggttgaagtcgtcaaatagagaaaaaggcaaaatccagaagcgaaaagttcagtagagatgtaaaacttaatcagtgatacttacaaattagttgaatagtaggcaaaatttcaaagtaaaaaaaaacgtgaaaaaatacgtttttttacaattcttataaaatcaccctattcttaatatacgaaagctaatttcggtggttgtaagcttcgaaaattttcaataaaattgcctaaataagaacttttaactctccgatactaaaagatgagattttttgcgttttttttttacttttttaaatcttatttgagattttattttaaaatgaaaattcattaactaatcgccaaatgtagcaaatatttccgtttgctttggccggaaatttattggattaatttatcgcatttgacaaaattttggctccggcgccaaaaagggcctaaaaaatgacgaaaggtcaagtaaaccgaaaaaacctctttggaaaaatttcgggggatataatttatccatttttcattatatttccatt

SEQ ID NO: 10561 - DNA, 765 bp, Heterodera glycines
aattagaaaagaaattattctaatttatgtactattggaaaaaattaataggataacaaaagattatttattaaattttgtaattcagtttataaactgatgttgattcgaactttctttcggttcaaaaagttattcaatttatttttagtggcaaactttcaaatttaaaaggaattcaactataggtttgtgctattaaataagaatttcctggctaaaatattctttccgtgcatttctcagcaaaacaaatcaacagaagaaaattgaaaactaaaaatccttccctgtaatcatattccaaattataatgattattcactaataggacagaaaagcgtttctaaaaatattctgtgaatttttttaattggccggaaagttttaaaaaatgccaaattaaggctcttattcattttaaatagatttaatataataaactttgaaaatatgaattttcaaagctataccgaattttcaagtaaaatgaaattgtgcaaatttcctattctataataaagtattatatagtaaattttataatattttatttttaattagtttttaaatttattctaaaaatgaagatgaaaaattgtgctttttgaatattttaattcatttcacgttataatattataaagaaaattaaaaaactcctgttgattaattaaatttcataaattaaattctacaattattcagttaatttaaccaaagataaattaattaaagcaaataaaaatgaataaatattaaatt

SEQ ID NO: 10562 - DNA, 3067 bp, Heterodera glycines
atgatgattgggtttgtttatgcaattactaactattaaaaaaattttaataaaattattgctttattttgcttctataaattcgagtaattttgataattaattttgatgtatgtatcattttttagtagatcaatatagaaataaattatttgtcaaatttgaatatttttaagatcatttacaaaatattttaattctgcgttctaataaaataaattgattattttcacctttcgcaattaatttgctgtttaaagtcaaatttcttctaagttttgttgatttgtattttaatgattcgaatgtttattttagattttgtattgtaatttcatagttctatattcgcattttctttcgtttctttatgtattaattattgatcttatttattgaaatatacataactaaatttaattattaaaattttccacagaaataagtaagttttttttaaattgtatttaacattttatttattttctaggataaatttttatttataatttaagaaataatattatttttttcatctttttatttgaatttctatattggtaatttaaaaaattttcgattttcggctacttccgctttccgacgtttttggaattccaatttccgaacaattttttgcggggctcggaatgccatccccgctaatcttcctctttgttggttgactgttcttatttaaaattgttaaaaaaattttcatttctttatggaattatttttattattatttcgtagctttcggtttttcgttttgtgtgccgttgatgcaatttcataatccttaatattttatgttttttaatattttgctttgatttatgttgtttgttcattttatatgcaatatatttattcaatttttcaattcacctttttattcataataatccatttttgatataaatttaaaatttaatttttaaatttaattttggctagcttcaaacataaaacatattaattattttttcagtatttttattaaaattttttatatttttttaattacctttttagattttcatttattttggaaagttttactttatcattgcaacggctagaattaaatttttcgttttttctttcaaataaataatttttgattattttatttgttaaattaaatgagatttgttaatttttttgtatattttcaaaaaatttttggaaggttaaatctttatttgttatttaaattatcaatgttttctttgattgaaaataaactgtctgataagttatcaaatttttaaattgcaaattttcaaaatttttagtggcaccacaaaagttcttttgaaaaaggcgtgccgcgaaaaattgatgtgaaatcattatattttaaaattaaaaataattgttgtcgattttgtttatacattattgaaaatttcatttggaaatcccacggtcacctggggaccttcctttgtaagtgttttttattaccctacaaaatttaaaaaaattcgttaagtttcaaaaagttataacctgagaagctcaacaaacaaatgtttttcagcatttaaatttggttgcttttgagcaaagatatattaaactaatttaatttcgatgatttttgtttgagtagcgtcatagcacctttagaacgtcaattaataaaacttttttaatgacatcccccccccccccccgggaccgtccctgcccccgcttcgcccttcttttgcctggttgtgcgcggctgctgccgcagcgcccgcggcaacggcggcggacgggcccgtgttgaggaagtcccagatgagaatggtgtcgtcatgggagctgctgatgatttggaactcgtcaaattgaagccgaaaaacgcgtccggtgtgttgctgaacgaacatcaaaatgttacttaaaaacaagaatgttcattggccactgaccagcccgtacccgagcatttcgtaagttttggagggtcggaattccattggtatttttgaaaatccggttcaacatacctggccctgaggcaatttacttccaccgaaaattaaacaaaaattatggagaaaacagggcgaatttcggcctcaaactctcgaaaatttactttgttggaagctaaatcggttggcaattacagaaaaattcaaaattttgcttctcgactcgccaatatatgtcattcgattcgcatttttccctggttattagtctgtatgccattgatctgccgactgatcactcaccgaaagtgtctttatacagatggagttgggcggtgtcatcgggtcaagtgccgccgccaggtcccagatcataattttgctgttaaaaaaatatttttaaattatgttaaaaaataaattaataagaaaattaagcattctgctatccgtgaagacttcttgccattttcaaaaaaagaaacaagaaaaaaaataataatttttaaatattttttgaataagttaaagcatttagacaggtaattaattcaaagaatggcaaataaatagattttttttggttttcgttatacctttttaattttgcaaaaaaaaaactaaaaactttgattgttttttttaattttcggagggggggggggggtagcaccttgagacaccccctgtatatgaatgacagaaattaatgaaatttacataaaaatacattttgtattaagcaggcccgtagccgccttcccccccccccccattttgtcttattttatgaaatttgacctcaaaatggttcaaaaaattgaaatttttgcgcaaaactgctataagttcccctttttcgctttctggggcttatttcaatttacgtcatatcactgatatgacgtcatatttttgaccgatttttaaatgcataaaattacccgtcggaagcgccggacacaatgcgtttggaatcgaagcgaatgcaccgcaccaaatcctcgtggccttccaacacgcgcaagcagttgccgcattcgatgtcccaaagtctgttttggagaaaattgaaactagttaagtaattttaaacgaaatatgccgaaaaaaaaaattctatctgtgggttt

SEQ ID NO: 10563 - DNA, 2040 bp, Heterodera glycines
  unsure (1)..(2040): unsure at all n locations
ttttagtattttttgaaaaaaaaaatggaaaacncaaaaaagggaagggatacacgctgtactgataattttcatgaaaaaatttccggagcaggtcgtttgccctcccccagaaaaaattttcaaacctagaaatttttcataaaaaaattcttaaaaaaaaaaaaaatttgaaaaacttagtagttcttcataaaatttcgaaaaatcgctgaaaggtttttcaaaattttttttcttaaatttccttattaacaataagaaattttctaagaattttttttatgaaaatttctaggtttgaaattttttcgggggggggggggaaatgaggtgcacgcaaaatttcatcacatcgactacggccttggtaccattttgacatgccattgaaaattgagtttcatccttcacctgactgtcgcgtcactgctgccactggcgatcatctggttgtcgtactgcaggcacagcacggagccggtgtgcccgctcagtgtttgcacacagccgaggctgggccgggaccaaatctgagggggaatttttaaagttagaggtttaaatagaatttatagcataatatttcttagctatgttggctcattttttggccgaagaaaacccatagattagagacgttttaataaaaagtacagaaaaaaattataaaaataaacacgattttccatttccattgcaattaatcctccaatcggcgcaactgtcaaaggatttagttttttgggatttgtaagggagcaggcccgtagccagaaaattttttcggaaaggggaatccaaagacgtttgttttttgttgctcttctggcaaaaattaaaaaaaaatttcttcagttattttagaaacttgagcgccggggataaaaagcaggcatttgtagccaattttcgccaaaaattacattttccaatttttgggtcaactttaaaatggaaatgagggctccggtcctgttgtgccgagaggtgctatcggcagaaaaaatggaaattttgaccatttttattaacagatttccaccaaaaaattgtttgttgtgtgggttactttgattgtgttgtcgcgcagtcccgagatgatcttttcgtcgtcgtattggagacagtagacacctgaattggaaaatgaaaatgtgctcatcgatgaatttatgttttttggacagagtgaaggtggggggaggcataggcctaaagaatcatctcgtttccgcaaaggaaacaattttattttatttttccaaatttattacaattagagattttttaaatattaaaattttttcataacaatttagttcatgaatgttttttttatactatttgcatagaaatcattttaagtcatgttttgaaaacaaaacgattagaatatcgtggattctcttttaaaaaaatctcaataaaaattagaaaacttaaaaagtttctaaaaaaaaaaattttcggtaaggaatgtaatgagccttttttgaagaggaccggcgtcgaaatgcattgagccaagcattaaaaaattggcaaaccaaaatcgggtaggtttttaactccggatttgtgtcgacaaatgtccatacaccaaaaaaataatagttttcctccgccccatgcctttgctattctccgattggcaattgatgcgctccaatcgatgtcgtccctcgcgccaattctgctcaatttgccgaatgtcagcagtgatttttgggtaaagttcgctgaattattcgtttttttttaaatttttattacaaaatcctccatttttgtgtgtgtaccggtagaatttgtgctggaactccaacgcgtcctccccgttcttcggctgtctccacgactgagaaattgcgcgtgtcgcctggtccttggagcaaaagaagtacttcttcctggtgaagtgagggagagggaagaagatttaaatgtgaaaatttgaaaacattttggcaaacagaaaaaaatataaatttacaaataatgttaaaaaccanataataaactaactatttttagcat

SEQ ID NO: 10564 - DNA, 4142 bp, Heterodera glycines
tattggaagaaaatgtatgaagattgcaacaccgtttttgcacggtgccatgacgcgaagaaagcgcgtctcttcattactttcacgaacaacagggaatggcctgagttcaaagagaatttacacaaaaacggtcaagtatttactgaccgttttgacatgtggatgcgtgtctggagcagcaaaatcgctgagttccgagaagaactttatgacaaaaagttcttcggaacaatccttggttacggtgaatcaatggagttccaaggccgaggaggcccacatgcccacattgtggcgcaaacagacctggacgcagttccatatgtcattcaggaatacatatgggcgcacattccatctttgcctgataaagatgacgacacgcccattgcaaaaatgcatcgcgaaatccgcgaaacaatgcatatgcaactgcacagatgcagtgacagttggtgtggtcctagcgacccaatttacgggcggtgcaagaaggggttcccagccccttactcaaaatgtacgattttgcgcccggacaggcccgcgatgtatttccggccttcaccatctgatggtggtgcccaattagaggtaaacggcttaatatacgacaactcacatgtcgtgccgtataatccttatattctgctgcgttaccgagtacaccataatgtactgtttgcatatggtaacaaagcaaatattaaatacgcactcaagtaccctttcaaagggccaggacattgttatgtcgagtgcaaagaagagtccggcaataaaattggaattgatgagccggctcaatatgccaagatgaacttccgtggtgcaacggaagcatatgccattgttcattcaatgccatttgcccgtctttcgcatcatgttgtcaaattggcaattcatttgccaaaccaacagcccattgtatatagggcattccagctggtgagcaaagctcaacaaatccagcaaggcgaactgccagaaacgcagtgttcagcctattggaaacaatggcaaaatgagtggaagaatgatccaaagtttaaggacattcttttcgaaaaagtcccagagcggttccgatgggcaaaggacaaatgggtcctgtacaaaaggcagcaaattaaaaggccacctatcggccgaattgttcctgtacccccatcggacccggaaaggttcgcgctctattcacttatgcgtcactttcctggagacccagaccatcttaagatggttaatgggttgctttgtacctcattcactgaggctgcaataatgcatggtcttcttgaagacgacaaaatttgggacaaaactctggcggaggcagctctgtcgcgctggccagatcagatgagatggctttttgtgagcatcctggtctatggccagccgagtaatgccatagaattgtggaacaagtacaaagaccaaatgtacaatccgcaaggcattattactctggcacagcataaagtagcagagcttgaagccctagccgacattgattggcggctgcacagctgctttaacttaagctgtgtgcattttagcctgccagacccgccaacttcaattgccaaaaatactgacgcggcaattgaagagtttttctttggcgatgatgatttgaatttgcctccagggcaaccaaatcctcgtccacagccaaatacccctccgccacttaacagcgaccaacagaaggtctttgatgctgttttgttggcaatacagtcgaaccctaaggattcgactgtcccccgccgtttcttcatatacggcgatggaggcacaggaaagacattcctgtttggccaaattattaggcgcttgcgaaaggccccatacacctacaaagtgcttgctacggcatccactgggtgtgcagccattttgctgccatatgggaaaacagcccattccacgtttcgtctgggtagagaagtgtcattagacaaactcccaagcattccgctggagagcttctttgcccgtcggattcgtgaggcccaactcatcatcattgatgagatcaccatgcttcacaacacggtgattgaggtcatcgaccgagtgtgcaaagagatggcaattcgccagcacaaggatctcctcttcggaggaaaaacggtcattttcagcggtgacttcaaacagtcgctgccggtcgtgcctcatgaaggcttaaccgctcaggtgacagcctgttttcaaacgtctccgttgtttggtcaattcaccacgatgaaattgaccatcaaccagagactgggccaaggtcagcaagcgtacttgcaaatgtgccgccaaatcgggctcggagaaaccggagagcacttctggattcctccacagttcctcgttaagagcaaggaagagctgatagattatgtctatcctaacttccaacaactccttggcaatgacaaagagctgctcaatcgtttgattctcgctccgcacattgacacgtgtgatgaagtcaacgagatcatgatggcgaatgtgccaggtcaagtgcgggaatacttgtccacggataagccccttgacgaccgcccactggacatcgatgagatcgagtccgaagtggctgcgttgaaccggcgcacagactcgggcatgcccccgcacagtctccggcttaaagtcggatgcgtcgtcgtccttcttatcaataaaagtgataaggaaggactgatcaatggcacacgcatagttctggaagaacttggcgatgatcgcctcattggtcgtgttatcaatagcaatgctattggcggccaagtgagattctttcttgaaagaacacgaaatgtctatgaagacaaatcgcctggcggcataaaatatgagcgtttgcagttcccaataaagcctgcattcgctatgaccattcaaaaaggtcagggccaaacaatccgcactgtcggcattgatctggaaagggaagtattttcccatggtcaattgtatacggccttctctcgggcaacagacggaaacaatgtccgtgttcatgctcccaaccgggaaattgatgcccaaggccgagccaaagtgctgaatattgtagctactaatatgctcaagttacaataaatggcttagtccagagcagttgggcacatggtttttggagagatgccaatcccattcccatctgcactatgttgggtgcgaaaatggtgagaagcttggatccgggacatggaccggtcagccctctttagggcctacaggtgaattgccatttagcgctcaacccaataacgtgccaacgcctggactaagggagggaggagggccatgatgtgcaacgttagggcacttccggtttccattgcattatgcgatgtgtcaactccaattattggaggaaaccaagtgcatgtcggctgacgcaaagaccctaacagactaaaacgcgcctaggtagcgaagctcaagaagcgcgcagcgctttcccaagcgccaccctcgcatgcacacacccgctagttatatatacgttagaatgataaggagtttcgtttcaaaaactaatttgagaagaacgggaatagctggggggctgaaattttgcacacaggggtaactcgagacggcgcattcgggaaaaatacggattttttggtccggtggccaactgagtcccagcggctcgaaaactgactttgccgccagtctcagtgttacgaaattttttgcttttgctttcagagcttagcggaccccaaaagcgaaatgccccaactatggcctacaactttgccagcaaaaaatttttgatcagatcaaaggcctgacctgtaggttaggcaacgtaagaatcactttttttggacacttcagtaccaggcgaatagctcgtaagggtttgctcggagcagggggtcgccagcggacttattgtagagcttcgaaagctcgattttttgaaatttaaaaatttcaaaaattttgaaaatttttcgagctaggcctaaaattcggtttttcggtttttgaattttatgattttttaacgatttttccagggaaaacggagaccacttccaaaacatcgtttttcgagctctatcgattagtgatgtttttagaaaattttcgattttttccag

SEQ ID NO: 10565 - DNA, 1129 bp, Heterodera glycines
tgcgttgcaaagtgaggagcacaaaatttggcacttggcattttgccattgtaattttggcactttgccattgcaattttggcattttgcctttgccattccaatcttggcattttgtgtgttttcacatttttaaatttattttatttattattcaaccaattttaagggggttttaaaatttcaaaaaccagtaaagaaattttttaaatttcaattttaaaatttcttaaatcttcacacacccacgggaaaatttcttgccgattttaaaggattttcttgaaaataatgacaacaaattttttctttcctttcattttatttaattttgcagggcctttaccgaacgtgcggcgtgaagagcaaagtggaatggatctgtgtacaatttgaacaggtcagtggggcttttcatttttaaaataatttaaatgtttatatgaattaaaatttttcattttttttttgccttttaatataaaattccaaaatttcagatcccttcttccgatgttgacattgacttgtccgatgtgcacccaatgaacattgcatcagtagtcaaattgtacacttttttattttcaattacctaattcaaataaattttaaaaattgaaattaaaaaattaaaataaatatatataatatataatattttttaaaataattttctgatcaagcccgtaatcaaagctgggaaaaggcggaatatcctccctcgtgaatgaagattaatttaaatttttttaaggaattaggtgctttttgatgccattttcttaataaattcccttaaaaagcggctgtggcaccgccggatgataaaatctcattttttttttttgaaaaatttgacataaaattcacaaaattggtcatttatttttgtagaaatctgttaaagaatactagctttttcgcctatagtctataatttttgaataattacagaggaaaattttttagaaatcgaaaaaacgaaaaaatctttgggtcccccccccccttcgaatccatttcgattttggtcccgacaacaaatctcgttcgatcacttggcaattttgccaaacaaacccaacaaaacatccaccaaattctacaggtatttgcgccgtctgcc

SEQ ID NO: 10566 - DNA, 3799 bp, Heterodera glycines
  unsure (1)..(3799): unsure at all n locations
ggtcgacgaggcattcacaacactcaaattcctgggtcatgcacccgcacggagtgtcttggtcagtttttttgaaaaatttaaatatcgaaaataatttgaaattacgataattaggaaattgaaaaaatttcgggaaatcaataaaaattcgaaaaaataatatttaaccaataaaattcccattcaacttaaaagttcctacattaaataccttatttaaatgaaaacagttttgaaaattcaccaaaatattatgatttaattttgaaaaaacatttcaatattaagaatgcaaaaaattttgatgcattaatttttagtttgaaaaaaaatgtgtttaataatatttttcaaaaaactgaaaaattcaaaccattttaattaagggttaattataatttaaaaattttaattcgaagaagaagtcaattttgggaaaattctcagaaatattaatttaaaaattccaattgaatttgaaaattatcattattttttaaaaataaataattaaggtatttactgttttaattaaatatttaatttaccaggttcgaggcagacaatttaatgtccgtgtccaacttggccgctgtgatcgctccctcgctgatgtggccgtccaattatggcacccattcggcagcaattagtgacgcccatcggcaatcgaaagccgtggaaatgctcacacgacatgcacatgtgagtgggtggggataaaatagcgaccaaaaagccgccgatgaatgatcagaaaaaagttttactgatcaaataaggtttgggaaacccaaaaattgatcatttagaggcgccatttatgatcaatgtgatcactgacaagcaaaaaatcagaagaaattaattattgggttgctaaagagtaattttacggaaaaaatgtgatcagctctataaattgatcatcaaaaagagttccgagccattttttgatcatcataaccaaaaagtattaatttatttgtttttagagaatcatagaggttgaccaaagagtgaccagaccctttattgatcaattttcaagcaaggtgatcagaggaccttgttggtctgagaacaataattgttcatcaaacactctgtgatcagtttgatgtttgcctttttcagtcccgctgggtgccattgcacttggccaatttctgcaacttttgcattgtttcaattagcagaaaattggcgtagtacaaaggttcccattagggagataaaaatggcgagaaattgccattattcatttttggaataagctggattatggggagaaaaattgcttgggaatcaatggaaaaatttcaaatgattgcttctgacttcaaaatgggtgaatttttatcccctccggcgatgggggggcacaaaaaagtgggcggtgtcgcccgggggcacttcttctgagacgacgggataaaacctgtgaaatgaatggaattggtgcaaaatgttgggtttttttgcaatcgcaggtgtcagaaatgaatgggggaaaagaggggacaaattagcgacgcgaacgaataaattttgtgcttttcaccgccaattgtgagagcaaattgaaaaaatggtgatgaaatgaacacggctttcattggctttctgttttgttagccaattgaatcgtttttttttcatcaaaaattcaaaacatttttccaccattgtgccattttatgaaaaatgtcactgatctttggcttaagagatcggttgggtcggtgacaagttgtggtaacacttttgtggttttgaatttttgatcacagatacagaaaatttcaaaaaaaaaaattaaaatttcccataaaaattttgaaattttgtatggtcatatccaggggaaacggaaaagggggggcacgacgtgtccccccccccccccttaaaattaaaaatttttgcaaaatttgtccgaaaaatggctaaatttggcgaaaatgcctaaaaattccctattttttccaacgacttacaaaatttttttttttaatttattggaaaaaaattttgggccaaaagaaaaaaagagtcttcgtgtgcccctcctgaaatttttttctggatatgggcctgaatttcatttcgcgagggatggtgatttctgaccatgaaatggaatgttttcttttcttccatggcctatccatcccgatagcccgattagagtcaacagattatgttaatatcgactcttactgatccgaatcttttgggcattcctggtcctggtccaaaatttcagcattttaccgatggtgatccgctttttggtcacacaagtcttgattagagttatggcataatcctcccaactattcccacgatcccgacatatttgaacaaacaatccccacttccaatcgaaaaatatcatctggtcaatcactgatctcatctaatgcttccccttatggtacaggaggtgtttgacgtgaacttcgcgctcgattggcgcacctttttcgacacgcatccaaacgtgccggagccgacgaatgagcacagcagcgttggtgccatcgaccgaggtatcagcggcactcctcgtcccgagttctgcagcgacagcgtcgacggcgataacaagccgcgtcgccaggacgccggcgacagtcgtcatgccatcgtcggcgaccagcggcgcggtgccggaacgctcgctgcagttgatttgtcggcggaagacattgacgatgaactggtcgaagatgatgatgacgacgagaacgaagaggtggatgaactgctcgaggatgatgacgatgacgaggaagaagaggaggaggaactgatcatgacgtccgctgctgatcatcgccaccggcacggaggacagccgcagctgtcgggcggcggaattgccaaaaacggtgctggtgaaggagcggcacaaatgccatcgccggcggtggacgagaagaaacaacaccaccacttccactcggtgtttgacaagcgattgctggttgatagctactgtaagtggagagaaaaagcatgattgagattactgtattgggtatggtccaagccaaagaagtagtcatagccttgacttcgggagggggggggggaattaaaaaattcaatttttaggagtgtatttttctttttttagaaatcctgaattaggaggtgtgcttaacaggaatttgtagccgttttttgccaaaaaatgactattttttgtcattttgtccccgtttttcaaaaatatggtaaaataggggttcggtggtgcctttaggcgccgctgggaaaattttggaaaatttttaaataaatttgttgagcaatggcttaacattttttaaaaatttgccagggggggggttacccctccccagtggctatgcccttggtcggtcgcttaaaagattgacgggttttgtgaattttaaaatttcaatggcaaattaattatttcattaacattaattgtattaaaagctatttgcttgctgtgtttagcaagctctgagctggaatgcggttcgtcggcagcaacacaccaccagcaactgttcagagcgttgcaacatcccgcgcagcaacaacaacaacaacaacaacaaccgtataatcagcacagcaatggcacaacaaatgccaacaacgggcgactgaccggcattggcacgatcaacggcggtagaccgcccgctccgccgacgacagtgccaagtgcgccccaatcgccgctgctgatcagttcggcacggtaatcttttgcaatttgtggcttttttgattctcggaccnntgcagg

SEQ ID NO: 10567 - DNA, 2646 bp, Heterodera glycines
  unsure (1)..(2646): unsure at all n locations
ttacatatttatnnataatttntaatatattttttgtttatttgcttttaaaatatttccattcttctattatttttaaatttatcacagtaaaacgatgactctcataatgcgtcaactgttcgcctccttgttcttccttttgcttctcattttgctcatcactttttccgatgctcaattatttggcggatggggtcataataaaatttagaattatacctaattaattacaatatttttaacaatttacaaataatataaataaaatttaaataacaaatatttattgtcaggatggaactcccccatttacatgcctggcgtttactgtttacatgccaaagtgtgcgggtaaaagaacaaaaacaaatagaccaatgatggcagaatgaccaaaaaataatttatccatttttcaattttcaatttttaaatctaaagatattttcaaaatgaatttcatttattttacaattaaaataatttatacataacgcttatcagtggaaaacccttacataaatccccaataatttacgtgatggatttagtaaaatgtttcattgatgtatcgtaagctaaaagtcttcctccttcaaaaacgaataaacaaattcaaaatgcgcctgcctctaaagatacaaatcaaaagctttttgatgcaaaatcttaaccattggaccctccaaataaactcaataatttttcaatttttcaaactttggactaaaacgtccagccctggttctaaagtaatttacattgtacaaaaacttgcagaggaccgttttttctccttaacattgacgcacgatgaaagaatttattttcgtataaacaaaactaatcacaaaaatagtttctttgttctcagctgggatattcattctttggctgaaagtgcgtcgttggaaatgggccacatttctttcaaatccaaagagcgcttagtcagaagaatggcaatggtggaagccgttcaaaaggctcggggagaaattcgagtggaatttgtcttggtgcttgtccattttgtcgatcacgaattatgcttcgacagattgggcaattgttgtttttatcaagccttaatcacagctaatggatcatattttattaagattttgtataatgaaaaaataataaaatttaaagcttcatatttaattttttaattcgagtttatctatttattttttgatgtttcattgaatgtgcaagtgcattggttgtacaaatatttaattttgagtgacttttacgcaagaatttggttttataatttttaattctacccataattaccatttgtccaagcattgcttatgaaatacatgctaaaaaattgggatttgttttcttttgtatgccaatctgtgcttaacttacgccacattttattggctcattcttttgattttgccgcccgtcgctttcctcaaactcatcaagacaaattggacaatttttctccaatgaatgactcacaccgccttcgttttggtttgactgtgaagcattttgatgatgcttttcattgcttggactttcgtttttgcttctttcatttggtggtgaacctttaaataatcatttataaaaaaatttattaagaaaaaaaattagaaaatatgggggccgattcaattttagtccttgttttcaaaaaatttgcaacaaaatagtagaaatttcaaaatttaaaattaacaaaaaatatctggcacatataaaaaaaattaaaaatgcttgatcaactattttttaatacttatatccatcccacatacattgactttgcaccgtgattattaatgcaaaaatgactacaattgaatgcattttacgatttgactgtttgggaatttatgaaaatgtcaactagttttatatattttatttttattattgataaattcgaagtattcttctggaaattaaaggagacatttattgattttttgtgtggattttttgtttattgcgtttaaatgaaaaaatatatttagatataatattatgcataattcataaatttttagtaattaaaatacctaaatggtaatacagacattccatcactaagccaaaaacggacatttcgccaactagtcgaaaatagtcgtacgcggtaatctgtacagcttaaagtctaaaagagaaagattgtatgggtaaggaaaaatgagttgtgaagtaaatgaaagcaatgagaaggattataatccagcagatttatcatttgcttatttatgtgcatattttattctgaaactcgaacaaaacgaagacattttgctgaaggttgagagggtagccaaagaacaatggatggaagcaagcttgtatccagcaaacaaaaaaaaaagccgagccaaagtccaggcggaagaggacgaaaaacgatggggaaagagaacggatgaggcgaaaaaagcactagaggataaaatggccgagattttggccaaagcgaaagaagaggacgagagagtggcgaaagagaaagaagagacgacaaagaaggcgaacgagcgagcagttgtgtacccggggagggaatgcccggatcgccgctcggtcgattgactattgccgaggatgaggaggatgatggcgtctccctggcgtcttctgaggagg

SEQ ID NO: 10568 - DNA, 2147 bp, Heterodera glycines
  unsure (1)..(2147): unsure at all n locations
ggggaagggacggacgagcccggtgaagcgaagccccgcaggagtgagagactcctgcgggggaagaccgacgctgggcggacgacgacgcagacgctgacaaatgagcagcagaagggggaggggaaaaccgtcccgatcaaatccnccggactcttttcacaaatatatatttattaagcagcagcagaaatgaatgaatggaaatgtggaagtgagcatatgtgagagaaaaatggtgccctttttataggccgaaaaatgcgagggggcggggcccagaggaaaaaacttaattggactatcactaggaaattcgtgggaaaaaatggctggcgatcgataagatctgtcgccgttggcgacaacttttatctttttaaaatgtttttgatataagattagagttgctacctttagaaattatcgtgtcggggatcggaaatcgatttgggaatagtcaaaagtttatttgatcaaagaaacattcttttttattaattagtagagtcaaacagctcgagcagagccggaccctgtagagctgttttaaagtgcgcgacaacccggcccagtgaaatagtcatttgtaggcgtgggctttggacaaattttttcaaaaaagttgacccgctgttcaaaaaatttatttgcttgttttaaacccttttaatttacatattttatataatttttaatatatttttttgttaatttgcttttaaaatatttccattcttctattatttttaaatttatcacagtaaaacgatgactctcataatgcgtcaactgttcgcctccttgttcttccttttgcttctcattttgctcatcactttttccgatgctcaattatttggcggatggggtcataataaaatttagaattatacctaattaattacaatatttttaacaatttacaaataatataaataaaatttaaataacaaatatttattgtcaggatggaactcccccatttacatgcctggcgtttactgtttacatgccaaagtgtgcgagtaaaagaacaaaaataaatagaccaatgatggcagaatgaccaaaaaataatttatccatttttcaattttcaatttttaaatctaaagatattttcaaaatgaatttcatttattttacaattaaaataatttatacataacgcttatcagtggaaaacccttacataaatccccaataatttacgtgatggatttagtaaaatgtttcattgatgtatcgtaagctaaaagtcatcctccttcaaaaacgaataaacaaattcaaaatgcgcctgcctctaaagatacaaatcaaaagctttttgatgcaaaatcttaaccattggaccctccaaataaactcaataatttttcaaactttggactaaaacgtccagccctggttctaaagtaatttacattgtacaaaaacttgcagaggaccgttttttctccttaacattgacgcacgatgaaagaatttattttcgtataaacaaaactaatcacaaaaatagtttctttgttctcagctgggatattcattctttggctgaaagtgcgtcgttggaaatgggccacatttctttcaaatccaaagagcgcttagtcagaagaatggcaatggtggaagccgttcaaaaggctcggggagaaattcgagtggaatttgtcttggtgcttgtccattttgtcgatcacgaattatgcttcgacagattgggcaattgttgtttttatcaagccttaatcacagctaatggatcatattttattaagattttgtataatgaaaaaataataaaatttaaagcttcatatttaattttttaattcgagtttatctatttattttttgatgtttcattgaatgtgcaagtgcattggttgtacaaatatttaattttgagtgacttttacgcaagaatttggttttataatttttaattctacccataattaccatttgtccaagcattgcttatgaaatacatgctaaaaaaattgggattttgttttctttttgatgccaatctgtgcttaacttacgccacatttttattggcttctttctttgatttttgcccccccgtcgctttcctcaaattcatcaagaaaaaattggaaaaatttttc

SEQ ID NO: 10569 - DNA, 2103 bp, Heterodera glycines
aggcacaccaaataaaactctgatcactttgatcagaattcaacagtgatcagtcagagtgagtgagtgagtgaatgccactgatcgatcagcagaatctctctctctatctctctctctctacccccccccccccacgtaccatccatcaatgatggtggtgcggatgcagcagatggtcggcactgttgtgccgccgccgatgatgacatcatgttgttggaaaaccatgatgaggcagatgatgatgccgaagatgagggtggcatgccaaaatgggcgccgccgttcaacaggcaaccgttgccgttgctgtactgctcgtcctcgacgaagttgttgttgttgttgttgttacagtcgtcgtcaaatgggtcccggatgaccagtcgatgtctgctcaatgaccgtacaccgctgcagccgccgccaccgttttgttgttggtactgtaattggaggtgttgttgttctacaggcccaattgtgccggcggccgagtccgatgaagtggagggcgtatttgagggaaaattgccggccccgatggtgccggtggtgcaattgttgtgatgatgcagcacgggtgtggctgacggtgagccgaacccgaaatagggctgtaaaaaaaagcgaaaatttttagtcgaaataaaattttgggcattttctttccgatcagggtccccggatcaccgacaattttacgctccctgaccccaattgatccccgagaatttctaccccgaggggttggagcttaaccctaatggaagcaattatggaatgccgacccccaacattttatctggaaaattttggtgccgaactcaagaaatctcagatagccaaaaatgaaaatgaattatattttttttttgaaattttatttattttttcattctttcaagttttagtaaaaaaaaatatttacatattattatttaatttcaaattttagttgaacaaaaatttgtaggcaaaaaaatttttttgaaaagccttcagaaaatcttttcatttatttaaattaaatcaataatttactttaaaaaaaggaaaaaatttacttaattaaagtagaaatttatttaataaaaaatagaattctatttaatagagtagaaatttatttaataaattaatataataatttactttaaataattaaagtagaaatttacccaacctccattattcaaaaattttcattttccatctgtttttttcaattaaaatgaaatttttaaaaaaatgaatatagataaaaatataatatttcaacaaattttttgtcaaaaaaaaggttcaaaaaaatataaacaaaattatggtcattgatccgatcataatcaaaaataaacaaacaaccaaccataaaaggcaatgtaaaattagttgtaaaaatccaaaaatttacgagaatgaatgaatgaataacaaacaatgaatggaaatgactgctgacatgacgaaaaattgtgaacgaatttgaaggttaaaaaaatataaaattgggcattaaaagttatttttaaaaatattttaatttaattataaattgtataaatttatacagagaaaaatttctttgaattttcttttttttatcaaaataatatttattttattggttaaattaatgttataaataaatatgtttttttaaaaaatatacatatatttctgatctaagtaataattttaaataaagttttttttaatatattaaaaataataattaaaaataaattttaataaattgaaaattaatatgatttaaattccttcttaattcggttaaataattttaacataataaaataattaaaaaataataatagtaaattttaattgttaaaatatcaattaaaaataaatataaattaaatttattgtatttaaatttctattttaatcgaattaaaaataatcaacctttctaatttcatcgagttcaaaaattttttcctataataccaaaacaatttccaattttatgcatttttaaattgaatttttgttgttttttttgtttctccactaattttctcacagcttgaccaaaaatcgcaaactctcgcctcatttcccatcacatac

SEQ ID NO: 10570 - DNA, 3556 bp, Heterodera glycines
  unsure (1)..(3556): unsure at all n locations
atacaaatggcttaattntgtgtgaccaaaagcagcagcaagcagcaaacacggagcaaaaataattggaaaattataataattttgattttttgatttaaaaataaatataattaatttaaataaattattctgagagagaaattggaatggaaataaaaataattttaatttaatacaaatacttttcgaatattaattacaagtaaaattttgaaaaagtaaatttgtaaaatgagaaataaattaaaaaatgatgaaaattaaaagtgaagaaaaaatgaaaatataattaaaaaagaacaaaattaagaaaaagaaaaaataaattaattaaattttaattgtaagccttaaatttgtttattgggaaaatttgaaaaatatgactcattaaaaaataaaattcttaaaaatttcataatttcaaaaaaatgcaatttttacgtctccgtccatgacacagacaaaaaaaaaagtgacgacgggaaaagggatttataataagccatccgtcccaatgtttcttaatacgattttgtaaaaagtcgtccctcccggaacgccctttgaaagcattcaaggaattttatcatttttcatttgggaggggggggggagattaattataatgggacgatttttttttaaaatacgattattgaaagtgacctaattaattaattagtcatcaattagtctattaatgagtttgagaggtaattttaatgcttaaaaaagccaattataattttgatttgcatttttatacaaatgtccaaaaaaggtttaattttattagcatgccaacgagcataatcaacaaatagatcatttcattttctctgctgacttgttaaaaacctaattaaatgctggctaacggagacttaaattataacgaattaaatggtttctaataaaatcgccaggctcggcaccccattttcccgcatggcattagcctgatcagtctccgcttactcaattaaagcctaattaaatgatggctaattaggcaataagtcgccagggtcggcacctatcatttttccgcgtagtattttggctggcttgtcccccacccccacctccactttgccgtccaacgacgtgttggtcaggttggccaacgcgatgccgttcaagtcctccgggaagtcgtcggctggtgccgcttctgctggcatcatcatctgctgctgctgcagctgatgatgcccgccggcgccggtcggcatttttgccgcgttgttccccgcggcgccgccttcctcaaacggtgtggcgccaccgccgacgcccaactgttgctgctgatggtggtgatgggtgtggtggtgttgctgctgcagcggcgggaagcaggacgttggaccatcaagccccatgcaatttgtatacagtttggtgttgacgttggtggccgatggatgtggacgacggcgacgaggtcgacgacaaatgcgcgaaaattggcggcaaaattttgatgcgagttattaattattattattgtacaaattgtttaataatttttgtttggtctgttggaacaatgggagaatgagcatttgatcatcaaaaaattaattatacgcaattattttaatgagtaattaattattaattgtatatgaaattagggtgccttcccagacaatttcgggatttttcgaggacacccaatgattgggtttcgatggattttgaatcggttatacgtggcatttgcgcccccggaccttgctcccatatggttaaaacaaatttaaaataacttttttttttgattttaatttaaatagaattgataaaattaaaaaaagacaaatatcccaagatcaattttttggaaaatgtttcaaaaattctctaaaaattgaaattacggctttatcaacaacacccatatcagtttttccgcatgtattgtttttatgctttttaaaattgaaaaaaaaaacaaatttgatgggcagaaatctcggcatcattcacgtgttgaatttttttttcgaaaaacattaaaaaatggggtctctgttttgctagatggcctagggcagggattacggatggattaacaggaggactcccgctcttggtacgtttttccaaaatgtatttattaatgcatattataaaatttaggatgatcctgatttatcatcccctctggtccttattgttcataatgccagaattagacggcaaaaaaaataaaaagaaaatttttttaagaggcctaaaaagccggggattatattaatttaagggcaggcaaagtgactttataaattataattgaagaagtaaaatgaactgaactgaacgaacgccaaaaccaatacataatatgtaaatggacatgcataaatcaattttaataaataaaataaaataattaagggaatggttgggggaaatcgatttgatatgtgaaatattaatatgctaattgatttattaacattgtttattaagtaccaataaaccaattggtgatggatttcgtcccaccccccccccccggttcctccataaaaaaataatgaaaatacataacggaagcaattgaaaaaaagatgattggaaaattcattaaaaaataattttattggattaaactaaaccatacacacacataatagtgcaaaatggattattataatttttattagagattgacattttgaacaaaaagcctggattttctggacaaaaatagaggaaatccaggcacagtaaaaaaaaaaaacagattgctgaaaaatggcttagagctggatctaggaaaaattcaggtctggggattcaggtccaggcccaggttgaactataattacttattagtattattatcatgaatcggataaaccattgccagcgattaggtgaaatttaaacatttgttaatccaattagtattgttagtataaagccggaagcattcattcatttccaacaacaatttgcactcccaattttcttttcttttttttgcgcgcgctcgcgcgacgatggcggacatttttatttgggatttttgcggtaaatacaatacatatactgattgataagaaacaaaaatgaacaaaaaaaaaaaaaaattccggatctctcttccacccaaaaaccacggcgctgtgctgatcagccaaaataaatgaatgtgagaggaatgatcgatcgatcagcattcagtcagttaaccccgggggtgtgtgcgcggatccgtcggacggattgcgtccgttcgcgcagcactgacaacacggaggataagtgcgttagtgccagcgcccgccgcgcggagggatgccaaccgctccccctcccccgctcaaacaatgatcggcgcgtgtaagtaaaagcgcaacagggagagaaagggtaaggggaggggggagggggggggggggatttgattataaagataatggtgatgatgatgatggtggtgttggatggattgtgtttgatgggtgagggaggagggagggatatgtgtgtgtgtatttgtgtgatgggtgggggaggggaggcggggaaa

SEQ ID NO: 10571 - DNA, 2897 bp, Heterodera glycines
tacgaatcctacaaaaaatatagtacttttaaaaatatttttgccacaacttttccgttacatggcaacaaaatgccaaacattaggtgccactgggcccatttaaataattcccttggggcacatttttccattttgccacctccgatgcctaaaaatgccaagcgaggcggcaccatttgcaatcgccaaaacggcaaaaatacgacaaaatgaagaaagtgttttatttaaattttatatttttaaaataataaaataaaattgagaaattaaaatttaaaattaagtttgtttttaaatatttcatatatatgaagattttctaaattcattcattgtttgttcttttggtgagcaattattcatatttaaattttttcattttaaattaattttcgaattctttaaatttatttttttcgcttttttatatttaaaatccaaatcgttgaaatttgttcctctttttggaagaaagattcactattcctgatattatgcataaaacaattaaagcatttttaaatgcaaaaacattatttttttaaaatatttttaatataagttttattaaaataattaatgttaaattaatattcattagtggattcttctttctaacaaaattcccaatttaattaaaggcaaccaaaagcattctacatcagcatcactactgaatcattcagcatcaacaaccgaattgatttccaataaaacaaattcaacattagggggtaaaaaaaatgtttaaaaaaaatcgtaaaaatattttgagatgaaaaatccgcaaaattggcttcatttttctatgcaaactcctcaacgcaaagcttaagcgagctgagcacttccaccacacttttgtatcggtctggtgagaaaaaaaggggtaagttttttttgttttgttttatggcttaaatttatttaaaatttttgaaaattttttacattttttttttttgcaaattttgatcacgcataaaacgtctaaatgtgaccggaagctcatcaaattttactgggatatttgcaacacacaaaaatttttatttcctgtaatttgctgtgtttattaatttaaatatttttaattttctacatttttaatatttttttttttttgcaaatttagaccactcataaaaatcctaaaaatgatcagaaactcaccaatttttagggcacaaagattttaacgcctatttttcctaaattttaatttttgtacatttttcggcatttactatttttaaagcaagagagaaggtacgagaattgttttgaaaatttttacttatatttttggcattttatcctaaattaactattcttaattaaatgaattaatatttgttttaacataaaatgtcttttcaaatttttattttatttcttcatcaggtgcccgcaatttttctgtcgacgttttgcccgcattgaagaagcaagcaagcggaggtggcactgctgctggtggtggtggtgccacgaacacagcacttgtgccaacaaaatcccaagccgcaacaaattcagggcgttcatgcactgtgtactgcaatcagaatttttgaaaaaagaaaaactggactagtcaaggactaggcctattcggtttaatttttagccgtttttcaaaaaaatggcgtcctacggtattaataggcttcgtctggctctattaattaacagattgtagaccaaaaaattgccaattttacgtatttttggatcacatggcgagcccaaatcagggaaaattcctggcatgaatcctcaaaaccgggcaaatgcagacccaaaattcggcaaatgcctggcacgcgcccaaaaatccggcaaaatgcctggcacggacaaacaaatccggcaaaatgcctgacacgggccaacaaatccggcaaaatgcctggcacggcccaaaaatccggcaaaatgcctggcacggacaaacaaatccggcaaaatgcctgacacgggccaacaaatccggcaaaatgcctggcacggcccaacaaaacccggccaaatgcctggatttccatgtaaaatcgtatccccgaatagaacccaccaaatgagtatttattttcataatttattacattcaatctctgttcaatagactattaattaataaattaaaaattaatgtctcattgtataattatacctgacttattgtgtcagatattatgatgcacttgcggaacagttgctggaagatagcagcagttgtcatccggaaccacaattggatgtgagggtgaaattttgcaaaattttatggaaaattgaaaattatttcacaaattataaaaaataaaaattattttttaattttaaatgaaaattaattttcagaacgatggtggtaccaaatgtgtgctgaatcctgtcttttgtactgacgaagaggagggcggcaacacgaaggtaattaacggcgcaaattaatacaaattagatatttaataagggccggacggacccgtatacatattcttacggacccgtggcacataacccgtacaaatgatggcattattttcttattttgggaacggcctaaattttggcattcaaaaagatttgaaaattaattttttcaaacattgcaacatttgatgaatattatttgcattcataattagatattaggatttaattgatttaaatatatttttctcctaaattctccatgatctaaatggtaggacgaccctttcttttttgtgtttgcgaacaaaatttgcatttttatttacatattgtttttgggttattttacatatttttgactttttcgcactttgtcagacatattttgcatttttaaaggatttttaaggagttttttttaatgtccaagataaaacccaaaattt

SEQ ID NO: 10572 - DNA, 2036 bp, Heterodera glycines
cgtaaatttttttagtatgtaatggaaattccaaagcattcacatttaagtaattaggtaaattaaattttctattttcaaaatttttatttatttttattagagcaaatttttctgctttttttttgcacataatttgcgtcctggtaacggtaactccttattaacccaaagtgctttgattaatggtaaaataattttagttaattatttcttagatttttacgagtcaaacggaaggggcaaatggcgaacatttcactgatcaaaggacagaaattaattgttcacaaggacgactgatcaaggacaacaagaaggataccacagagtctgcggacacagaaaaagtaaaaaaaatatttaattaatcttttttaaatataaaaaattcattttatttgagtatatatatatatgtataatcgcgaaggggcaaatctcgattctcgatagaaaaaatcattctcgacttttcttgagcaagtcttatcaaagttttaataagtctcactctctattctcgagatcaagtctcagtccggttctcccgtgagcaaatctcggtttcgagtttcgtgttcaagtcaagtcatgagtcgtacggctcaacttttgtctcttcaggcttagctgatcatgaatatattatttggaagggttgactctaattgaaattatttttaatttttccgaccgtcaacaagtctcacactcgattcttgagattaagtcttagtctctgttatagagcaagtctccagccccacacgtcaagtctcggtctaaaatctcggagtaaagtctttattctcgaagttaaatctaattctcgatcatgaggtcaaatctcgagtcccactggccaagtttttgcctctttaggctgctgatcattagggctgggatttttaattttttaactattttttctgcggctttatttagacgagtaatgcacgaaaaacacaattttcgctcggaaattcttcgttttaacgccactattcatcactaggaatcactatttggagcttcgccactaaaaaaaaaacaattttgaaagttgtctactaaaataattttttgccactattttggcattttgtcactatttttgccactattttggcatttttttggaaaatttcctaaaaaatccaataaaaacgaaaaatacacccctaagaatcgacctaaaagattcaaaaaatacacccctaagaatcgaccaaaaaattttaaaaatacacccctaagaattggaaaattttctcaaaaattctttcccaaaattttttttcttgctcaatatttgctaagaaaatattggaaaggacatttgtaactgcaatcagtgaataaaattgtttgccttaattttaaattaggtattttcaaattaaaaacagctatttaaaaaattacaccccctaaatttggaactttttcgccacttttttatcactattttgccatttttttgtcactatttattaattattttggggttttttgccactaaaaatcccagccctactgatcatcaatataaattttcggccaatttgtgattttttttttcaaaaatttgttttctaaaccaaaaggttcaccatttgaaaaaggggtaacctcaacctcccaggccgggcaccataattttatataattggaagggttgattgaccctaattggaaattatttttgaattttccgaccgtccgccccaaaacggcgccaaatttgacagggagcggtcggtgccttcctttcccatgccctccgtccccgccctccaaaattccatcgtcgggcgacggatcgtcggccttctcaccgcaaaatggcgaccacttttgtctccgcaccgctctcccatttataaaacataaatttataattaatggggggggggaagggagaaattttgacatttttttgcatttacagccaccgggagaaataatttttccatttttagaaaatttattgaatggtttaagaagaaatttttgtattttaaattggaaca

SEQ ID NO: 10573 - DNA, 3020 bp, Heterodera glycines
gggacagcacgggcaaagtgacggtgccacaggcggaggacggaccttttgatgagacgacgacggtgggcacaacagaaacagcggaagaaggagaagcgatgggagtgaagagagtgccggacggagggacgacggaggggggcaaagaaatgccaacggcggaggggggcgaagaaatgccaacggcggaggggggcaaagaaatgccaacggcggaggggggcaaagaaatgccaacggcggaggggggcgaagtccgcttctgctggaaagaggggcactaaatcataaacaacggaacactaatgaaaataattaatagtgttgctcgagagtctttggttcgactccgaatttttgtctcggtctcgagcagctcgaaaatcagtcaattgaaacggcacagtgcctccgcttccgttggcgtcgcttttctcatcgcttttctccccgtcgtttcgcacatttcctccgccatttgtcttttgtttgtcgtccgttttctgcgctggatgccgccagcgactgttgcgccattccctcccattgtgccgttttcgtttgcctttgtacgtgccgacgacagcgacaaatccaacggctccgtcttgaattggtcgtcgtcgccgtctacgaattggtcaacagaagcggagaactgttgctcccttttgggatgaatgacggaaacacttaaaaaaataaaatttaattttaattacgcaattagtgccaattaccgaccattccatggagggaatggtggcgttgagttgcgactgctgaagtaattgatggtgctgaacattttgtgccgttgtcgtcgttggatggaccagcgatgaccgaaaagcgagcggcaattggaattggtagtgattatcgtccgcgtcgtccaactgatgcggcggattgcctccgctggtggtgccattgtcctccgtcggcagccgaccgatgccaatgtgttttggcactgtgccgccaccgctgtgtcgcccgttctgtttttgctgcggatgactcaccgccattgtttggtcgatgagcagcggacggacagcgaattgcttttgcatttcgggatgaattgcgatgggaatcaccgtttggggcatgccgagaagctgaaagagggaggaggggaattggacatggaaatttaaatgccaatgaatgttttttgatcatttcttttgcttcccacttgaatgtgctgctcatcggccaatgagtggaaagcgactggcagcagaacaacatttggagagagaaagttgtgcaatgaatccacttaaaaaaacaaattcttttattatttattatttaattgcttttttcagtgtaatattttagtatttttggcatttccgtcgctccgtttttcgctgtcgcaattgcttaattaattgcatttcattttcccacctgttttggcaaacagtgcacttgtccccgttgtcgtgtccattccgccgttcgcattttgttgtacatcgttgatcatttcgagatgatgaccatttttggcacaatttgtgtgcaaattttcacttatgcccattgccgtcatttgctggggttgtgccgccgttccaccggcaaatgttggcattgaattcggtgccgaacagccccacaatgctttgttgtgttgtaaaaagtgcatcaacgaactgagcatggtcggagacactgatgatgcgccattgttttgctgcagcgttatcggtggagtaggcgaaggcatcgccgaattttgggtggaattaaatgccaaaaatggaccaattttatttgagaattttcggcgggtgtgagagaatcgccaattcactcggaatttgcgatacgcatccaaaatgattgggaaatgatcaacattttttgtaatcagttgatgaccaacgacggaggcggcgggttgccctccttatcagcaagtaaacaaaaatggattttgagccaaatttacaattgttttgtgctcattagcgagcgattggggaagaaggccttatcaatttcaatatcagcgcatggaaatttgttcaggcattttatcagcagcaacagaaaagcaataatcataagggaatcgcgggaagagcaaaaggaattggggaaaataaatggacaaacgaaaagtgataaaatgtgataaatattaattaaatgatgatagagagggaggggcgagagcatttagcatcagcagtggtgggagggcgagagatggaaggaaactttgaggggagagtgaaaggaatgataagagatcgggagggggagggggggggggaggggacagccaattccttggcatttgattggtgtgggggaggctggagtctaatggcattttttattatttcgttaattaggggtagtagggccggtccaacaatgaagtatccttgatttaggatttttggggcttttgctgatacccgctgaggaagagaacgcattcgcaccaaaaaagggggctgctctaaaagagggaatgagggcgggagtcgcgaggaaaaataataacatttacttagttaaatttgataaaacccaagtttttctccggcgaaatttgtcgccactatctgatcccaaattttcctaaatttaaaaataaatttagaaattgccaattttgaacttaatttcaaggatttctaatggtattaatgtgagggatgaagaatgactcatccatccaccgtatggacaacgcaacccctcctttgccatagtcattcattcacttcccgcgccattatcgcctgtttttgcccctctctctttggtacttcctccgccctccccttttcccacatgtgcttcttctgttggctgctgatggaaccgcactgattatgaagaagcgtaagcagcaacttcatcacctcctccccccccccaaatcgcagccgcgccggagggtttgacggaacgacgatgacgaagagagagagagagagaggagagacggggaagaggggggggggggaggggagatg

SEQ ID NO: 10574 - DNA, 3724 bp, Heterodera glycines
gggggggggggggggaaagtccattggccaaagcccccggaaaaacgtaaaaaagcacattttcccccggaggggcaaagggaattctcaaaagttagaaacaaaaagcacaaagcgaacgaaaggagattagggatggtatggaatttcgatactttggagtttgaattcctgatatttttgggacagatctgatttggggccttctgactgagtactatgcctgctatatactgctacaacgcagaggactaaattcgactgtctactccgaacagctttgactggccttaacaacaaagattaccgaacatttggacaaacatcgaaaaatgtatttttcatatttctgcaattcgactacagtatgaactgcttatgcccaaattctcattatcttcattgtatttttgttgttgtttaaggaatgaccaatttctggtgcgaaaactggaataaagcaatttataaaccaatagaaatgcatgagcacaataaaaagcatctacaaatctttctgatacccatatctgaattttgtgtagattcatcaatattaagcgaaaaaactcattaaagcagacaaaacaaaaaaatgtttgcttaggggaaaacagcttaatgttcgttcttcttaagcttcatgtccaccttcattttcttagtcgccggtttcatgttctcctttctctcatccttcgtcgtgttgcgctgctgtccttcggtggttttccattcgatgtccgctgacgaacgtcgtttctcaccgtcgttgtccaacagaaaatggtcctcacgcaaacgatagccctgaaattgcgtttttttgtgacacacattccaataataatataatgaagggatgtaccatttcgtcgcatttgaacagccactcactggtgaccactttgacagttccccattcacgtgctcgcctgtacttctcgcccgaactcgcagcagcgatcaaatgagtgcaagtggcacgactcatctgcccagtgaaaacaccgccatgcaactcgaccaaacgtccaattttaacacggtcagtgcccatgaaaccggaagcggtgatttgctgtaaaagtcgacaatattaattatcaagatttttgagtgatttctcactgaaaaaacgaatagtaaatgttcgttaaacttacgcatcctgccaataacggagtcttgtggctgttggtcaagccctaaaagtcgatgttgacggatctttttccagaaatgcgaacctttgtttcagtatcgtcgctaagcaagcagttttcgggcatattttccacgtcgttttgcgcatgttccacctccgaaggacctgacaattcctaaaaagcaaaccgttttccttttaagacattcctttccaaacaaaaattcaaaagatggagtttaaaatgcggacctctttatcagccctgggctcacgctcatctgtcacactttcatctttcttctcttcctggtcaagcggttcgatcgcgacagtaaatgtcaggccctaaaagtcgaacgttccgctttagataggccttttccaaaaatgcgaacttttatttcagtctcaggtaaatacttttcgggcacattttccatattctgcgcatgttccacctccgaaggacccgacgattcctaaaagaagaaacaacaatttcgcaaaagacaccataggcaattgcgaacctcctttttcttctcttcctggttaagcggttcgactgcggcagtgcatggcacgtcctaaagtcgaatgtttacgctttagacggtctttttccagaaatgcgaacctttgtttcagtctcgttgctaggcaagtagttttcgggcatattttccacgtcgttttgcgcatgttccacctccgaaggacctgacaattcctaaaaagcaaaccgttttccttttaagacattcctttccaaacaaaaattcaaaagatggagtttaaaatgcggacctctttatcaaccccgggctcacgctcatctgtcacactttcatctttcttctcttcctggtcaagcggttcgatcgcgacagtaaatgtcaggccctaaaagtcgaacgttccgctttagataggccttttccaaaaatgcgaacttttatttcagtctcaggtaaatacttttcgggcacattttccatattctgcgcatgttccacctccgaaggacccgacgattcctaaaagaagaaacaacaatttcgcaaaagacaccataggcaattgcgaacctcctttttcttctcttcctggttaagcggttcgactgcggcagtgcatggcaggtcctaaagtcgaatgtttcctcgtcagaccggccttttccaaaattagtgacaatacttactaaccttaactatcataaaacaagaaagcccaagaaaacaatttaattatcataaaataagaaagcccaagaaaccttttccgacttcagcgcagcaacagacttgaggacagccatatcctgatgcagtgtatcaattcgctcgttgcagaggtctattttctggttgattcctctgagcatttcccggatttcattttgaaagtcaatgttatcgctcattttcttaaagaataaatgtagtaaagtttgcgcgacttgtttatttgtgatgtggatttatacaatttaattagaggaccaatatttatgattgagacgttattacttttctagtttcttgggaccgatttttcaaaaaaccaaattgggaggggggttctcagaggtaattaaaattttcaaaaatggtcccacaggaaaattttatggaatttgaatgaaaatttatttacataattttaaattatttggcattctgttttttgatgcaattcaggccgcgggatgcgcacaaaagccgagttttcggtgcgggtccctctgcggggcggggtttgaacttaaaaatgaacaggaccgggagcccggcaaaatcctaggtcccggctctgtccgggctctagttttgagtaggggattaggatagatatgaaccattttccgtgaacttaattttctttttctttttttagaaaatgttgccaaataaaattgcaaacggctctttgaaatttgttgaggacctaacatttacgagccattgtataattgcggaaattcataggctgtcatttctcgtcccgactgattttgccaatgtttcgtcaagtgcgtttaataaattgctaatcgacttttcttacttcgaaaaccgtgcttcatttgacaaatttactgagggaagcgaggtaataaaaacgaaaatgaattttctttaacgcaaattaaaggaggggcgtcaattggaaagggaattctacgcgcggttttcctcatttttggaaatgtttggacatttaatcgataagttttacgactttttactcgccgtttccgagtgattttcccttcatttgtcaattttaaaaagtacttcctttagtttttcttacatttttcccacatacaaagaccaattttcgcgtttaaaatgcgttgagcaattggaattgttcggtgctcgacttttgcatttgttgggcattattctcctcctcatcgaccaaaaattcccaagtgatttacgcgaacggattttcgttgctttttataggctgaggtaatggagaaattgatttgtttcaaatgaataattggtttggttttaaaggatcgatttccatccg

SEQ ID NO: 10575 - DNA, 1004 bp, Heterodera glycines
ctgtaaagtattttatggtttccagacggagtgttcattatttgtccatgtatctccccatattcttgggccggatattcgactattccctccgtcgcataagaaatcggtcggtggtgttgaaaaggctgacgatgaggctaaattaaatatttaatgttaacaattcttaagtccatgttgcagcaggataaatccctagccaccaaaattctcattcgtcaaatatagcaaaagcgatctaataattagtgactgattgtccaatgcaattgattaatcaaaatgtaaattgcgttaatttcacccagctcgcctggtaatcataaaagtcgtggagaatgccccccaaacgttgtcttgttccgctagcagaaatttggtgctgattgggcatgtgtgggagatgatcagcaccgccagtaaatgaagcatatcgctgtaaatttaacaattaatccacccaatactctcctaatataaaaacccacagcactgatcgggcgcggaattacggcatatcgtgcgattggacgcgccgtttccatattttgttgatttaatgagtttttggttgccgcagtagacgtcaccggacccaaaaagctgcccattggcccgccgtcatcattagatgcgactccactcaaattagcacgggtggcacgaataacaatggattcagccggagttttgctatttgaatcaaatttggcatatagaaatttaagcgtgtaaatgaaaataaaaaatgaatttcaatcataccgtctggcaaactgtttcatttcatgagaaggcatgtagtcatgttgttttggaaagggatgaaaattaagtgttccttgacaataattagtaaattattaaaaagaacaaagaattatgaataccttcaagtatttggtcaacataatcccgaagagccggtgggaggcacgcctaaattaatcagatataaaggaaacatttttgaccaaaaattgatggtcttttaatcaaat

SEQ ID NO: 10576 - DNA, 2896 bp, Heterodera glycines
gttataaattgtatgattttgcatattttttctgcgcatatgctatgaagaaggggctcaaaaataacatttctgcgttaaattttttgatttggtgaaggtttttattgcatataaaagcatattttgggggttttcgagaataaatacagattttgccatttttacatttttaaaacatatttcaatcatttttggcaattttaataagaaaaatgcaataaaaacgaaaaatacacccctaaggatcgacttttttgggaatttcaaaaacatacccttgaaaatcgagaattttgaattttttataagaacttttgaaaacaatagtagaaaaatgtaatttgttttaacatatctttgacaaaaattttacaaattcgaaattgcatttttggcattttttacggttataagccattttgggtaatttttagggcatattttagtgcatatttggatatttttcggagttttagtgcatatttgatggatttttagtgcatattttatgcgcataatttggcatttttagtgcatacaacttataaccctaataataattagtaaaataatttttgtcaattttctaaattgttcagcaattagcggtctgtccgatgctggtcgcctcgcactgcaatttgtctgaacattacaccaatacgttgatgaaccatttgcacaccaaccacggcaacatggcggcgacacttcgttacgccgaattggcacgccaggccgagtcgctgctattcagtacgagactgcagccaaccgaattttatcagcgacgaatttgaaatcatttctaggcaaaatttgaactcgataaaagaacttgaaaaaagtaatttggccaattgttttatgagcagttacttgcattgttgctttaacaattatgaaactggttagaaactcgaaaaataggaaaaattttttgcatttcttactttttttatatctgacaaatttgataggggcggaagtcgttatttaaaaaactagagtagagcgggaccgggaattttgggcaaaaccgggaccttttcgggttgaaaaacagggaatttttggcagggaaacccgggactggactagtcccggtcaaaaccgggacttctgtactcagttgtccgtgttttggtcccggtcccgctctactctagtatttactcttaccttaatgtgtggtacatatgccgggtcaacttcaccacggtccttaaaagttattacattcctatttaaacatttcacaaactcacaattccatatgcaagcccaagtcgtttcaacacctcaatgtcatcgtgaatctcaaaaggtcgatcaaaattgaacaaatactctgatctaaacttgggcttttataaataattcagcatttaattcacttgtccggtgcaactgcacattcgacgttggttttcttgttcgtactcacaataatataaggaaggtaaagaattgtcgaatccaaaggcctgccatttactcgttcattttctctattgcgctggaccaaagatttgtaagaaactaactaaaaagatcaatttaaatgaaataacggcgctatatggaaagtgggcctttttgaaacaaaaggggggacccttttgttttgcaaattttttttgtgataaaaaaccatgataatttgttatccggggttttaaaggtcgctaatcacgaatctgacatgtattttgactaatttctaatccctaacccgaataaagatcgaaattttgaatttttcaaattatgattttttgttcaaatttagattaggaaatcggaattgatcaaaataattgaaagattcgtgatcggggaccccaaaaaccccagagaataaaacggcggttcaatcacctgaactatcagttcctgaagttgttcggttttttgacggattcgttcctgacgttgtgcctaaagccataaaatttaacaatcgttgaattagctgtggcgtcaaaccttttcttcttcgagccgtcggcactcggccaacgacgaagtgggcaagcccacccaacgaatctctttcttttctttttcaattatgttcatcgccattaaaacattaagcgcatcataaacacgacggcgaatgtttcttgtatcatattgtaatttttcctgaaatttaaatgcattatttcattacgaataatatcaattaaccgggtcagatgggacttcagcaatattgtcaaaatattcattgaccaattcttccgcaacttcgttgtaattagtttgaactttttgcttcactttctcacaaactttttgagcaaaatgacgcaacccgcgcgttttatccgttgaacgatgacgaatttggaaagtgcgcattggatgaatagcggagggcggtgtttgatcaaaacgctgtctttggaaattatgatgcgattgcccttcgtataaatcataatcataacgggcgcgttttacacaaaaaggctgctgttgaaattgttgtgcagttataattgagcgctggtgcgttccaatagcattggacggttggaaacggagttgcgctggcatttcgcttcgttgattcatgaaaacataaagctcaaccttttattttaccctaccaaaaaaaaagaaatttaattttttttaatcacggcgattcaattttgggctccaagtacaattaagtgggttttttcgtcttagtggtctgtgagttagtcaccaaaaggggggtcccttgttttgtttaaaaaagcgattgaaaaatgcagaatttgtttctctatcggtaagcaaaatttggtgtggatttaacgtatagaaaaaaagttagacggagaaaagtaaaagttgattttacattgttaaaaataaagagatagtacgccaa

SEQ ID NO: 10577 - DNA, 1383 bp, Heterodera glycines
aaatgaataaagcgtttgtcaagacagcactgtgctccaaatcgcggaatgcttttctcttcaaacgcctcgtcagccccgtccaaattggttgccgtccaatcaccggcggtggttttggccatccaatgaccaggcaaaagatgcaaatgtacagcccggaaatgagggcagtcaattaccaacaaaagcgcacccacatgcatgtgaggcaatttttaaattgaggggtcacaaaaaatttcaagaaattttggcacttttaaaaatttttcggaggcattttgatatttttgggaaaattacgcacaaattaccaatttgcaatgcaacatttccctgaaaatagacacctacctataactggcattgggggttattaattgaaacaataaacgggaattaaggcattcctagaaatttagacataaagaaaattttaaatttccaaaaaaaaacaaattttgaaatacctgaaaacacacaaaaaacattagagctcggcaaatttttcctcattaaacgcacatttttaggcaattctcaccaagaaaactgttgaagaccgagttatgctcaacttacatttgtttgacaaggtggacaatgacaaattgacgttcgactccgattttttcaaggatcttgggattgattcgcttgactttgttgaggtttacattcatcattttttaattttgaacacagtctggacccctaaaacatgaaattacacaaaaaaaattttggaattttaatttatagcccaaaaccgtgtagagaggaatatttatttatgtatgctattctaatgcatttaattccgaatgtttaaatggtttctaggccataaaacaaatttttgaaaaaaatttgaattttttactcgaatccagtttttgggggtttggaattggcacgaaatgaatgcattttattgctttttttgcagtttatcattgcgattgaggacgaatttgagttcgaaattccggacggtgactcggacagaatgcgaacgccacgagatgtttacaattacatttgcgacaagtgcgatgtgtacgattgaatgtatgacaaatgctgccgtcaaaaaattgttcttttttaaagctaggacataaatttttccgatttccactgaaatttaagtcgaaaggtccgttttttaagattttctcagttttgcccaaggtccattcctctaacaaaatcaaaagttaagtgtaaatgtgtcggataattttttttaatgttttagatggctgctgctcaaaaatttgcgttcccagattcagcgagttcaaaaattagaaaaaaaaacaaatttttataaaggcactcaaatacatggaatgtgaatgatatttgttgtcatct

SEQ ID NO: 10578 - DNA, 1777 bp, Heterodera glycines
cgaggcaccgttgaatatttttgatgaccaacagcataaaccatacaaaaactttaaaaaaaaacaaaaaaattattaagtgaaaaaatggaagcagttcgccccccccccgccccgccgaaaaattcaagaaaaaattttataaaatttccatcgtttttggaaaaatttttagaagaaaagcctagtagttcgtcataaaatttgcgaaaattgctagaaaacgttttaaagaaattttttttgaaaaactctttgccgggaactgtgcacccacaaaaaccccattgactgacccaatgcggcaactgaaagaggattctcaaagtcgaccgactgacaaatgaccctaatgagaagaatgacgacctaaaatgaaagggggaagaattataaaaaacgaaaaaaagaagacaattaccggaatcggcacaaatcccattcgtcggctcacctaaaagagttgtggaaattaaatttacaatatataccacggattttagcagtgtatttacaagcgtcttgatttttcagatttgtttgaattttgagagcagcataaattttttttttttggaaaatattaatttcggtagcaaatcctatcaaatccggattttaattcctatttgttgtactggtgaagaacaaaaaatatggcaaaaatgtagttgaactcacttggtcagagaagtcggaaaatgagtccgtttcatgggttctcagcacatcataagcaatcgtaattgtgtattcttaatttaaaagagggtcgaattttttaaatttagggggaaaaaaaagtaaaaataaaaacaaaccccggtaaacaaatgcactgatctcattgaatttggtgatgaacgcatgcttcaaccaatcaacaatgtgttcggcaaagatgatcatcatctgacaatttatttggggaatttgtaaaaaaaattttttttttaaatactctcccgcgcctcaattttttttattgatgtagaaaaaaaatcacggcaaaaaattattgacaaaaatagaataattcggcgatatttggtaaaaatgtcactgccacatatcccctctatatttaaaagttacacaaaaacataataatattattaccaaatccggtgtcatgtcattcaaatgttccaatttccaattgactgcctaaaatatttcgccgaatcaatttcagagaaaaaaaaaaattttttttttcactttttgcattaaatttttactcatccacaaattttttaaaaattgcttttcttttttttcgtctaatgaattttttggtacgaaaagcagaaaccaccgaccgtcatgttgcgcagcacaacaacaaccaacaaaatgattgagaggaaacgttcgcgcacatcgctgcacgacatttggaacagattgggcttgccgaacttcttgaacacggcccctttcagctccacaaaattgttgctcatcatgatggtgagcagcgattggttgtgcgaattggacgccacattgagggtggtggcctgaaatttgaaaaaaaaaaatgaaaaaccgaaaatataattaaacaaatataattttggaaaaatgtgaatgaatgaatgataaacaaaggagttggcaagtgtattctgctcttatttctataatttgttactgattttaatactcagaattttatttgttggtataaataaaaaaatttcccatgcgtgttgtcttttcttttaaagaagagaatgacgcaaaaaaaaatgtattttttgggtttcaaatc

SEQ ID NO: 10579 - DNA, 2980 bp, Heterodera glycines
  unsure (1)..(2980): unsure at all n locations
tttaaaattaaaaatgcgtaaagaattttccttttgggtcatttgcacgcaaaaaaatgtatttttntgggtgttcaaatcttggatttgagaccaacaaaactttgcaaactccaatgataaatgctgccaaataagttgtgaattcattgacagattctcattcggaaaattcatccgaactggtggattttccagagaaattcgctttttttttttaaatttacggatgatttaccatgattttttaaataattttgactggtaatacaataaatgttcagtcagccccatgtttcgattattataacaaaaaaagaaaaaacctgaagcagaatgaccagcgtgtgacagactgcgtaaatgatggcaacggtcagatggaaaacggttgaaatgaactttttatttgtgccccgttcggaggcagtccaaaggagcgcgtcgaaaatatcctacggagaattaaacaaattaaaaaacacaaaattttttttctcttaaattttgaaaaaaatttccgttatattataagcaaacagcggttaacacgcacgcacctgtccaaaactgctgaacaatttgtcggcaacttcaagctaaatgtaaatagtgtaaaattgggctaatttaaaaaggtaatatttttggaaaggattgggaggagcttttggcttgtaaattttttttggttagtcctaaaaaatcgtcctccagagcttttctgggtcgctgattacaaatttaacatttaacaaattctgaaaaatgtctaaccgaattcgagaaacaaattcggatagttcgagaaatttgaatttttcgatcttttgttcgagttaagtatcggaatttaccagaaggaatggtcaaactcataatcagcgagcggtctcaaaaaagccaggaacaaattgtcacgacttttgacaaaaaaaaattttttttttcccctcttttttggatttttaataaaattttttccgtccattccttgataaaacaataactcaccatgttgtaaaaaatgtacaatttgatgatgccctgaccacgaacaatgtgatagaccacggaagtgtcaacaaattgcatgaaccaagaagcgcaaaaaatgatgattagtttgagaatgtcacaggtgtcggcggccgaccaccgcttcaatcgaactgagcaagcaaacaaattgaactgaaaacacagtggcaattaattaacacattacctatatattctgcagagggattcatccaaaaaaaaatatttataaaatcagaaattttgtattgaagaaaaagtacccattctgctgaaggcttcggtggcaggttgcctgccaagaaatttaaaaaaaaatttcggggagaaatctatccaacggaattttgattctaatatgagaacaccgcataaaaaaagtttaataaaggtcagaaatttttttgaatatttgtttaagatttctcaacaaattgagtaaaagttgcaaaaaaaaaaaatcaaggcggtacccattggcacactaccggccaataaatgcacttgaaaatttcaaaatttgacaaaaaatgcacaattagttatttcttatacaaaaaacgctatttttcgttaatagagccttataatttaaaaaattaaccatggaaaaaattttaggtgccgaaaacacaaatttttcgggatttctcgacgaaatgttttttttccggctaggtacctacctggtttcagggataatgttccagtgtttgaaaaattggccctgacccaataactcaccaatacgcgtattggcagaatggtaaatgtgtggcaaaaggcgtccaaacactgacggaacccgtaataaatgaacttttccagttccactggaattcgaagaaatgcatagactttgcgccgcttctccgcatattgttccttctcattctgaagtgagtagcgccttaaaaatgaggggataagccaaagattggaatttattacaaaaaatgagaatgggaccaggcccgtaaccgaaatgaattttttttttagttagaaaaatttgggtggatgttccagcgcccgaatttgaaaaagtttttaagagaaaaactggcaaactttgaacgataccagcgagtttcttaaaattcggcgccttgattccaaaatataatttcccccagatgtttatttgatccaaaatcggttgacaaataggcaaaaaaaaaaaaaatcagcaaaaaaaatcgtggggtctgacccgccatgaaatccggtttttctggttgcagacctgaatggcacacgtaccttgacacttccatacaaaagtattcgaacactgtcggctttttgcgtgccacattgacaatttcatcactgtccgtgtcagtgttggtcgacgaagaatgcgcaaattggtcggcgtccaattccaatgtgccattttgtccctcgtcgtccaagtgaacgcgctgctgttgaacctgatcatctgaaaagtggcgaattaaattctaaaacaaatgtgattcaaatggggcatgagaaaacctgtcggtcaggccttaattgaggaattggcaagccatgtaaaaaaaaaaaaaaaaaaaaatatatatattgtaaaggtattattattttttttttatacaagagttgtccatttacgtcataaaatcttaccaggcgacgctcgccctctgtttctgatcaaaaattccccgtgaatttcctttactagttaatcatgattcgatttttttttgaatttttcctcatttgttggcacttttatgaatagaaaggccaagaattcctttcacttgcccatactttgttgttgttgttgatgttcctcctcctgttcaggttcgctcagttggtctgcgtctgccacttctccatggccgtctcgtgccccatttgctgcatctcttgcggtgttcgctgtctccctttgctcctccgccgactcttctgaccg

SEQ ID NO: 10580 - DNA, 3278 bp, Heterodera glycines
  unsure (1)..(3278): unsure at all n locations
taatttcaactattaaaaaaaaattacntatacataaattaccaccttttcttaaatatttataaaaatcttttantccacattaaactttctcctcattacnaaaattttttacctttttattttctcaataattccgaagaattgtatacaaaataaaaaatccgggcatatgtaaatataggtaagtccagggctcgcagatctgaggctttagcctttgcttgccgaatgaggcttttgaaaattttcatctgcgagccctgggtaagtcccacaacttttgttcgtacacatgaacaaaaatgttaattttctactattcagaacgcgttgaaccgccaacaaaaaaatgatttcaattacatgaaattagcttccctaatgaccccgccgtattcacatcgccaagctcttccatcttgtgaacaatggaaatttattttgaaaaatgagaaacactaccaacaaaaaatgtatgccaaacataaaaacaaaaaatgatatctgataaaaaaaaaattgtgtcaattttaagcgtatttaactaaggaagtgatttccgcatcaaaatccatctttcggcgtccattaagtccttccaactcgatgatgacaaacacagcctgacaaattggcattttgttagaatcggataaatcccttccaaaaataaaaatttcttttgcctgcgttttggcgttggattggcttatgagttgggaagccgcgttcaaagagccaccggtagctgatgattagggatgggattaaattttttcgggattttaataaatataaatccgatccctacggcggatgaaagcattttcaaaagcaaaaggtattagtgccctcccccccccccagcagttgggtggggccgtttggcttattacgcgtggaatatttgatttcgttacatagcaatgaaaaaagttatgtcaaagctctgctcgagagtcgaaattttccgagattcgatcccgagaaaaaagagagtcaaatgcaactcgtacacaattttttaacgcaaaaatttttaaatttttatgaagcagaaaattcatttagtttattattctttgagaaatttttttagcttgataaagattttaagcagcccaactcttccaacgagagggtttgtcggaatgccaatttccggctttttggctcggaattccggttttcaaatgccgaattttttgaagacattggcacaaatccctgttttccctacccaataaatcgtccaacaacagcacacgttgtccctctgacaatgcattcttttggatttcaaaaacatcctttaaaatgcgtaaaaagttctggttacacttaatacattaacaaaattgcctgcccatattccttcacataagtcgccgagaaaacggactaaaagagcaacaaaacattgaaatttttgaaatttataccaattcccatcaaggactcaaatttttgtctggaaaatcctgtccaggttcaactcggaaatccgggtccctgatccggttctttcaagattccaggctctgcataaaaagctaaccccgggcagttttccacgcttgcgaacaggaacaaatggcacgtccatctcaagcgccacaattgggccaaacaaaaatcctggaattttcaaaaaaaattagccctcctcacccccttcccaagtaagacggacctcgggcttctagcgccacaaccacatcaattttttgtcgataaagtgtcacaatgtgggcacagattgatcggatcagcgacggatttgaaaacaatggaaaaatgtcccttgaaatatccaaatttatttttttcaaaattaccgcccacctaaacagaacatcttttgtaggaaagtcagggaaggagcggatgcaattggccacttcgtttttcagcttttcttcatccattttttaatttccgtttttaattacgcatttatttattaaaaaatatgatttaaaaataaaattgagttacctaatttagataattttattgggaattataacaaattaaattcactttttgttagcacatacattacttttccaaaatgcttatctttaaattccattttttagaaggaatttcgcgttgggactgctaatctttagtctcaccatttttttttcttcctccaatcattaataattcaaacaactgatcagttcctgatcaatcattgcttcaaaatgtccgacattgctggtgcttccagcagcgctttttctgccgatgcttcttcaacaaagaaaaagggcgattttttgtttctcgctgagttgggcgaaggtgagctagctgaactgctttactagggatgccatcgtcaaaactcaaaaatccggcatacaagttcgaaagttttttttttttcaaaaacggcaactgaaaaaaatcgggaccgacccgcaaaacacggacaaatgccgtactttttgaggcaaaatggcattcctgctggctgcttgcttgatttcctcgttggcctctactgagggcaaagaaatttttcatgtaaaggctgacaaaacccgaaaattttgagaaaaaggcaaaaatcgataaaaatttttgtttttcccattttaaggctcctattcaaccgtttatttggcttcagagcgccaaaccagtcgaaaatttgcagtgaaaatgtgtctcaagaagaaaatcatcaaagaaaaaaaggtgagatggcgcacttaatcaagggctgcaaagtttataaaaataagccattttcgcgattgtgtcttttttcagggtataaaaaagatttttcaaaaaacagagggctgaatttggggtatctaacttactttcaataatttcatattaaaaatccataattctttatatctgggcgcctgtttttttagattttatggaaatttaaacattttttcaacgccttaggcccaccttttaggtgcagcaaattttccgtgaacgtgacattctccgacttttgtccacgcccgcaaatgcgtgcccatttgttgtccatttgttttgcacatttcaagacgatgagtcgctgttttttgtgctttcctatgcgcccaaaaaggaccttatggcccggctgaaaaagctccaacggttcagcgttggccagtgccaatttgcgatggccgaacttttcttggcactcggtgggctgaaattttttaaaaaataacactgaatttttcttatgaaaaaaaaataaaaaaaaaatttttttttttttttttttgatattttgttgg

SEQ ID NO: 10581 - DNA, 1620 bp, Heterodera glycines
  unsure (1)..(1620): unsure at all n locations
tccgactgattttaaaaaaccaattggtaaaactttgcttccatttcagagcacatccatgcnctggacgtcatccaccgtgatgtaaagccggaaaacattttgttgcgcgaggacgggcacattttgttgtcggactttggctgtgccaagcaaatcattgcaaagcgggaaaatgtggcggaggaaaatggtgacaaaaccgacggacagagaggagatgatggccagaaagcagagaaaagtgctgacagcaaaagcagcaaaaaacgggaggaggaggaggcgacaaagctggcactgagacggcggtgctcatttgttggcagtggcgcctatgtgagcccggaggtccagttttgttcaggcatttttttgatagacatgggcaccagcagggatttaattacatcgaacgcccacaaatggttttttttcggaaatctgaaattcgcgtgccaaaaaatgtagtcgcccaaaaaaagtggcacaccaaactgttcaaaatcgggattccgttacatttctgctgggtacaatcggcggatgaccaaaacaacagggcgccagttatgcttttttggattaccggaaatttttaatttttaggttctgaatggcaaggaagtgacgggtgcatgtgattggtggtgggtttgtttatgaaaattggaaattaacgcattatgctgcattttttatttaccgttttaattgagccctcggggggttttttttaacttcccccctcccccccccccccccccagtatggattctttgttggagttggagaaagctacataattgagtaggcagcaggcctatttctccaatttttcaatccctcatttttcctattgaaagaaactactgtttttctgggtcacctccaacccgcccacccatgggaaatttttttgaatttccaaaccatgaatttttcaaggaaaaccctatccaaagaaattttctacttaaatgttttttcttttttggaaaattcattggtaaaattttcacgcgagaaacggaggcgggaaagggtggaaaatcaaagtattgtagaatgcctgctgttttcttttttcttctcagtggagggcggctttattaggggacaaatcaagcactttctttcgatcataaaaaacacacattctctcccgcagggcatttggcgtcactttgttccaactgttggtcggccggctcccattctcggccgacagtgagtatttgctgttccgacaagtgctcgcgctgtcctacaaattcccggacaatttcccatgtgccgcggcacgccaactcgtccaagcattgctagtgcttgagcctacgcaacggattggtgctgcggagatgggcgaacccacgacaatgcggtaccatcccttttttgacggcactgtttgggaaggcattgagaagcgcaaatcgccactttttgattcggcagagaatggctgatcagaaatgaatgctgggagaagagaggataatgtcactttctataacagagaatttatgatgacaaaattctaatattttttgtttggatgaattttatattttgttgtataaaaagactcatggaacatagacaatacaatatata

SEQ ID NO: 10582 - DNA, 2705 bp, Heterodera glycines
ttatcgagcatccacaagcctactcataagtacatctacagtggtgcaaactaaaaaattaatgctaaaggaactcaatgtctaaggaagcaacaatagcatcaagaatttagtcgtttctaggagatagtttctgaaaatcatatatttcactatttgcactgcctcgtttaggcagcctcttccagaagatacggttttattaaaaaagttatttttagtatcataaatatatttcttttgccgaagcaaaaggggttttctattgtttcggtatgttatcataaaatagttcagtcgcataagctgtgtataccctcttcgaatcttagatccatgaagtaagtctgtagcatttctccttacttttatcttttgaagtcaaagtctaatctgcgatcataagtctcgggggtcacttctcaaatcaatcaaactttctgtcaaaaaaagtacaagacaatttgaaaccgttcaataggtttaggtttccccaattaattaattaattgctaccccacaccctacggctgaccaattagtgccctcttgaccgctgaccaattagtaccccccaattagtgactaattgacacccctccccgccagctgtcacatctaattagtgtcaatctacagaggtgtggcagtacttactactcatattccatttcatttggtccgcttttggtggccaatcgttgcgttctgagcccattgatcagcgaaaggaccaaacgggcacggacaaacagtgccaaatgggccatgtcatttgctggcaatgtgtggccaagcgaagcggaataggcacgggacaaactgccaaaaaacatatggcgcaaattcgtgatgagacatttgcgccgcgccatttgcgccgcgacacttgcgccgctcagcaaaaaagactcttgcgccgcggacatttgcgccgtgccatttgcgccgcgacacttgcgccgcctaacaaaaacgacatttgcgccgcgacattagcgccgtacagcgaaaaaagacatttgcgctctgattaaaataaatttatgtgctttatagaataagaattgatagatattcattattaattcctttttcgaagcctttcatgtcaattccatattgaagtgcacgtaatgattgatcaaatcttgatcattttggttttcattgggaccatatgcgataacaagccttcgtattgcctgatcattaagcggcggattttaagcgaaaaaaataggtaaataaataagggcataaaaattgcgaaataatgcgaaaaatggtaaaataggagcgaaaatttgaaaatcagtgcgttttttcaatgaaattaaattaaaatcgatgaaaataacttattgagaaaattaattacaaaggaattgaatttcattcttttttcgaagcaaaaaaataattggggtttctacagaaaattctttttttcagttttttgttagtttgtattcttaatcattttttcatatctttgatgaacctattcaatgttaagatttttttgtgactagtaattttttcgaattttcaattagttatttttgtcgatggcttatagttttagtaaaacttattgataatagtggaatttttatgaatataatatttttgacagcgcggcgcaaaagtccatttttgctgggcggcgcaaatggcgcggcgcaactgtctgcggcgcaaatggcgcggcgcaaatgtctcatcacggggggaaacatagttcatgcactccaaattcaccattttgccagacgatttaaatcggctggcccagccgatggcaccaactcggcccacaccatatacaaatagacaatggcattggcaaggtccaaaatgcgaaatgagtagtgggcatcgccaaagtcgatcagagcacacacctttagtataattaggcatttgttttctcatcatcagcgctaattacccctaattatccccaccttggcctcatcatccaccaaaatgttcgactcattgaaatcgccgtgcacaactccttaaattagatgcaaattgatttctgtgtcattgttgtcgcaagccaaaaaaaaaatcggtttactctcaataaataataaattttgtaaaattaggtctgtaaaagttgaacttttgttttgtttttttccaaaaaaaatctcacaaaaacgtaatttttaattttaaaattttcaaaaaccacagattgtttatgaaaaatcttagttactagttcacttaaatttaattttatttagtgaaaaaaaattgtgccgaattccatccctccaccgcgccccctccctacaataccgtaaggaatcggtttctattttagaatacgatataggtaattttagaatacgatataagtatttaactatgaaatgtccatttttctcccctctctttttgggcgtatgccttgctcaaattcgcttctcctccccaacactttctgatcaaactgttcaaacacttcggcacactgtttggccatttttgcctccaatttgtccgtccgtttttgcaattcaaactcgcgccaatgaaaatgccaatgctccagcgccataattggcgcatattggcgaaacactggcggacaaaaattgtgccggtcgcaggcggcatgaaatgtgcccaacattgtgccaatttgttcacagaaagtgtccactctgtgaagagagaga

SEQ ID NO: 10583 - DNA, 1714 bp, Heterodera glycines
  unsure (1)..(1714): unsure at all n locations
tacaaatagacaatggcattgcaaggtccaaaatgcgaaatgagtagttgcatcgccaaagtcgatcagagcacacactttagtatattaggcatttgttttctcatcatcagcgctaattacccctaatttatccncaccttggcctcatcatccaccaaaatgttcgactcattgaaatcgccgtgcacaactccttaaattagatgcaaattgatttctgtgtcattgttgtcgcaagccaaaaaaaaaaatcggtttactctcaataaataataaattttgtaaaattaggtctgtaaaagttgaacttttgttttgtttttttccaaaaaaattcttacaaaaaagtaatttttaattttaaaattttcaaaaaccacagattgtttatgaaaaatcttagttactagttcacttaaatttaattttatttagtgaaaaaaaattgtgccgaattccatccctccaccgcgccccctccctacaataccgtaaggaatcggtttctattttagaatacgatataggtaattttagaatacgatataagtatttaaatatgaaatgtccatttttctgccctctctttttgggcttatgccttgctcaaattcgcttctcctccccaacactttctgctcaaactgttcaaacacttcggcacactgtttggccatttttgcctccaatttgtccgtccgtttttgcaattcaaactcgcgccaatgaaaatgccaatgctccagcgccataattggcgcatattggcgaaacactggcggacaaaaattgtgccggtcgcaggcggcatgaaatgtgcccaacattgtgccaatttgttcacagaaagtgtccactctgtgaagagagagatagtgatgcaaattagtatacggtataaatttttttttgtagtattcctatattacggtataaatcccgtaaaaacatgaatttttcaagaatcggtttttctcacaatcaggcttcattttcaaaaaatctttaaaaattttatgaaaatatcaaaaaacttttaaaacttttaaaaattttttttagttattttttgtaaaaataaatttgaaaagcatcgaatttaaaaaaagggggggggagggttaacgaaacctccccaactatcctttttttaaataaaaaagaaaccacactactaaagagtaaaataagaaaaaaacttatttgtgaaagacgaagcaattttaaaatttccaaaaaaaaaaaaaattctcggatttttttcttatttttggcttgtggctcaacccggcccgcctcatttctttttcttcaccggtcaatgaatgttcgtgttgccgttggcgttgaaacgacccaatcgcccaacggagtgcccggcacaaactcacggagcacaaccggcggaattggcatttggtggccaaaaatggcgccattttctgttgtctggtcattaatggccaatttttggcaatttgtagaactgcagtctacatagctgttgcgtaaaaatggaatcacagtgtataaaatgaatgattttttgaaatacaaaaatatgggtacagtaatccgtcaattgttttgatggtttggggacattttatgccctcgttggccaccagttgagcaaggtcggcctgagcttctgtaaatttcgggggtttttaaacgtgagtttgtacganaatttaattttttctttttt

SEQ ID NO: 10584 - DNA, 3417 bp, Heterodera glycines
  unsure (1)..(3417): unsure at all n locations
ttagttggttcatacctttattttaaatatgttaatgcattttggcatcccgtcaaaaaaaaatttcggctttcgtaatcagtcgaaatcaacaacaattttgctgacaaatataatgataacatcagttgggaggaaaagatgatggtttccccgcggtcattatcaatagaaaatcggagaattcacctctcaacgccaaacccccgccccccccccaaaaaaaaattctatttttgattgtttaattatattgctgctgaatgatgatattgctgttaatgattttcacttcaaatttcgaataattaattaatttaaggctgaataattttcaaaagatttaacaaagccaaaagccacgaaatttttgacttggaaaatttacctattgcttttatttaaaagatttatttccttttgttttcagatataaacttccaactaccgtatttcctgaaatagagcccacggtggctttatttttcaacccccctcaaaagggggggggctctaattcagggggggctctatttctcaaccctctcgagaggtagggggggaggcttgatttcagagggaggaggggggataccaggtaattcagggggcggtgttattataggaaatgggtttttgttattattttaaaaagtcaaaaaatttcgacatgcggcttttcgggcagggtttgtttagcattaattttgttagcgcttctaatggtttttgacttttattttttaattcgaatatctcaattttcaatattattaattgttatttaatttaaaaaaaaataaaattttagcaaaaaatgtactcaaaatatttttttgaaaattttatgaaatttttgacaatttttgttttcattggcattcactcgtcaaccgttgctgaagttattcatcagcttcctgaagacaatatttgtgccaagttcacagttcaatttttggaggaattttatcagtaaaattaattttaataatttaaaatctttttaattattattttttatattttaaataaaatttatttataaatttctttatttagacaaaattcgtcttctccaatgttcggatggattacagctgaaggcgatgtgacacttggccaacagaatggcacccattttggcattaaatgtttggcattggcactgtccgattgggacttcgtcgtcgaccgtgcatgcttaatgcaaacaattttgaattgctttaattattattattaattaattaactaactaattttcacaaactttcaaagatagatataatttgaatattgtagttaactaaattaattttaattccacaccttaaatattcaaccaatcatttaatttttatgccattattttttcataaaaaaattgggttaattgtgaggcttataattgttttcttgtaaaagaaaattgtgttaattatgaggcttaattaacctaactaactcaaattaggccattaaggattttcaatttttattgaaattttactctanataattttttattaattatttaaaaaacaatattggaaacatttttaggacattggcaccaccaaattcccatcggcgttttattgcaagcccatggcatcaacaaaatgatcaattgaacaatggcacaaatcaaacagctgatcaaaatgtcagctacattgtaccattgaaaagtgctgaagtgcgcagtccgcaactgatcagtgtacggaggcaaatataatataaaaaatgatttggaatacgtaatacggcatggggactgaattggccagactctgacagcaaaaaacgcaaagatttttctagcggttgagaaccaagaaaatatattttggagacatcattaattgttggaaattttcttaaaattttggaaactctcctcttaatattatttattggaaattctgcaacaaatattgccatatttctcgaattttttcaaattctggcaaaaacatgagaacttcttggcttggccatttttaattatatgtctttaaaagaattgagcttattaaccccaatttatgaaaattcttttcttggcattacaataattcttaaatggcctttttaatatttttgccaaataaatttaaattgaatttttaagtttgtccaaaaatgggcgaataagcgtccaactgctcgaccatgcattttcccaattgacgacaaaatcgggtccaaattgagttggaatggcaccatttgtggcctaaaaagtcggcgaataaaaaataataaatttttggtaattaaaaattgcaaaatttaagagacagccgctcagaatgatggcacaaatgccactaatgacagccgatcacaaaaatcaccacaaatcatttgccatccaatggaattgaatttggaagatggaaaagtgaatgatcacagcagtgatacttttcgcctccttcacactgtgagtggcctcaaatttacaaattttatacaaaaaatgttataaaaaaataaataaaatatataaaataaatttaaagtttattaagagacaatttaatgaatacccgatgtcatatatttaaaaattatcattgaaaattcagaaaaaaaatacatttcaacttacattttacaattgtaatgaaagaacaaatatgcgcatttccagatgtatattaattgtaattatttatcagaaaaacgcattttcagttcaggctttacaattgtaatttaatcagtggaaattggaaattcgcatttgtattagacaattgtacttaatcattggaaaattcgcatttgtattagacaattgtacttaatcattggaaaattcgcatttgtattagacaattgtacttaatcattggattgtaatttaatcagtggaaaattcgcatttgtattagacaattgtacttaatcattggaaaattcgcatttgtattagacaattgtacttaatcattggattgtaatttaatcattggaaaattcgcatttgtattagacaattgtacttaatcattggattgtaatttaatcagtggaaaattcgcatttgtattagacaattgtacttaatcattggattgtaatttaatcagtggaaattcgcatttgtattagacaattgtacttaatcattggattgtaatttaatcagtggaaaattcgcatttgtattttcgcatttgtgttagacaattgtacttaatcattggattgtaatttaatcagtggaaaattcgcatttgtattttcgcatttgtattagacaattgtacttaatcataggattgtaatttaatcagtggaaaattcgcatttgtattagacattttacttaatcattggattgtaatttaatcagtggaaattcgcatttgtattagacaattgtacttaatcattgga

SEQ ID NO: 10585 - DNA, 1760 bp, Heterodera glycines
atcattggattgtaatttaatcagtggaaagtcgcattttgtattagacaattgtacttaatcattggattgtaattaatcagtggaaaattcgcatttgtattagacaattgtacttaatcatgggattgtaatttaatcagtggaaattcgcatttgtattagacaattgtacttaatcattggaaaattcgcatttgtattagacaattgtacttaatcattggattgtaatttaatcagtggaaaattcgcatttgtattagacaattgtacttaatcattggaaaattcgcatttgtattagacaattgtacttaatcattggattgtaatttaatcagtggaaattcgcatttgtattagacaattgtacttaatcattggattgtaatttaatcagtggaaattcgcatttgtattagacaattgtacttaatcattggaaaattcgcatttgtattagacaattgtacttaatcattggattgtaatttaatcagtggaaaattcgcatttgtattagacaattgtacttaatcattggaaaattcgcatttgtattagacaattgtacttaatcattggattgtaatttaatcagtggaaataattcgcatttgtattagacaattgtacttaatcattggattgtaatttaatcagtggaaaattcgcatttgtattttcgcatttgtattagacaattgtacttaatcattggaaaattcgcatttgtattagacaattgtacttaatcattggattgtaatttaatcattggaaaattcgcatttgtattagacaattgtacttaatcataggattgtaatttaatcagtggaaaattcgcatttgtattagacattttacttaatcattggaaaattcgcatttgtattagacaattgtacttaatcattggattgtaatttaatcattggaaaattcgcatttgtattagacaattgtacttaatcattggattgtaatttaatcagtggaaaattcgcatttgtattagacaattgtacttaatcattggattgtaatttaatcagtggaaattcgcatttgtattagacaattgtacttaatcattggattgtaatttaatcagtggaaaattcgcatttgtattttcgcatttgtgttagacaattgtacttaatcattggattgtaatttaatcagtggaaaattcgcatttgtattttcgcatttgtattagacaattgtacttaatcataggattgtaatttaatcagtggaaaattcgcatttgtattagacattttacttaatcattggattgtaatttaatcagtggaaattcgcatttgtattagacaattgtacttaatcattggaaaattcgcatttgtattagacaattgtacttaatcattggattgtaatttaatcagtggaaaattcgcatttgtattagacaattgtacttaatcattggattgtaatttaatcagtggaaattcgcatttgtattagacaattgtacttaatcattggattgtaatttaatcagtggaaattcgcatttgtattagacaattgtacttaatcattggattgtaatttaatcagtggaaattctcatttgtattagacaattgtacttaatcattggaaaattcgcatttgtattagacaattgtacttaatcattggattgtaatttaatcagtggaaattcgcatttgtattagactaattgtacttaatcattggattgtaattta

SEQ ID NO: 10586 - DNA, 1012 bp, Heterodera glycines
caaaatcattcttgcaaataaaacaaaaaacgggatggatttgcttttacgacttcccatctgttgctggatcgaattctttgggtttcgcagcagaaagcataaaacgtctgcgactcttctccatgtcgtgtctctttaatatggaattgaagccctctttcgctcatattttttaccttgacataaaattcgtactctcctccgcgtgtatcgaatgtgcctttctggagccatttaagtctcaatgtcattcggggacccaactcatggagtgctgccttctgtccttcttttttaaattcgtacctaaagcggcaaaattcgaatacgttttacaagataactagtgatttacaaggagccttttgcaattttaccgatggtgacggaaaaagacgtagtcgcgctgattgtggaaggtcactactcgtctgccgccataatcagctttttgcgggaagagacaggcgaacattcggctcaccgttttggccagccttgtgttgaagttggtcagaataagttcagggtaatgttccgttgcctcaccgacgtcctgcaaattcaatatcgaaaatgagaaaaacaaaatatactttgatctgtttggagtattgaagcgaatttatcttaaaaaacgcagtgggaccattcggaagatggcaaaaaacgattccatctgaattaataattggaaataatggaaagtagaaaaggaatacaaacttggttttttgcgatcttcgtgcaccaccattaggtcagaaaaaccacgctcaattgcctgccgcacaacacgttttatggcaacgtttttcctagacacaatttctgcattcggaatgaccttttttaactcgaaacagagtttgaaggttttctgacgaaaattttttatttttttaaataatatcattcttacgagttttgctctcggcgaagtggtgataagaacctttcggatggcagaccctccaaaaaatgtgcatcgcatcattttccatgtctt

SEQ ID NO: 10587 - DNA, 2994 bp, Heterodera glycines
tttatttttcgttaactaattaaatattatttttgagtttttggcctcgccaggagctcaggtccaagaaaaggatcgggcctagagtcccggaaaatgggatttttagtcccgggaatcccgatccatcgtcaaatcccggtcttagtccagttcaatttagaagcgagtttagcaaataaaaatgcgctgccgtcgtggccacaaatttttgtttctgcgattttgttcttctgttccttgtcaggggaatcagcgatctgttgattattctcaaaggccattacgtccacttcttaaatatgtgccaggtcataatacttaattaaattggattaatatttttaatttaatttggattttagaaaaaattcgaaattttgccataattgctcacgttgaccatggttcgaatctttggattttgcgactcaatcgtataaactatctattgaaggaaagagtactttggctgatcgctttctgcagttaaccaacgtgatttctaccgaatctgatgcccaatacctcgacaaacttgaggtcgagcgcgaaagagggatcaccgtaagtaaatgaacggctaatttatagaggtggccactcgaataaaaagtcaaaatcaatttcaaaattcacatttatgttcgaatctacatcgaaaacattgagagatttttttagatcaaagctcaaacttgctccatgttccataaggtaaagaaagatatgcgtatttcatttttatattttatttacatttaaggattttatgctcaatttggtgtaagttgaagactgcttgccttgccttttgtcgtctaatcagccattcattcggatcgcggtcataatgggtttttaagcgaaccaattgggtaaatggttatcatttgattggcttatgaacaactttagaaattacaattactacctaattattagtattagcaaatcagtaaagaaaattaatgaatggatggcagttggatgataaaaattatcggacactttttttcacatttaagcgatactcctggccatgttgactttgggtcggttagtactttgattttcatttatttttgtttttttagcttcgaggttaaacgttctctcataacctgcgacggagcaattttgctagttgctgctaatgaagtgacgaaaataaaacattttctttaattttacaattttagggtatccaagcgcagacccttttcaattttcattcagcctttgagaataatttgagcatcattccggtcatcaataaaatagacatgaaggcaaatattgccaaagttgaggaagaattacaacaatcgtttgggtttcatgccgacgaaatttttaaagtgtctgcaaagacgggaagaaatgtaccgaaacttttggaggcaattattcagaggtagaatgattgtaagagaaaattgtagtaataattatctgaacaggataccaccgccacaagttaaccaagaaggaccgtgccaagcccatgtttttgattcttggtaatgttcagataaaatacattacagtgtttttttcttttttaattatttagtttcgatcacttcaaaggtgctcttcttttcgtcgtggtcaaacaaggcattttgactaaacatttgcccattcgattcttcagtagcccagaaaaagaatacgtcgtgtcagagattggcattttgcatcccgagacaacgccgacgaacgtgaactatcttttgggaaagagctgttattcaaatcgagtttccttttttaggaactttaccctggtcaaatgggctatatttattgcggaataaaatcttcgagggatgttttggtgggcgacacacttttccacgcgactgaacgtattgaaactgtgaaaccatatgtggaaattggcaatgttaaacccacggtttattctggacttttccccatggaaacaacggaatacgagcgactcagagtaaaaaagcgaagacatagcctattaataaaataataataattaatattaagaatgcagttgaaagtctccaattgaatgacccttcggtgaatcttcagatggactcgagtgtggtttttggccagggatggcgggtcggatttgtcggcaatttgcacatggaagtgttcggacaacgcttgggtaatattcgttgtgccttaaccaagtgagaaaatatttcaaccgcagagcaggaacatggcgaattggccgttttcacctcgccaagtgtcaaatatttggcaggttggtatttaacgatgcagaaacacactgacaaaggtccttcagatatcgttgacaacgaaggcattcggaaacggcgacacaaaggacaatcgcaaattgccatttgcaagccatccgattttccggaagtgccaacggatgtgctaaggtttaggcatccttccaaattgacattgaaggagtatttattgttggtaatatatttttccactttgagatttttggaaccaatgtatttggtcagtattgtgacacctgccgaatatttctcgaacattgaaagactttgccaaaatgcccgcggggaagtgcttgagacgacttacatagacgaaaagcgaatgattctgaggtggcggttgccgttggtggaaattatcgtcgatttttttgacaaactcaaacttacaactagcggatttgcttcgtttgatcaaaaggatgacggtcagtttataccacaaaaaagtcgaagaatcgtgagtaaacttgaagggagcaaagcgaatgattattattaaatttggcggaagggtcacccctcaaaaaaaagcatacgtgcgccagggatatttaatagggatggattttaagtaaattttgttaaaaatttgaaatttttcctcgtttccctttggcctgcgccccactcccccacctcttttacagccgcaccccttacgacggaagagtgtgggtgcgttacgacgaagcggggggggggg

SEQ ID NO: 10588 - DNA, 2345 bp, Heterodera glycines
  unsure (1)..(2345): unsure at all n locations
attaggcatccatttcgaccaattctggacccgggtcctatttcgaacaaaaagtttcgaaatttgctcttttcttgtatttataaattccagggcttaagctttcgttaatgtgaccaagtaagacaaaaggaagattcacccccgattcttgaggtcaattcttgcgaaatttggtcttcacaaaaatagtaattttccattaagtgtatccttagtagaaacaaaaaaaacacaaaaatattttatttctttataaacaaaaaaagctaaatttacaaatgatttaaaatttagatggtagacaggcagacagacatctgtaccataattgatgcaaaataaaatgcaataccgatagaatttcagagaacaaagggagggtgagaatagctacaaacatagtaaatggctgaaaggcgaagaacacacgttttttgatgacaaatgatgaggaggaagggaaacggatgaaaaggacagagaaagagggcgagaaagagagagggagggaagagagacaaagaaaaagagaggaaagagagacaaaggaagagagagagaggtggacaacgcccgcaggggtttagccgaagctcactacatttggtatgccatttatataaaatattaaatgcctgattagcttttaaagctcaaagtatagtaattcgactcaggaaatctgagaatttcactttttttttgagatgtccaccaatcgtaactctccattggataaatagaggatgaatgaatgaattaagggggaaaacaaagggcacagaaagggaagaatggtagcaccgagggaagaggttttgaacgattgcgatgattgggtcggctctcagtcagcctttaaaaaataaaacgacggtcggatgagaacagtcggctcatttccttccggtcgacttgctgttttccaaccgttttaggcgcactgaatgaaaagaagaattgggcttctgcatctgtttttctgtgttatttgacttacgtctctcgtaattcctctccaacgcctcccccacgcggttccgcgcctccatcgattgcagcgaaacaccgacacggagaagcgagtcgttgtcctccacgctgagcataatgtcctaaacgtatgggggagggagggaatgatcaaaaattggggaacaaaaaaccatttcgatttgattgcccagcacggattgcctctgaaatgcaataatcagtataaaaggaggggggggggcattatttgttgtgaattgcctgattttcggcgtggaattccaccaatgattgcgtttgcagcgtcgccctgagcaatttggcgatcatttcgggactgatgaaatttgactcgatgttcagcactttcagtgagtcgctgtgctcgataagctcgactaatggcttaactttaagttaaattctccatttttgttccacaaattacacccaaaagcccagcaaatttcgtaatatgcgcagaaaaagagaatttctattgggcacaaaatcatttttattaataataattcaataattagtcatattcccccggaaaatttaaaagttagagaaactgagcgattctttcaaaaattagccgaagatttttcaaaaggagggggaacgaactgctccccggcctattcattacccgtgcctcctggtcggagatggccgtgttggccatgcacagcttcttcaggtgtttggatttgcacgccgctcggagcatcgaccgaatgcgttcctttgacactcttttcaggttgtttaggttgacctcctccaatttgacgtcgccactctccaacctcctgaacacatccgttttatgttatgttttttttttgtatttttgggactgaattattcgccagtaagtcccggggtcgacccaatctataattactataattaagtgtcataaaatgatgcagcattcgctcgcctggtgcactcctccacgtccgtctcgttgtccggttcgtccggaaccacccgaggctgaaacgctttgatcactccgctgaaggaaatgccggtctcctcattctgtcctttgcccttcagcgcgttgtaatattgaggttggttgagcacattatgcattcctaaaaataaattagggaatgccaaatttgttttaatttgtgatggtcgatcacccaaaatgccggccaagtcgaccaggtccctttccggtgccgcagtcagtgccttttcgatgatcgtttcgtcgttctttgcncctgtgggggtgcgcttcgccctcagccgtttcttcgtcctccgcctcctcctcttcgtcgtcgtccaaatccaaactcattggcatctgacat

SEQ ID NO: 10589 - DNA, 1889 bp, Heterodera glycines
ttccttgggtttttcagatctctgttcacgaatctgctctccatttttattatttccaaacttgaattggaacaaaaagtcgaaaactcaaattttacaacatttttcactattgctcgaaaattgattaaagcgatataaatttagtcacaatcattgaaacctcaaaaatgaataattctgtgtagactcgaacacaaaagcaaattttgagatttaaattttcgactttttattcgagttcggatccgggttcggaattggccaaaactgatattagattcgtgttcagccaaaaatttcaggggcgggtgacaaaaacagaattacccaaaagagattggcttgccaaagtctgatcgcggagacaaagtccacccgacttgtgcccttccccccccccctttttcacctgcatttccctccttccgtccgcccccactttggccttcggttcgtccgactcaaaaacctttcctgaatttgcttatttttcaaattttgagaaattgacaaaaatccgacccctttttacgcccggggcgaatggaactgcctcctcccagtccttttcacttttggccttctcctccaagtattggagcagtttctcgcgtttaaaggggccggtcggctttttgtccgtttggttgcgacaccgttgggagggtgggagcagcgaattctgaatttaaatttgaattagagccaagaaaacaataaaaataaattttttgaaaattatgtcgtctatccgtgaagaccaatctgaaggttttcgtggtgaccgtattacgaatgttgtcaattctggtcaattcttctaagcaatgacttttttcttacttagccaatgaactacatttttgatatcaaacgatagcttaaagtctcattgtcaggaattaaaaaaaagaaaaaagcaaatactgacattaaaaaaaacaattataatgataaaacaagaaattcagtttttcgaattttattcaacaacaattttttgtttattgcatttagttcagaatttagttgttcaaagaaaacttcaaattttcgtttgataccaaaaatgtcggcattgaccaaataagaaaaaaaatgatggcctttgaaactgaggatgttccttaattggatgcgtaaactgcagtattttttatgacaaaaagttttgaaaacaaataaatttaaacaagcccactgggggagggcaaaggcatttttgcctcccgcaaaaatgaggtgactttctcaatttgttaaatccctccgtttctttttcctacgtccgggtcaaagtcgttgttcaactcctccaattcgtccgtgttcaaattggacagcaatccctcaatgtctttgtcgtcgtaattgctcaggtccctcccgtaatatttctctcccccgcaatttccggcaccgctggtcaatccgccgacgccgcccgcccttttggccaatggttgctttggggccgccagcgttttttcttccgcgtaataactgaactttttaataggaaaatgaactttttaataggaaaatggacaagaaagggatgaatttaaaaaatgatttttatttatttaaaaaaataagacaaaatgccaattaaatgaatgtttgaaaaaaacaaattaaattcaaaaatttgaaatattcaaatttcaattttaataatttaaattattttctatcggaaaaaaatcattgaaaaaacaagggaaatgcccgaaaatgttttgatgaatggcttttctccgttggtcctcgtcctcgtcgttcggagatggatggcccatcgccccccacacgatggacatgtcgtaccgcactccgtttcatgttcaagagcgtttgttgaatacaaaatttctcaaaaaaag

SEQ ID NO: 10590 - DNA, 1910 bp, Heterodera glycines
  unsure (1)..(1910): unsure at all n locations
ctgcactttattgatcatttagcaccacacctatcgcagcacccttctcatccctccctcatcaacccgcttcgacgggcgagcgaccggcgatgactttgagtgattccttgtgctgttggaccattccctcccccccccccctcggtccgcaaaaatcatcggcttattccctccccccgttcattcgttcatccatttgtccattcattgtcattgtcccaatttgcacaacatttgctgcttttgttattaagcatttgcagcggacaatgcttttgctattgcttctcccccccccccctcccccgaaagatcactcaatggaaatgggagagaatggacaaggctaatgaatgaatgatctgaaaatgcttttttggggctggctttgtggttggagaagaggagaaaaattgcctaattgttaatgttgaccagtggaaaatgttaagcaaaatttcctatgaaaaatcaccacaaataaaactcactcgcttttgctcatccttttgcgattggtcttttattggtcggccaaattaaattgaagaaaaaaaacaattaaaaagataaattcgggaatggcaagaagaaaatgtacagacgaaactgaacacaaaaacattgcattaaaaataaaatattataaaatggagaaaaagaaaatgcccaaatgtcccttcataaattttaaaatgaattaaatattaaaactcaatcaaaaaacggaagtcagaaacatttaattactattaaaattggccattaatgctaattaacttttcaataaaacaaggcaaactcaaattaattatttttcaatggtaatttcataatccagcgatttgacaacaaaaaactgtcaccgatgagtaaaaagccctccttactgatctagcaattatttttgggttttcatgatttattaaatttatgcacttattttagtattctttttgatttcaagcacctcaaaatccgatccctattgataaccaaccctttggagaaatctcagcaataaaattgtatgtggccttaaaatgtacgcagaatttgtacagagtgggggcgggtggggagggcgaaagtgagtgagtgattttggtgggagagttaggggagggatcaatcgatcaaatgttttttgtttggagataaacgagcccggtcggtcggaccgatcggtgtttgacagctgagccgaatcagcagcgagcacaaacacagttggcggagatgggccaagggggggggggggagaagggcaacgggggacccatcaccccagggaaggccagcagaacagccaatttcggacattttgttgaggaaggacgacggacaacggacggacggacagattggcaactcatcagagtgccaccaattcattcgatcaaattggcaccgatgggaacggaaaaaggcggacggacgaagaaagtgcagaactcacaatcagcagaattgtggcgaaggaaacggataaatcacattgggaagaggtgaacggagaagcagcgatcagccagccgaaaggagtgggcgaggaggagagcgtaggcagagaaagagaggaagaaagagaaaagtgatcagcagtagtcaaaaaagatgaggaggagagaaagagaggagagagtgatcaatgggaaaataataaggaaatgatcagaagaagccgaggaaccaaagatgcgggacttaagtggtcaataccttcggtactgaattgtaaagcgcatgaatgtcctacaaacactaattgatctctgtcattaatgcatatatgaattcgtaggatttttttgaggttatagtggtgcttgagtgaagtggcaaaattgaaattgcgttcgtaaaagtatttttttcccaaaaacgggacccagtcgnactacggc

SEQ ID NO: 10591 - DNA, 5669 bp, Heterodera glycines
  unsure (1)..(5669): unsure at all n locations
ttttccaacacgtcaaataaatataantttttttaaatataaaaaacagacctgggtcgatggaaatccacacgtcctttttgctgcctaaaaatgagtggagtatttgtatttgtgaacaaaattttagggaattgaacacgaaaattgaaaaaaaaatgccttacatttttaaaatggttaaaaaaaatttttgcctgtcttttttcgattttttttttggctcgttttacgaccgacggtttgactcggagacggcaaattttaaatatttcgtaccaaatttttataaaaaatataacaataagagagaatttgtggttctttcgatggtaaatgacgcgccaagaaaaattttggaaaatttagcgcaattttttaagaaattattcaaaatttcactgggccatgcccatgccatgaatgccaaatgccatggcctcctaacctgcgtagaaaacgccgtcactgctgcggcacggcgacacgcggaccaagtgggggatggtgaacggcaacttggagagccgaccttcgaccaccaaatacagttggccatcccgcgggttcgggatgaaggtgaagccgcgctggatgctcaccggcgaggacagcagggggcctgcaaatgttttttttaattttggggtggaaaatttaaattaaaaaaaatgccgagggggtggcaaaaaatgaaatattttgaataaaattaaaaaatgcatattttgacgggttggaaatttagacaaaaagcaaaaccccggttacccgtccgatgtccaatctagagccccaaaattttgaaaagtcggggatcaggattaaatacggaatttgggcacgggttccctattttgccggaatgtgaatcttgacacttgaatccaagtcccggtttttgtcggaaacccaggaaaaaaatgcaaattttgggtggaaggcttggaaatttagaaaaagccgggaccaggatcccggaaaaatccgaagaatcccaattccgtccagggccctagacgaatcacagttttttgtaaattaaaagtcaacaatcgaaacaatttaataagcgccactctgcgcaaattgtgccgaaaagcatcacctcgaccccgccaaaaatgccaaaattcgaatgccaaaggagaggatgaggctctattatgcgtccattcaatgttttgaataactaaattttgggggctaataaaaaagacaaaaaattatttttgaataaacttgaaaaaatgactttcaatgttttcgcatttttaattattttctaatctcacaatttgcccttttcttgcattggtaaattccagagactttaagctttcgattgataccaaaaatgtatgctttggccaattatggaaaaagttatggccttcaaaactgagaatggtcattgattagacgcataaattggaataaagccggggataatgccatcaaaaccaattcaaatcggccctccgccgaggacggcacggcaccttcgtggaagcgccatttgtgggccccggtgtgcgcgtcgatggcattcatatagccgtcgatggtggacaccagcagcaaagtgtccgccgctgcaggcctctgttccgccaccttgtccgtcgagtaaatgttgggctgaaaaggcataaaaattttcaaaaaaacaaaaaaaattgacccttagccctccaaaaaaccgaaaattcgcaaaataaaaaaaattttaaatccatttaaatcctcaaaattgaaaaaaaaacagtaaactctcttggtggatcatttttaaggggacggaaaacccgacaattctcaaacaaatcaaatatttaaaaacaaataaataataataatcccctgaggggaatttaaaaaaaattgtcggggtcaaaaatatttttaaaatataattttaagttttttagaagagaggcaaagaaacatcagcccaaatatttcattttttgcaccttataaaaaaatttaaccctcggaaattgctaggctcaatttatttcattttccaccctataaaatttttttacccttttttgccacccaacaaaaaatcgattaaattttttaaaaattcaaccctttgccacgctaataaaagggcattgtcattgtctgtgtcagtctgtattatgctgtgccatatacgagtgccatgccaaaacaaaaaacaaaaagtgccaccgttggcgcgacggttgtccacgccgaaacattcggcgccggctgaacaatgagaaaaatggggaggaggaaaagccatgatgccaacagcagcatatttgcttcacattacatccattctctgtggaagattgaagagggcaaataatggattagtaaaagtcgattgtttctcactgaaaatgaaaaaaagtgagaaaattgccgatgaattaatggatggacaaaattggtatatttaatgagaatttggcacaaatttttggcaaaaatattactgttaaaaaatttggcacaaattttcctattttcaatgaaaaattggcataaatttttactgttaatgaaaatttgcatttttttctagctgcagaaatcgggtgtttataaacttcggaggcgcaaactctaaattaattttttttaattaaacgattgatatagaaatatttcattaaattttaaatgaaatattttgttatttgaaaataatcaatccatgaaatccataatgcttatggaaaattctcgtccggaaagtattgcaaaattgaaaattttcatgccttggcagcctaattagtcacgcctattatggacaatttggaagatacaaaatttaatttgcgcttttattggcgttttgttttcaaattaaaaaaaatcatttaaaaaaagtgtaaaggaaagggacgtcacaaaggccacgtcgttatggtgaacaaacaacagaaaactgaatattttattatcaatttttttttgtccaaatgaattaaacggtgaaatttaaagtgcgttaaaaacgaacaaatcacaatttcttggtaaaaacatttattccataaaaataaactaatttaataaatctttattaaaagtcttaaaagtcattttgtaaaaatggaaaattggcatcgtccatttcatagaaaggcaccacaataaaattaataaggaatattaataaccatgacaaataaatgatggcactttatgaagtgtgcgtgtttaagggaatgggctctcattttccgttcttgacacaccaaaatatattttaaaataaaattaaaatctgttttaattatattaaaaatccatttttattatttttaagggattgacgtgtgcagaacggaaaatgcaacaacaaaaataaaaataattatcattaattaggttgataatgtaaaaatgggtcatctaattaaaaaattttattgtctgtctatttcttcttcaacacaatcgccacacgggacggtatgtaaacgcagagatggtttttgcgtccagcgtacctaaaaaattaaaaaaaaaaattttttttcgaaattttgccaacccctcggcaaatgtgtggtagcattggtcctgcttcaaccggttgtgcccaccaaattcggactggtcactgttcagtgccaaacagtagctaaatttaaatttggaaataggaaaatgttccccttttaattaaatccattaaaaatttgaaaataaaaaatttaattattcgaataagccaaatttatgtaaacttacaaaacccacccataattactattaaaaaatataaaaaatcgtcattttttgaattttgatttgctaaagaaatttcaattttaaaattttatggtgaaaaagcattattttttatttaaaattctaaaaccaatgaaaaactttgatattagacgacttacaccccggacatctccacgccaattttgtaatcaccaaaacttttctccggatggaagttcaggatgaacacgaggccagcacgttcgaacacgaccagcttgtccccatcatgtttccaggacacgtaggcctataaaaatacatttagaaaatttcaaaaaatttaattggggggaattttttacctttttgaacttgccaagccccccccccaactcgccgaaaaagagtgaatgcaaattagtccccaacttacatgtccatgactcaaaaattcggaatccatctccagatggttcattgcccgatcccatgcattcaagtacttgtagcgaagtgtcaagtcctggaaaactttttttgaagaggtatataggacaattcggcgccggacagtttgccgctgccagctaggcgtgggcccggaattggacagtgattcaaccttcaaccccgaaaatttaatttaaaccgggctaaaaatcttaggaataatcccaggaattcggcttggagtgagtatcgcgcccaggcgacaacatttttctgggctccgaatgcttcggatttatctgtcaatttagcaatccccaaaatttccgagtctcgagcaaattaaaatccattttcctatagtagaaaaatgcttacatccgccaaattccactggcgacggcaatagtggtaggattgattgttgccctcacgcgggaagtccaaccattcggggtggccaaattcgttgcctaaaaacccagacaattaattattcatcaaaaaggagacaaaggaaaaacaattaataaaggagcgaaatccgttccatcgggagcaggttgtttcccaaaagcataaaaaatagaatttaaaaaactaaaaccgagaaaatttttggcgacagaggcggggggaaatttgtgaggggaacagctcgtctcctacgtatcgttttccccagaaaatttttaaaaaacagaaaatttcagccaggaattagttaattgaaaaatttctcgaaaaattcgcagaaaatatggggggcagtgcatccatttcgagccacgagtttttaaccaattaaagattttaaaaatacatttttaaatatgaaaaatgcattaaaattatttatttgtttaaaataaatgtgttctgtcattatgaagtggataaaaatcgatgtaaagtgaaaaagcttgaaaatgagccctcaagcacaaaatttcgacttttgaggccctgtaacttttgaagcaggcggaatgcaccgctaaaattaaaaattcacaatagaagtcgaccctgctctatccaatgatatgtcatttatatgcattttcctagttacagctcggaatgttccgttaactgtaaaataaaataaaaacaattgatcgagatcagatttattcatcttcgaaataaacataatttattagctaagagttaacagatttatcacaggtaaaatgggcaacaaaataagttagagcagaaattgtctttttgaaaaagttaaagtcaaaaaaggtaagacaaagaaagcttttccgaattgaaaagttagtcatatgaaataataaaagcctgcataataaagggcacggttagatcaaaatcagctgattgtgagtcacttcccttctgttggataatcttctcacgcttcggtcacataatttgcggggaaaagtccctcacgtccgtccagccgtccttgccaccaaccggagtcgtccctcttcaccagttcg

SEQ ID NO: 10592 - DNA, 2672 bp, Heterodera glycines
  unsure (1)..(2672): unsure at all n locations
atttatactccggatatgctggatacgggtatcaatttaaaatacgataaatcaaattattaggcatatttagatgcttgttgaccagtcgagagaatataaatcaatttttatattttttgaattgggacatttccaagcaatcatagatcctaaggaattaaagcaaaactagcttattataaaattaaaagcatttcataactatttttaaatgttaataataacaaaaatttgctctttatataatcaagtataattgtattaaaataaaaaattgatttgctttttattcaatgataaacatattcaaataaaattagtttaaaaaattttaacttaaataaataaataaataaaccaatataaataaaattatatttattttgcttaataaaatttatttgctttgcttgattgctgtggctttgtgtgtatacggtttagggccgaaacacacataataattaatttaaattatttaacccaaagagacaccgtactgatgaggcccggtctctttcggttaaatttgcactgtcgcgaagtgccctttttgcacttgtcgcgaaatgacgaagcaccgtggaatttacaaaacgccaaatgtctcacctggcattgcgccaactattttttcataacccaaattgtgccattgcgatattgttggagttgcgctttgtgagatggcaaattttttgattgttggcaatgcgcgaaaaatgctcaacgaaaagtcccatgatgatgtttccataatgccaacattgaattggaagccaaacaattgctggatgatgccataataattcgtcaaaaaatctgcaaaaaaataataatttaaaattcaaatttatcagaattaaaaaaatctcaattttcctcctggcacctcataaccgaatcgtttatttgttttacgaaaaatgaactcttttttaacaaatatgttatgtaatttcaataattttcccgggcagtacctttcggtaaaattagcaaacttaattaaattagaaatttacgcaaaagagtaaaaatttatttttgtcctcttcgcccatttcctctaaaagttataaaatgtttaattttaatagtttccttagcaaaaaaaaaaaagattttatcaattattctttcttcttccttaccaagttgaaaagagtccgctttgttggcatttggcaaaaaaaactcagtaatgtcctgttcccaaatggacacctgctgaccgtgttctggcctaaatgtaattaagtgtataccgtagtattgcgttcactaaataaatatattaaagtaccatttaaaaaggttagctttaaataaaatgatcggccaaaaatttaatttttaaaataattatttcgaatatttttatttatttggtggccataataattaattttcagcagctgtttaaggtaagaacagtagatggtgaaagtaatttcgctcgataaaaataaaaaatatgatctaatattaaaaatcaagccaaaatatattaatataaaatgacttttgctgcgtaattaaaaatttacataatattttatggtgcatttttgtaccttttaagtaccgtcctcgtccacactaaaagtcgtccttcatattcagcaggttcttctgtgggctgaaagtcactggttgaattcaccgcgagtaccaacttaattaatggaaaaaggcatattattattattgctaaaataaatgcaaaaataataataataaattgcgaaatgaagaaattggctgaaatgggctattctcattttaatattttatattttttaaatttaatatttataaattattaaaaattttaaattttgaattaccactttttccacattttgtacatcggatgcgagcagttcagccaattttctatgcaataaataatgcgactcgctgaatgattctcgccatattatgagtaaaatgcgcatttttggcggaattgcgacgaaaaaataataattttttatttacaaataattaaataaatttttcaccttgtgttggctgctttcccttagattcattccttaatgatggctcacttttctcatttattggtgcggccgaagctgtaaattttaatttaaaaaaaaataaaattttaatttgtttttaccaattttaagaaaaatggccaaggcaaaaatattttttatgagacttttcattttatcaattacaatttaaaatttattcagtaatttttcttatatataattaaatagtttttgaaaggaagcaacgtttggccacgaaatttaatgcgtgtctttgcgtttttgccaaattcttttttgtctacgaaaatccggtcataggaaggaaacacgtaaaattatgccttcaatgaaattgggcttgaattcttatcacaacactttttgaaattacaaaattttttattggttttattttaattataaaattttcaatttcgaacttcgctaaatctcttagcactaatttgaatggtttccatcaataattgcaaactgaattattgccgtaatttattcacaacattcattcactgccgtanacattttttggttttgtgccgtcgtctgcagctgtccccgtcatgagagctgtattttatattaattagtttattgncattattgcattatcataaa

SEQ ID NO: 10593 - DNA, 1990 bp, Heterodera glycines
gaaaatagcaatgggaattaaaattaattaaaaaaaccaaaaaagaaatcgccttcaggaaaaaaaataattttgaaaaattaccattttaaggagtaaatacataattaaaaacaaaagacgctcaaatagttttttcaaagcacaaattatccaatgacattttttttgcaaaattctaaattctaacggaattgaaataatttcaagaaatcaaatttcattaacatttaaattgcctgcggacatatttatccaaatttttatacattagtccttattagttcaataataactaaaattttaaaggaactggagaagaaaatgaaaatcaaggtggtcaacaacaaggaggaggaggaaccaataacggacgtggcaacaatcgtggcaatgaaaatggtggccaaaatggcaatggtcagcagcaacagcaaccgcccgccggcggtgccacctgcacgaacagggccaccggctgtgacgtcgcctattgtggcaacacagactttgcccgggcacattgtgccggcacatgcagaagctttttgaacgagtgcagtcatttggcttcggtgccagacccaagtgggtgctgaaatattaagcatagaaataatttatcattggaaaacgaaaattgtattggcatcgaattttttggtcagttttctagattttgggacaatagttgaaaaggatatattttaagtggtgccggcaggctttatgagggaaaaacattgccaatattttaggaatgtaaaataataataataataaaaaaattcaggcgttgcttgtggcaacccggcaggcgattgtgccatgaacccaaacgtatgcagtgtaagtttacagcatgggtttttttaatgttttttacaaattacataatgtattacatatgaatttaggacgatgttttggcagtgtgtggttgtcctagaaaatgtggtcgttgttctgatcacacaacatacattatgcaaggcaaatgcagaaatgtgctgtgaatgtactgtagcagatcgacgagaggaaatgcattaatggatggcagatgcatactgtagtggcgtttttgaatttgttttacatacaaaagcagccattcattgtgtcaaatttttaaatttttacatacataaaattacaaaggatgaatgattaaaatagattaaaaaaacacattttacccttggtgaaaaaaaaacacattgccatggtgagtatccataaatttttacaattttttcgatccaaaaagctgcttaattatggcccttttcgccgaagcttactaaaaatgtagaaagaatattgggaaaaattcgtgtcgattctgttttcttgagctctgttggtttcacagcagcaaaaaatttgctggagaacatgaagggtcctgcggatgaaaaattgtgccttttttggcaaatcttcatttaaaatcacttaatattttcaaaattttccgtctgtgccgacaaccattgtccattcaaaaaattaaaacataaagaaaaataataatcttgagctagaaattctcagaaaatgctggcaagacaaatacaaattttgtttttcacctttaatttccattttatattttacaattaacaaaattgtttttaaaacaatttatgaaaaatgaaaaagatattggttatattttattgttttggtaacttttaaaagatgttagtatgaacaatttttattgtaataatttaatttttttgttttaaaaatatataaaatatatgacagaaaagacaaattcaaaaaaatattccttttgtgtgggggttgaaccagggctgggaccgcgcagcgatgcgcgatgtgcgatccgcgattcgcggcaattttttttgcgcgatccgcggtcgcggccgcggtacattaaatgcgcggccgcggttttttttttacgcgatgcgcgatgcgcggaatttgggactccgcggcaatttttgaccaa

SEQ ID NO: 10594 - DNA, 1673 bp, Heterodera glycines
ttttccatccaaattttgcaccaacccaaaacctcaaacattcagtgcacctagcgcagcaggttttacacgaaaataacagcaaaagcatcacagcagcatttggcaaaagaaagggccgccaattggccaaaaaaaaggccgtaaatcggtggggcgaactgattaaatttcattgatttgggtggactttgtgcggtttcaatttcaattttcgttagtggtgatcagtgaccaatcaattgattgatttagttttaaattttgaatttttaaacagtctcaatttcacaattggaattttcggcattcccgacattttggatttgccgtaatcattttgcctttttttatggagatcaatcatcccattcaatcttcttggagatcaatgatgatcggctaattggtgatttttcaatttttgatttttaaaacggcggttggcatttttggcattttctgcatccccaacatttgaatttgccgtaatcattttgcattttgttttttgggtgtgggatcaatatcaatcatcctattcattttcgtgcgcatcattgatcaattttgatcggcagattaatgagatttttgtttttgttttttaacttgcgtatggcatttttgacatttttggcatccccgacattttgggtttgccattctcattttgcctgttttttggggggatcaatcatcccattggcatttcaaagatgtcagaaataaattattccttttttcaaatttttctctttcgaatcttcaaattctctgagaaaaaacatagtttttcccccaaatttgcataaattttcccctcatttttttttgcattttcattttttgaaaaccgcccattaattcctttaaaatgaaatttatttaaatcacattcacacatattataacacatgtagtacatacatacatacatatgtgtttgttatttgttttgcttgtttttacacctaaattattatttttattttaaatttgcaaaatttgtcccaaaacaaaggccttggaagaaaaacgggaaaataggcaatttatgaatgtaaaaaaataagacaaaatgccccatttaaggaccttgttttcctcaacagatgatgatgataaatgagcataaataagctccctcctcaaatttcagttctgccctatttttgcaagaaaatcgctaattatctactaattattctttttttatcctttaattatgaattttttcgtaaatttttaatttatttaaaaattagtttttcccttcgttagcttcagactttttttaaaacatttaaaattaaatcttttaaaaggtcaatccattttctcatcataagataggcctgaggtacaatttttgcaaaatttttctctcaatttattaattaattgcgcaatttaaaattttctgccgctaatattttttaacccataataaatttcataagcaaaaacaattagttcattataaagtatagagctaattaaatttcaaaatcaccttttcattgccccggggcgcccctactttttaaaaattaattttgtctcctcaatttaccccacattaattaattaggcacacaatttatgaaaatgttcctgcccgaggccactttcaaccttcattaattcccccccccccccgacataaaaaa

SEQ ID NO: 10595 - DNA, 1591 bp, Heterodera glycines
cgcaaattgtcgcgggggcgggcgaggggcggtgttcaactgacccagaaagattttccgcttccttccgcgtcctttcttaagcatcatcgactcccccccccccgcccgcccctcttcaaatgattgaccgcaattcaaatgaatgaatgaaatccctccgtccgtccgtccgtccgtccgtccgtccgtccgtccgtccgtcgtccctcgggggatgtcccctcgcccccctcccccccgcgcggtcggtttgaattgcagcgcagcgatcgcgacggatcgccaaacgccaaacatcgccagacacacatagacaacagaagagaagagttcagatcagcagcagcactaaatctgatcagaattgacctgctctgcttgctgctgctgatctgaactggcgcactttcgggggacttttatccacgcttaaatcccacggttgtcataatgttcgttagaagcccggggagcaatttggtaattagtgatttatccctattgaatgttatgtatacggaaaatttggcaccgaaaaaataatattttggcaccgcgtcatacattccatttattttattttgttatgccaaatttaaatttccagccgaatttgccccaattactcgcaaaagcttttaatggtcgcaaattaaactctaatagctcttcaaaggccagcagtctgacctcctccgtttttgcgatggagaggaggcggtccgatcggatttattccattttaatgatgcctcttgatccacaaattgatcaggaaatgcttgaggggggacggcatgcgccgcttgttgagacggaaaaattgcgctatttaaccaaaagtttgatcggattttgtgctccccactttgatcatccctccttaaacgattgatcggaattgagattttgattcgcttaggtcctgttaattattgggccaatcgatttgatcggatttgtgctccgcactttgatccatccctccttaatgatcgttttatttggacaaatggcttaatcgaagactggtagcaaaaatcactgatcatatttggcctgatcatgatcgtactggaaaatgatggggcttcatctattggaagcaattccaaattactgttaaattattggtcaacttaaattatgatcaattttcagtcattatcgaagtcgtcatgttcatatttcaagggcctaatttagagcatccgtaatctgtaattgcgtcggcagttgttttttataaattgatcagtcgctttttgcgcatctgtccgtcgcccatctgttcactaatcggcgcacgagcgttttgcgtaatttttttttttgttattcatcatcattccttgacataattatctcattacgactccaaccagcaagcaattagtaatcgatccatcattttatggaaaaaaacaaagactgattgatcatttgctcctcaattagtagtaatcggaatacataagaatgttcgtgatcattcattaattgttttaatcggaattcattatgatcagcggggttcaatggcaagttatgaggccaataacaagaatatttcatggtataccagttt

SEQ ID NO: 10596 - DNA, 1611 bp, Heterodera glycines
ttcatgtttcatgtttcgaaatttctcgagttttgtcacccccctcatcgatctcaattctcgatctctgattctcgaggggtcaattcacagtccagtctcaactctcgaagggttaattcccgccttgattaccagtatctcttttctgtctcgactctcgaggggtcaatcaattcccgatgtttgcctaccgtcgtctcgattttctgtctaaaacccttgaggggtcaatgttcggtttcaattaccgagtttcggcaaaatgccaactctccaacatcagcccagtcttattatactaattgtaaatacatatatatatacatagctaacatataagagggatgagtggattagtggacggacaaatggaccatccatcatttttcccaattttatacatttgcacaaataaatgtgtgttttgtttgtcccttctcccgtccgtctcccccccccccccatttttgtggacgacgaccgacagaagacacaattaggccaatcccaaatgcctcccgtccccccccccggcgccccctaaaaatttttccacgtcctttcgtcgtcaacaaaaacaggagcctccctcatttttgcccaacccccctcagctcagctcaagcacttttcttgttgtttatgcagttgtgttttgtttatttttcacggcgggagctgtgcttcctgcatttcctttgcctttcccgcctttttattctccgataaaaaaattttctggcttggcattttgtcatttcaaatttaagtttctcggcaaaattctccaagaaaattgaaaatcacttctttttctaatacaagaattttacccaaaatttacggcctgttttaatatctattacttgattttcccaggttaggcttaggcttagtcctgggcttcaaaaaaaaatcaaagtttataccttagccctaaatttttaggctacgggtaaaccatcatggctaaccccaccttcttttactagggcccctgtatgtagtccgggaaatgttttcattttataatgcgctttgttaacgaatttcgtccaaaaatgacaaatttttccattttagcagattttcatcaaaaaattctggatttttcgataaatctagcgaaattttttggaaaatttggttgcggttaagtctgggggagggtacacaaacaagtaaaatctaaaattttcagcaaaatactaatttttccttaaaaatttcgggtgcggaggggccttggggggggacgatttcgtcagtattcggttttattaattttcctatgggatgggagtgcgtgcccatgtccatcttcctctcccctatctttgcttttctcccatcgctcgtctcgtgtgcgacacttcgtccgacgtcgacggggtgagggtgctacgctattcagcacttctctgtgaaaagatcgctcctcaggtccgtcagttgattttaaaaataaatttttaaatattctaggtgtaaaagaatttaaaaacgaaagaatagtaataaatgttaattaaggttgttaatgctgcttttttgatttgtgaaaagcctgaaagtgtcccgatgaaagtaatttttggacttaccccc

SEQ ID NO: 10597 - DNA, 1914 bp, Heterodera glycines
  unsure (1)..(1914): unsure at all n locations
agacactaanttgtaaaaaataccaataactttcatcattttttttttgcaaaaatttggcagctatataaaaatatataaaatgaaaactgatcaaatcttattactaataaatgaaacatatttattgtaaacattcggcatttgattaaggaagtaaattttatgattgaaagcacatatttttctacaaagttcaaaaattattattatcttttgtggttttatttataaaattcttctcctaaatctttacatttatttaatattatatctataaattttaggaaaataaaataagaactgcaatcgataataattttaaaataagatattgtatttattcttgttaccgatagatcgtaattttggcgcagggaaaaattcgtacggtttgattcaagatttttaaaattaattaaagtcttcaatcatttaattaaacgttaattaaattattacatttgtttttgtaatattttaaattaagttatttggacaatataatatttataatttttttaataattctaatcctagtaaattttttaagataaaatacttaaaagttgtacatccatagaatgtgaaggtcataaaaaagaatgccttcattaattctcataaaacattgttttaaacctataatagttaaaaatacaatatggtattaccaaaattaagtaacagattgtataagaagttttttaatgaatttgaaatttaaaatattattacacaatatggttggctttataaaaaacaattcttgtaataatctcaaactaataaatatatttttttataattttttaatacgtctttagatggatagctattttttccgtgacatcaaatattatttattttgttttcattggatttagcacaaagtcgcgaataaaagcttgcaatttatttgattagttctgatgaatatgaatggtctataatgagaaaaatcaatagaattaatgattaaatgaaaaccccccaaaaaaagtgccagataaaatttaaattgaattgaaaaacttttttccgaattaataaatttgaataatttctttaattcaacataaaactttttaatttttgtttgatgatttttttcatataatggtaagaaaaaattcctttttattaatatataagtaaagaaacagtatatttaaaatatttatttattttttaattgttgaaacctccctgttatttacactgttctcccagaatattattaacgttatatttattttgatccttcgttagataatattatgtacaaattcaaataaggtaattcaataaaagaggctttgtcgatggcatattttgtataataataaaaattgacacatttcaatataaaaataaattaagatataattttaaaaaatgctaataacattttgaaataaatgttttgtaaattatataaatttatgcatcaaatttttggagttatgaagctttatattgcatataaataatctttcgtctttaatttgcaaaattttataatttattaaactaaatattaatatacatcgatttattagaacaataaaacataaatttacaagtaaataaagatagggtaatcatactataataaaatatacattatactttaaataaaaatcacccagtcgccctttgtgaatttttgtctaaaatgctccgagtacttgaatattttataaaatgaaataattatcttttgggttggcgatcacactcagctaaattgtcaacaaagacacgccgattttaattaaaaaactcaggaatttcatattgaatttatcttgtacagcaaaaaacattgaagataaaaaataatcgtctttgngatagaattattaacattgagaagcagaatgaatatattaaacaattaatttttttcaa

SEQ ID NO: 10598 - DNA, 4548 bp, Heterodera glycines
  unsure (1)..(4548): unsure at all n locations
atttttgttttaaatcactaaaaatgcttcccaacaaaggtacatacaaaaactcacttgagctaattgatattgctgatcactgttttccattgaaatgggactgatcagataacagttcgtctcatttgtgcacattaacagtaacgacagaataaaatcaaatttaatgatgcgcattttgtttttattatataattttttgtgaaaaatttctttttaataaattaaaaatttattacatcgatttgattggctcatttttagagaaaaagaaaaagaaagaggtgagaggggataataaaattgatttgtttgacgattaattgcaatattatataaaaagtcattattaacataaatttaaattggcttgtcatggttaagcgaaagcgaaaacgaaattgcaattagaatccagtgttcgcatgggaaaagctcactttccaaggacggttatactgatttcctaggacataacgggaaatttcgggaaatccaaggacgcgtaaaaatgttatcatacgcaatgaaaaaggattaattattttttaaattattggtatttttcgcaggaatggatcttccctatatttttgttttatttctgctggccattttccacatttcatcgcatgtgtaccagggttgttccgggtcgagaaaaatatcgggtcgggtttcgggtcgggtcggccgaaaaatcatcgggtcgggtttcgggtcgagaaaaaggccgggtttcgggtatcgggtttcgggtcaattgacaaatttttaatttgtttaaaaatcaaatggcactgcaatatttgcagcgaattgcgccatttataggacgatggaaataaaaccaaatggaatcaggtttttcagccatctgctttgcttaaattcaagaaattcatacaaaatatctttagaaaaaggataataattagcaatgagcgaatacaaaatttcgattccttgaacacaatcgttcaaaaaaattctcaattccttatccacctaatttcacccagacncctttcttaccagtgcttatttcgacccgaaacccgacccaaaattctcgggtcgggtttcgggtttcgggtcgaaaaaaaggccgggtttcgggtatcgggtttcgggtaacccggaacaaccctggtgtgtaagcaaccccaaattcaaaaaaaaatacaaaatttttcaacacatacaaaccccaatcattctttttttgttgactcatttgactatttttcaattcgatctcatacaccatcatttatttattctaggacaaaagccactcctgttatttcaaaaaataatcctgatcttcacagatctccaacaatttctgacactaatcaaactatcaatagaccaattccagaattaattataggaattttatcaaatgttcgatcaattatgaacaaaattaactccctcataatcacacttaacactgaaaaatgtaatttcatagtattagttgaaacatggttgaccccccaaaattctgagattttaaatgcagcaattcctgaaaattaccaaattttttcagcccttcgtaaaaacaaacgaggtggcggagtttcaatcataatagaaaaaaaattttctgtttattcagcctctacggaatcagtttttagatgcgaaattgttacattgaggcttaaaaatctcaaaaatttttctattgtcggtgtctaccggccccctagcacttccctttccaactccaaaaaattctttaactatattgaagaaaaaattataggacaaacactaatattgggagattttaatctaaatagtaaaagcgttaaatggcacaataatacaccagccccttttaacaaaattggacatcactttgtcgaattcttcatcaaaaataaattgtctttgcactgccaaacatcaacgagaggtacagagctattagacctatgcctgacaaatgatcaccgactatcacttgaagcccaaactagggatagcttgataaattctgaccatgaatcgatctatctcaacctatctatctctctaataaaaaatccctgtacaaacatttttttccgtaaatttgattcaaaaaatactagtttaataaacgcattcctaacacacaatttagaaaatgtcacccaaacagaatataacatagaaaataaatacagtcgatttgttaaagaatctctaaacgggcttttaagttttaattttctgaaacgttttcatctaattttaaccagacctctaacagatttattcaaattgtctctaaaatccggtaaactaccaaaaatttggaaaacctcaattattctaccactatttaaaaacggagataagaatctagcatcaaacttccgtcccatttccattacctgttctcctcagaaagcgctctaccaccctccaattaatttcgactcttgaggattggtataatgccatacttctcaataaaaaaatcgactgtatttatttggacataattaaagcatttgacaaagtccctcatgaattgctaatttataaaatagaaaaaattggaattaagggcaaccttctaaattggctcaaagatttcctaaccaacaggacattcaaggtcagaattaatcaacagttttccaaaaaatttcccatcaaatcaggtgttccccagggatctgtcctggggcgaattctatttttgatttttataaatgatttatccccagtaatccctgaaagaatttcgctaaaactttttgccgacgatactaaaatttacttgtgttatgacaccgaatttcaacgtaaaaaactaaacgaagccttacattgcgtctgccaatgggcccaaatgtagggtctacaattttcaccagaaaaatcagcttctctttacctcagcaaggacaattttaaggttccctaccaatttaatggaaagactattaaatagacccaaacaattcgagatcttggaatcttaattgacaacaaactgacttttaaatcccatatttcatctattcttcaaaaagcctaccttagaagcagaacgctttttcaaaaaattaaatctaaatcatcaaagacatgtattaaagtctataaaagctatattaggcccttacttgaatattcatctgaaaattggaaccctcacattaaaaaaagcaattattcgccttgaaaagtttcaaaagttttttaccaaaaaagttttcttaaagtgccatttaccggttttacaatattcagataggttaaaataccttaatatttccactttgggaaataggagaaaatatttagatctgatcacggccttcaaaattattaaacaagaaactcacctaaaccctctaaaattatacaatttatctcaaagaagaaaatcgcctttccacgaaaaggggggcaacaaccgcggcacagcagcagataagaaagaaagcccccaccccctctccctccctccctgtcggcttctcttgccttttcaaagattagatttggccgagtcgcccccccccctttcttttgctgacagccgcttaatcccccccccccttcaatgggtccgtgtcaaccgcccgccaattctctgccaaaatgtcgcaattgcggtgagtgaggcagaagaaatattgaacgaattctgactttagcgatctcaaaaccccgagggcagcagaagcaaggatcgatccctccaaatgcttttcctccctttcccttttccctttgagtgcatttgccccctccccattttttgtcccttttgacttttcccattgtttttaatgggttttcgtcgctttaaaagctgttttggtttaagtggggaggtgcttttccgctgttcaatttggccaaattggctgagttcactgaccgtgaaaatttggacacaaacggccgacactttggcacaaaggcaaaggcaatgaatgggcggagaaagaattgagccaatgccaacaactcttttaattgttcactgtcgaattttcttttccatttctcgccaatatttctttttaatttcgaaatttcttttggtcactcccattttaattttttttttagaattgaaaagtgccaatttgttcttcccaatgttccgttatgagtgcccttcccaacggcaactccctttgaaaattgtttttttcccaaatcgcctccgtctctgcccctctctttagtcgtctctctctctctcttttgtttctctttctctctcttccgatggcatttcccttccggcactttcatccccttccgatgcctacgccttcccttggcctcattctgctcgttcttttgctcaatttggctgatgacgcgtcggctggcaccaattgttctgctgcggatgccacgcgcaattgcgtggacgggtgagaaaagcattggccgattgccagtcgctgatccactgatcagtggtgattggttctgactgatcagtcaatggacgatgatcagtgtgccaatggactgtcccttctcccttaagaatgggcatacccattt

SEQ ID NO: 10599 - DNA, 4225 bp, Heterodera glycines
  unsure (1)..(4225): unsure at all n locations
ctaaatccatgatgccattttattatgaaatggctaactccgattttcttaatgatttcggcgtaatttttttacattttttgaatcttttcttctttcttgcttaactttttattttatcttattaagtttttcaataattatttttctttttctctgttctttctttcttttttctttaatattttcttcgtctttttctgcccattttctccaaatatttcatcaaatgattttatttcaattttttcttttctgagccaatttttatttatttggatggacaaacaccaaattaaaatcatgcagtgtaatccaatctattactattcatgaaaaatcagagctttcaattgaaaatttcaaaattgcaaaagcatgttttaacagatgttgaccaaaaaatgactagcgaaaaacaaacggagcggcaaaaccctcgtcccgtcaaaccaatgccccagggcaaaagtgacaggggcagcgaaccgccaccccgccagcgcaaacagaaaaataacgaaaaaaattgttataaaattttaaaaaccgggctttttataatattaaatattaaatcattgcatcgcccaacgcactgaaacagcaaatttagtagcaaatgcattaaaaattacaaaattcaaccattaaaatttggattggtgggtattcaatttaagttaaaaatttattttctgaaaattcttgtaaaagccttaccaaaagtggccacatttcgcgaagtgattgtgttcaaaaaaaagcggcattaaacaaaaaaccgggcggaataattttgaaaaggcattatgcttatgttgaaaataattctgacaattaatggcctaaattaaaatatttaataattaaatttattttaaaatttattattttatggaaaattaatgtgtcaattgtcattaaataaagaaagaattcagaactttgagctaattgctttgaaaattgatataacaattagttaagattaaatttatcaatttgagaattaattcactttgtctgtttctgtcaatgttggcattcgcttttctaattttgttcacttctccatctgaatcggaaattggaattcctaggatttcaattgacttaatgagaaatgaggcgaaaacaaatcattgaaaattgattagcctagcaggtggccagccaaaaaaatgttttttcaaaattttttagctttttaggctctcaaattaaaatctagaaaataggcactaataacttgaaaagtagcttaaattagatgaaataaaagcagtagggatgctcgaaaaatcattacaaaacttagcaaaattttgattttattcggctacaggagcggtatcgagtatcggagtcaaaaatcgatatcgaaagcgcttcgaatatgattaagacattcttaggaataaaccacaagataagaacgccacttgtttcacattatttgatcgtttatggcgagttttttcgtcacattttcaatgaaaattgctactttttaaggatgattaataaagaatttccgtaaatgcgatcactgttggaaactgacagaatttcacttaattcggtagtactttatgggtgctttttccgaattttaattgtcaaaaaaaacttttgggtttatttaacgtttgagaaaatttgatcttcgattgctgatcgtaggcgtagtgttaattcttcaaaattgtaaaaaagtgatttaaaaagcaaaataaaaattaaaaaattaaataatttataaattctatttaatagatgatcagtagggcttcttttttaggcataaaaaatcgcgaaataggcacctaaaataggcagaaaaaatcgcaaaataggcattaataggcacaaaaatcctcgaataggcactaaaataggcaacaatttttttttttattaacgctttgtaggtattaaaacaagtaaaaattaatttaaacaaatattttgcttatatttcaattgttttaaagttgttttcgataaaaataattttttaaaccaaaattttatgaagaaaaaatgattaatttttggggaagaatttttgtgaattttttttaaaattcttaggggtgtattttctgaaattttttcaggtcgattcttaggtgtgttttttcatttttattgcatttttgagaaggatttttccgaaaatcccgaaaaggcgccaaaaatggcgaaataggcacaaaaataggcaaataggcattaagcacaaaaagtgcaaaataggcaaaaataggcattataaaagtcatcgtagacaccccaaaccaagcggaaaatgcttttttcgtgcttatctaagcgtattaggtgcgcagaaaaaagaagccctaatgatcagtccctgtaatatacctaatgaaataaatttgaaataaaaaaggttcaaagcgttcaattatgccattcgccgtttacttaagtgccgatggaccaaaacaatgtggcggtgcaacggaagtcgctgagtcggctcgaatttggggacatttttgtaaatgacagagaagcgatatatcttttgatgtaccgtatttcctaaatgccctttaaatcaaatataatttacttagaatttatggaattggtaccattttattggatttttgggtcctaaataatattatctcataaaatgattttatcatacaacttcaaaattgattaattcaatgattgtccatgttctgaatacaggatttatttaatatttggccatttttccatttttaacaaaacaaaatcaaactatcatattttgttaagaaaagatatttatgcctttaatcgccaattacctggctcgtatttttattttattttttcatttctttttgccagataaaacaataaaaaaaatataaagttgggagtttaattttatctgtactgcttggtcttattgtattagtttttgttaaaataaaaaataatttgtttgctcacaatttgcaaccggcaaaaaagaaaaaaaaagacctgatcaaaataaatggtcaattttgaagtaattataaaagcattttatgtaataaaatgattaaaaaaactataaaattaaaataattttacaattcccacttctttctccagcactttcactgttttttgtcattgtcaactttcacactactgaattattgaatttttacgccactttaactcttaggcaattaaatcttgccttttttgatgttttgtttaataaatgataactttggtttttgtaaaatcatcagtagggctgctaattttatgtaaatactttaaatactattcagaaaaattttttcataaatattccattaaataaatctctaaaaaatccccccgtcttcatttattatcggaaaaatcaaaatttaatttccccattagtaaatttgcttcgactaatccccatttttttttgcaatttttaaatttaactctggcttttgacgaatatttccacattttacccgccagggaaaaacgaacggagcggcaaaaccctcgccccgtcaaaccaatgccccagggcaaaagtgaaaggggcagcgaaccgccgcgccgccagcgcaaaaagaaaaatcacgaaaaaatgttataatattttaaaaactgggttttatgatattaaatattaaatcattgcatcgcccaatgcactgaaacagcaaatttagtagcaaatgcataaaaaattacaaaattcaaccattaaaatttggattggtgggggtattcaatttatgttaaaaatttattttctgtaaattcttggaaaagtaaaaaagtttttgagaacttggggggaggaggtccagcggttccgataggcgccgccgtagaaaattttgaatatttaagggtgatttgttaacagattttcaccaaaaaatgacaaattttttgcgattttttgtcaatttgttaagaaaaaatgtgagttattttttggaagggcgatgtgcggtgccattggtgctaaaatttgaaattttgctcttttttaaacagattttcactgaaaattttcgttttttcggttaaatttagcaaaaattaatgattgttatgacaaaatgctaaaaaatttgatttttttacataaaatgtacattttttacactcatacgcnnaaaataccggtttccaattacatgggannatgataccgcgtaaaaatttcctaagcacaaagccg

SEQ ID NO: 10600 - DNA, 2087 bp, Heterodera glycines
catttggagaaattatgggaatttgaaaagggaaattaatcgatatcccaaatttattcatcgataaaagctgaacaaacaaagcaaatggcaaaattagaagcaaatccaatggacaatttgacaaaaaggactaaatttagaagacaatgaattgaatattatttatttattctacggaccatcccaaaaaggagagataacccaataaatagagagagcagagaaaaaaaacatatgtatctgattagaaaaacacaattactttttttccatgtgtagcttttcgtcctgattaaaagccgaatccaaaaaaggcccaacgatagaaatattttattttattttcagaataataagtcataacttatgtaggtatcttaaattgattgaactgaataatagagaaacatttttggtctatctaaccataactaaacttttttaggttcggctaaccgtagtttttttgtcctatgttaaatctgcttcaaattttaaattttaatctttcatatgtttaggtcattatttaaataaataaataaaaaataacaaaagttgaaacgacaacaatatttgccggatttaggctattaattttttatggtctgcttttgtctatttttatgatttttttttcaaatctctcattccttttttattggaaattatgaatttataattgacattttgtttaacattacgttatcactattattattgttatttattatattttaaattacaatacaattgctaaacaatgaaaaagttcagttcaatggcacgcaaatggccaaaaaaacaaacaaaacaaataaatcactttttcttcttccattgccccattttaaggcgattaattcgttgaaacttcggtgaggcgttgggtgggggagaaacgtcgttggcgtgtcactttataagcggtcaaaatgacgtagtaaaaccacagactgacgcacacatccgccaagagaatggccgcctcgcccccttggcccattcgatagcctacggaggggggggggggaggggaattggcatttggattttgggaacggttgttggcactcgttgattgtttttccctcccaaaatgccacctgttctttgcttcttccaacgattgaaattcggcaggggtctctttcaacatttgctgcacattatcttccgatggattcagcatgaaaaggacggacacaaaaagctcacatgcataaatcacaatttcgatggcctttaatgagaagggtaaaaatgtgcatttttaattgacattaaatcggtttttgccctcccattgtatccccccccgggcaattcccccaatttgtgcccccccgctcactcactccgtaaaccaaataagggaaataaagtcgcgggtcacggcgatgcaatgccaaaaggacacaaaggcaggggaaaacatagagaagtgccacgacgcccataaaggggtcgtggacattgctgaagggcaggaagaaggcgaatgccccgagaaagctgtaaacgatgccgatgaaagcgacgatgatggcaccttgctgaagaaaggggggggggtaattagtgggaaggaaatgaaagggacggacggacttctgcactggtgcggaaaattccccaacaacaggtggccttttcagagggatggccagcgccgacgatggcactgctgctgtggcattcgatgggaatcatcgaagagacggaaatgaatgggaagggcgaacgaacgaatgaatgaatgaagaattgttgggggaagggtgcgggaaaagcacaaatttcacttaaatatttcctcaaagtttaaaattccccctgcggcggccactcaatttttctcttggattaaaattatatgaacagaaaaagaaaggaaaggtgatatcggcatttctttgttttctttctccatttcccatttaaaattttcacccattttttgaatttattggtgattttttcggtttttcctatggaaacccccgggggtggggggatgggaagcagcaaaagagaggagggaattgtggggggggggggatgcaattcgctcgtgtgaggag

SEQ ID NO: 10601 - DNA, 2254 bp, Heterodera glycines
gggatgcaattctttcgtgtgaggagatcgaatgaatgatagcgataacaaagtacgggcaaaaaaacaccgggacaaaataaattgacaaaaaatgtaataataaatcgatgaataattatttaaatgcaagcgactttcaatcattggaaaaaatatgtaaatggtcaaaaagtcagaagcaaatgatgaaaaagttctgcaaagaatgcgaaaatcggtgggaaaaatgaaacaaagtgacggacggcggaggggcggcgatggcaccgccgaagaagcgaaggaatgcggctcttttcctttgtgcatcgatcgccaactttcgcttagctttgcttctgcccaaatgacactgaaaatggacgcagtcgcagtgccaccgcccattcgtttaaaatgcctgctaattaacacaaaacgggggtgggagagggggaacaattaaagtaattaggactaatgagtgtcttggatggacgaggaaaagcatcgatctgttgggatggatttgaacagatcaggtgggcctttgaggcgatcaatcactttcagtccttcccccccccctcccctcccatcaatcattcaatggaagaaaagtgttcgaatttcaataatttgatcaaaatattttgacttttctcaacattcccccccccccttttccccctttccccccttttccctttgattcttttgttttctccccctcccgcgcccctccggtcgcatttgaattgtgatttatggtataaattggtgtttttgtggtgtttgcctccttaattttgtcattcattggaaggtttttcggttggtcatgcgactgatcagccgaagcaaagcaaattcagcccaatttctcttaatttgattccgttgcgcattttgcaaaaccgtcgttctctcccattttagacgaaattttgtcaattttttattttgaattttagagtgacaaatttagaaaattgggagggacagaacggaagaaagggaagggaagggaaggaacgggacggactataaaaagagagaaacgcacaaattaggcaattgctcacattatgcgatgtgctctgtgtgtgctcacttttcacttttgcttgtgttttgtgtccccgcggagaatataaaaggccctttaaatgcattcgttaagaaaccaaacaaaaatcactttcacttttcgaaaaatgatcaaatattccttcacttcttcccaaatgtcttcagcacgtactcttcggtaagatttattttaatgcttttccttttttcttatttctctgatcagatttcagtgggctaaacggtcgatcagtttcccttttttccagcaataataatatcattatgaccatttttgagcttctatttgcctgaacaacacttttgctctctctgtctgatcatcctaaccgttttctctctatctgaccaatctgatcacttcttctctgtctgatcactttaatccctttgcttttttccttttccatctctgatctctctaatcatttctctttttcagtcactctctccattttgtgctctctgtgctccttctgctcgctttggccaatgtgctgacagtaaatgccactccgttgaccattctgacccgcgagatcagtcccgaggctgtggccaacaaattattggcgtcgttccccgaggggttggaccacatggaggaacagcacttgagagaggcgcgattctttggccaacgatgaaaaagagaagcgaagggacggacggaccttttgaagaatgatctctcaaattatgaccagttttttggcaattcattaaattttgattgttaaatggatgcaagaaatttctgccaaattggcaatcgaagaaaaaaaaagcaaaaaaaaaaaaaaatgatacaaaatgagcgaaaatgagcgaaaaaaggggggaggggcgaacggagtgccaatgccaaaacggaaattaagttttaatttttcaaatttgcatcgcttttccctgtttttctaaagactcggaaatccctttagcctttcctttcgcaagtgcacgtcccccaccaattccccgtgccaccgccccctcctcaaataatgccacttccacccttccacatcagcaatcgctttggcattttcctccttctcatcacaaaagccgtaaaaatcgatgcttttctttcattaattcagacattttttgactgtcagtcactaaaaagcaaaaataatttattataaaataa

SEQ ID NO: 10602 - DNA, 2252 bp, Heterodera glycines
aatagtatcattaatccatttgataaaggctggaaatccccctaagcatttcaatgatcaaattccggttattttgattttggccgtattggtgatcatcgtcgatttgcggctgcgttttttcctcattgtaacggtgcaaaatccttagaattcttgtgtccgtgtcgcggtagcgttttgcttttggcggcggagcatttccggcaaggaaatgttcgaagtcaacgtcgattactttctggtgctcacgcaaaatattgatgaatttccatattgttgggtgtccttgtccgatcgcatgttgcaacgtgcgatggtacgcttcggcgaagttgtttgtgcggtcggtgccgttcattgtgcgctcatacacactccatgcttcgggacgaaacaaaagacgagtgcgtgtgccattgttgcgaagtcgcccaacgtagttgattacaaacctttaaagtcaataatgaaattgaaaaaaaaattaaactcaacaaaccaatcgagaacgccctcaagttcacccggcagatgatcttctagggctgccagcgccggtgtaaggtcctcaagcggcacaaacgccagcgaagtgaccattttggcgaattgtgcaaaggctgcgtcagttttgaaacgctaaatttgagaatttcaaaagtaataaaaaaaatttcttacgtgagtttgctcgtcggtaagacgtgctttcatgttgcgcaccaaatggaataggcaaaagttgattgagcattgtggatgtttggcacggagggcgttgaatcagcgagaaggaaaagctcttgcgcttcttcggtgcgtttgtaaatcctgtactgctctgggagttccaattcttgaagcgttctcggcactggcggcggcagttcaatttcatggcgtactcgcttcaccagcttgaaatcaaaaatgaaaaagtaaaaaaaaaagatttcacttttttggtggcgttttttgtcggaatgcttgccattactggagtcgggatttgatgaagcgtgtgggctctgattgctgctggcgtttccatcgtctcagcggcacgtcgttttatgcccgtgacgattttctgtgcgacgacatttgccgcgctgtggcgacaagtgtgctctccaatagtcttcagcacgacatcattgagtgtcgagtgaattctccctcggcacttgaattctccgtgttggtgttcacagcgccagaatttgacgttccaatctgcatttaatttgtgaaaaacatacaagcagccattgtgctcgagttttttatagttccgttgtgatttaatttcgaaattgtccatttttacgctaaaaatatgtaaaataaaagttgtcattgtttaaaagtttttctttcacaaattaggaacttgcataaatcaaaaactaaatcggtcattgaaatcaagacttatgaattgttcatacccaaatttattttttaaaaattcttgaatttttgcttgggacagagttgaccctttttgtattgggacggagttggcgggacggagttggctcgggacggagttggctcgggacggagttggcctgggacggagttggcgggacggagtgacccgcttcggtcaggcggtgccaataggcgccgccgggaatttaaaaatttgagtgcaattttttaacagattttcatacacccctaaagatcaactttttgagaattttcaaaaatacacccctaagaatcgacccgaaatttttcaaaaatataccccttagaaatgaaatttttttcaaaaattcatctccaaaatttatttatttactttcttgacaagaatttttaattttaaaaattatttaggtatctcaatattaatttgccataattctgtagcttttttgaataaattttgtcattttacacgctaaatttgaaaggttttagcaactatttccccatttttagcaactattttgggggtttattttggcgctttttagcaactataaatcgaatccctaattatcagaagaaatttgtaaaccaagagagtagtcccatttggttttaaaaaacattcaaaatgatcatttgttaagtagcaccgcttttcttattaagcggagaaaataatgaactctttgttggcctacggctcggacagtgacgaggaggggcagcaccagcaaagccgacatggccaacctgaacctgatcaacaaccgcgggaggagcagaaacagcgaggaaatgggggt

SEQ ID NO: 10603 - DNA, 1210 bp, Heterodera glycines
gcggcttagttatggcgagagaagcccaaaaatagcattatctccgaacaatttttgatttagagcgacttataaaaacataaaaacacatattttggcgttttgtcacataaaatatgttagcacatattttggggtttggcacatattttgcacatattttggcatttttgagaaaaattgcaataaaaatacaagaaaattgaaaaatacaccccctaaaaatcgacttttttcctaattattaacataattttcaaattaaaaaattttttcttcgattgtagaaactaatgaaatctcgaattcattaattcgtcattggatttagaagttctctgctggaactttcaatttatagaaatgatttatcaaaaaaagacaattttaccccaaacacttcgaaatgtatttgatttgcgttgtatgggctaaaaatgataaagaatgagatttttgggaatttttatgcaaaaacacacttattttttcaatttttaacacatattttagcacatattttggcatttttgggggtttttagcacatatttcagcattttttagcacatattttattacatatttcaggatttttagcacataaaaatccgggccctactaataactcgaaaagtagcttaacaacagcccaaaaaaacatgtttttcgtgcgtttcaggccacggggagctcaggaaaaaaatatataaaaacctaaaaatcgaagccctagtccacacaaaaaaaagttttaggctgcgcctaccgggtcccttaaagttgattaggcagctgatccctcctccatctattcaaatattattatttttgccacaattttttcctctctctttaatttgggataaaaattagtttttgtcatttttgtaatatttttcctatttgcttatttctgaaggcacggattgtgtgatgtatgtgctaattgtagcggaaaagccaactattgcagaggaaatcgcaaaaattttgtcaattggcaaatacgaaatacggagaggtgaagaaattcattaaaaataaaataaaactgaaaactaaaatattaaatttttttttgcaggatggaaccgcaaaagtttagtttacgaatgccgcggcgaacttcgtcgacaaattgtcactttccgaattacgtcgacatttggacacattatgagtaagtaaatgtttttaacaaaccaatt

SEQ ID NO: 10604 - DNA, 829 bp, Heterodera glycines
  unsure (1)..(829): unsure at all n locations
ttttagggctcgattttcatcgatcacccncaaagagatcaaacgggcaatggatgaactgggcaagccggacttcaatgtgtcacagtccgtgctgtttagacaggaaatcgacttaaggatcggatgtgcgttcacccgctttctgacgacgcattccggggtntaatttttgggttttcaacaaaatttcattttttaaatgcagtatcgttattgcgactttgacaacaattacgtttcgctggggccatgccaaacgccgacattggcattttgtgtgaggcggcatgacgcaattgggcagttcaagccccagccgtactgggtggtgcaagccgaggtaatccccctcccatcatccaccgattcctgttgagtcatggccaaattgcaaaagtgaactcattaatttcctcttattgttagtatttttggaaattgcaccgaaaaaaaagattggattaaaaaaaaacgctttgtaaagatttattagttttttgaaaaacttagctattcatcataaaaattatgaaaaaaaatcgctagggaaattcttcaattttatttcattaaaatttgttttaaaattttctaatttcaacacatttattcaggtcgaattgccaaatggtggccaatcgctgacgttggaatggtgccgaacgaggcaattcagtcgcgaagctgcgcaaacactgctcgacaagatgaaagtatcggttttttttttattcaattaaaatgcttattccctgtaaagtgtgcccttcccggaggcgaaaaaaagatttcatctatttttggcaccttttcgggaactcatctg

SEQ ID NO: 10605 - DNA, 1190 bp, Heterodera glycines
atatgaaattcttctatatgcattttttcaggtttcccaggtacacagctgatccaaatttgtcgtgaatatttggtgggccttctgttggagacggcacggaaagaattgccacgcgactccgtggaggatggtaaaggacattttttaaattgaactttgattttttcttttccagctaaacgcaacttggagatggccgcctatttcacccattgcgacattcagccggtgcacaagattttgacactgcgcaccgccgccaatctgagcttcaaaaacaaacaaatgcgccactgtgcttcgttctgtcgacgctgcattgaattgggtttgaaaacaaagggacatcaaagtgttaacaaaatttattgcatttaaagctcctaagccggaaattgccgcccaaatgcgcaaaatgttagcggtggcggaacgcgacaacaccaacgcgttcgaggttcagacatttaaaatctccattttgcaaacattgtttccactgtgcagctcaactacgacgagcacaacccgttcgtgctgtgctcgcgctccttcgtgccgctgtaccggggcaagccgcagacaaagtgtcccttctgcggcgcttcgtatgcgcccacatttgccggctctgtttgcgacgtgtgcgaagtacgtcgtttttgtaaaaaggaaaaaatgccaataaacagatattttgtttcggtacaaaattagagcgatgaacctgggttccaggcctggttttttcctggacccaggtccagattctgcttattttcggcaaactggtttttttcttgacccagatttttccacctgtctaaaatctgttcattttctaaacaatttccatgtggaaattagaatgtttccctgaaacgaatgaatgtcaaaccaaatttgtcctttttataatgtgcatcactatttttcaggtggcggaaattgggcgagagacgtcgtcgaatttgatgatttctaattttaaataattcactgttaggcttttttcatatgtcccactaatattggtgataattggcggttgttttttttccctctcccaacactttttcgtgatgttttccattcctgcattttctctgtttttttttgtgtgtgatttgcaaaactaaagaaaagtgttccaagcaccgaatgaaaatgaatgatattattcaaat

SEQ ID NO: 10606 - DNA, 2001 bp, Heterodera glycines
attttgtttaccaatttaagacaattagagaatcgctcaaatttttaattgtacactcgcaaaatgagtgccaccatcagcagcacagctgacaacattgcgttgctgaagcggctcgagcccgcccaattctacgagcaatttctggtcgagggctgctacccggacgggcgcgacattgccaaacaccggccgaccatcatccaatgcggcggggccaccgggggccatcaggcgcgtgacccattaattccatgccgacccttccgttggcactttttggagcgggaattcgcgttttcttttcggctccagcggaaattcctctaatacagaaaatcacaagctaaagctttaatgagcggtccaatgcaatgagagtaatcgtcgtccatttgtcgtctttttcactcggataagtgccggaatgaagtggccaaattctgccgggactttttcccgtgccgaagtcttttcagcgcggtaaaacgcaggagcccacaacacatatttccagcgtattttgtccgtttaagtccgattcagaactttttggcacaaattttgagtttggcgacagtcagcttgatacggggggcgggggaaggaaatgagctgctcccgttttgtatgcataagtcctcatgtccccacagggttccgcctacgtgcagcaggccggtgcccacgtgtcgtgcgccgtccaactcagtctggcgcccgactcggacgacccgctgttccgttgggaactgcaggcgatggactccgtcccgaaggtgacgaaatccgggtctggagtgtccaattgctgccgggactctacagtccaacgctcaaaataggattagagtcaaaatgccaaaaattactaagaaacgcaaagttgaaattaaatcacttataaattagcatttggacacgtcaatccccgggctgtaactctccagggagcgccttccgccaacaaaatactcattaggattaattaattacagacctagagaattgcaaaaaaaacaccgaaaatcgactgacgaatttttccatggacaggacataattggtcaagcgcaagcacatttgagcaaaatccttggcaccgacaatttgttgctggatcccacgcagatgcgggtcacgacacggagcagtggcaccggcaaacagttcgaactccgctggaccatccacttgggcatcgtggtaattgagataaacagttgaacattgcgtacgaactctcgaatccaattgaaaagttttcgcatttcttcagagcatattaccgtaaatccggtagttgaaggcacccctccaatcaaaggcccccttttggaggggttgaacaatagaaggcccaggccttcaatagaggatttattgtatattatttatttattatacgcctgatagaacgccaaagaattaaaagatacagtaaaaatggggcgcttgttctcggctcaaagcttatgttagcaaaaacataattgtaggcaaaaatgatcatcgaaatttgctttaaatttaattatttgtttaaaattggaggtgctgagcacggacggcttcctcctcgacgcgctgctgacagctgttcaagccgcactgcttgacgtccaagtgccgaccaggcaatgagtttgaattggtggcgattaggcggaagccccgagagggcaaaataatgcgatgttttttaatggaacggtcgatgaaatttgtcaattttttgaacaaaaaaactactgtttgcacaatttccaatcgaacttctccagggttgactacgcggacggcaaggcaattgacggtgtgttccttgagggagcacaagacactgacgactttctgcttggcgaagaggtgttcaacttggaggccgtattttttgccattttgagtccatttttcaaaattattacaaatgggggtccccgactgtgccataggcgattttatgtaatttttaaggagtcgtagcttaaggggaaaaga

SEQ ID NO: 10607 - DNA, 1901 bp, Heterodera glycines
gcagatacgtgggtgggttcaaagaaagactttgggggatatttgtcctaaaattttgataaacagggtaattatgtagaggcataaagctgctactcaaaagtctcagacaattccaataataataataaatgcatttataatcaatcagaagaattgctgtaacattgtttaattcaaaatgctccgccaattgagtaacaaataaattcaagagccaatgtcaatgctgtggaaacggacattccatctgaatttaaaaacataaacaacggcagtgaaattgattagccttgcgaaaacacagcataaatgacagctggtatccattagaaaaatttgacaaaagacaaagtccgttttttagttcaaatttccgatattaacctctgtttgaggcagatacgttgggtggttcaaaagaaagacttttggggatattttgtcctaaaattttgataaacagggtaattatgtagaggcataaagctgctactcaaaagtctcagacaattccaataataataataaatgcatttataatcaatcagaagaattgctgtaacattgtttaattcaaaatgctccgccaattgagtaacaaataaattcaagagccaatgtcaatgctgtggaaacggacattccatctgaatttaaaaacataaacaacggcagtgaaattgattagccttgcgaaaacacagcataaatgacagctggtatccattagaaaaatttgacaaaagacaaagtccgttttttagttcaaatttccgatattaacctctgtttgaggcagatacgttgggtggttcaaaagaaagacttttggggatattttgtcctaaaattttgataaacagggtaattatgtagaggcataaagctgctactcaaaagtctcagacaattccaataataataataaatgcatttataatcaatcagaagaattgctgtaacattgtttaattcaaaatgctccgccaattgagtaacaaataaattcaagagccaatgtcaatgctgtggaaacggacattccatctgaatttaaaaacataaacaacggcagtgaaattgattagccttgcgaaaacacagcataaatgacagctggtatccattagaaaaatttgacaaaagacaaagtccgtttttggttggatgtactgtaattgttcgataagaaatacggtaagaatattgtctctcccctcctatttgatcggcttttctggcattgcttcatagtcgatcatgttagtgtacttcacatttggttctttttcgagattttcaccggcaaaaaatcccgaaattttgttgcgatctttgtcctttggttatcagtttttctttcgaaatttcgttttggcactaaaatgccacacagtgacaaaattcacgtttcataagaaaaaaaaattaattaaaatatttcgatcatttttatggcattttgtgcctatttcacccttttccgaagaatttttttacaaaaaaataaccattaaatacatattttgagcactttttgttacacataactcgtccactttaacaccttcaattttgatttgattttaattcatttgtataatatctttctaaattaataaatattttcgttcgtttatttatttataaaattaatttattcatttttttttctctttttccatcaacgggatgggatttctacacttttttcacagtttatccatccccaccacttttctctgctaaacaaaatcatccgacaaaatcggttgtcaccctgcagtatcctgcaaagtttgatgagcttctgatcattattcgaaaaagtatttgggctaaattttttcggaaagggaaatatataaaaattggaaaatccaaaaattttaggaagc

SEQ ID NO: 10608 - DNA, 2369 bp, Heterodera glycines
aaaataatgacaaattcttaaatttcaaaagctggtaattttaggcttttagtgatttcaagactttttctttaataaaaagattttcctttaaattagagcattcattatattttttgcgttttcatttacaaaatgcgataacaactttttacaataacataagcagtaaaataaaattgttttttttctagtgattccccccccccccctccccctctcattttttgtgcttttttctgtcttctggcggcacttttttgttggatttcaaagaaaattcgctttaaaattcgcttttcgaattttcctctgagagatcagcacacaatatgagacgatggacaaaagtagtaaataccatcagcagaaggaatccaacaaatttgttaaatgcattttactcttttaacgccagatgtcatctcaaaagtttttacgaatgaaaaggccaacaaaattgtgctattatttggattcgcaaaacaaacattttgcgaataacagaaaagaagcacctgcctgctggagatgatcctttccttatctcttctatgaaaaaactttgtgcaatttggtcaactattgttttgcccactgtgttgatcatcccattctttcctgtgcccatttgtccaccccctcacattatgatttggcatataaatgggccactgccggtccattgcacccgtaaaaccattaatactatcaaaaattaggtactttcccattatgagaccagaagccaaaattttaaaaaatcaacaaaggggcgcgcgcaaatttcaccgtgaccggacatttggacagtggacattacgacagtgatccaaatgtccgggcgccaattccacattcccaccgcataaattaacaatttgaacaatttcgcccttcccccacccgccgccgatgaatgcataaattaacgcactacggccgttatttttggccaaaccatttcacattatccacgattccaaaatggccgtaaattttatttgccaaatccaaaacacacccctctggcgtgaacattgcaaacaccgaggagctgaaaatttatataaaatgaccatttaaacctgttttttttttttgcagaattttcctagtcgtacaaaaatctaaccctgaaaatgggccaaatgcttggtgtggcggtagcacttggtgcctggtttttcatggatcgatcaatccgcagatgtgaaatgcgagccgttatgtctcgtgaagaaaaacctcccatcaaacacttgcttgcgctgcatggacgttctgatttagtggattgcttttacaacatattggaaaaaaaagtaatgacaaaataaatggaagtgtgggctttccgcttatttgttagttttttaatttccttttttttttttgattttttggaaaggaggtgccaaaattgcattgaattcaccccttcgttcctattttaattcataactaaaatttgaaaaactttaagaacacaaaggccatggagtcggtaaagcagcaattgagcgacctcggcttggaccacgtttccgacgcatttgtggagggctacaagcgagttgaaatggataataaatcaaaaaataaatattttaattaatattcaattcctaactttacaaaacatttagcacgaaaatggtttgtgcaaaatgtgccaaaaaagtggaacacatcgatgagctttgttactgcatggaagcggcaaataaatgccaccaccgtaattggtaaaaagacaatgaataaaaaaattgttttatttttggcttaattcacttaattgtttcggattgatttcggacttttcatgcaaaaatttaaatgagtaaaatgaaatattaagaaatatatccataaacagttttttttaaaatatgttatcgtttcaaagatttattgtgaatttgtctctattattttagctgttcgagccgcaacaatcgtgctctgacctactactgattttgattggatgagaagaaaaaagcgattttaggcccccttcaaattgaattttcatacaactaaatttgtaaaacaattttttggttttatttttgggttttttaaaatttaaaaattcaaaaaaaaacaattttgaatacaaggttaaaattgccttttattcataatttttataatttattatatttatattatgatttcacttctaaaataagaaaaaaaatcgacaaaaatgtctttcccatggagcagaagtagcaacacaaacactggaaagcatttaaatgtaattcacaattaaattaaaaaagttattttcaattgcttatttaattgattttcagaaatagttgcttcctcatcgagtggctttgcgtgcgtca

SEQ ID NO: 10609 - DNA, 1261 bp, Heterodera glycines
  unsure (1)..(1261): unsure at all n locations
ttccgtttattattanttttgggctgcaggattaataattaccttttttctaacttgctatggcctaatacgcacgaaaaacgagtttttaacttggtttgaagcttatatcttgaactttttggtgcatttttttgccttttttttgcgattttagtgccttatgccggacacgtaattttgttgccttttttgacctttgtgcctttttcatgccttttttactatttttttgaaaaaaatagtaaattttttgaaatttttgcaacttttcctatcatattttattacaatttccaaaaaatttccggcggcgcctgacgacaccgccggaccctcattaccttgatttttggaattttaacctctatgattttactattggtaaaaaattttgaaaaaaatttcgcttttcgcatttcgctttttatttttcaatttggcccatccctggtgtatatcaaacagcaatgaacagattcttttcttcttttggcatgggttaaaaagattaaccgccccctcttcacccagctttttgcaaagtaatgcttaatttccgaaaacaaaatctgtgctttaataatgatgttgggccattgctaattatgatcttaaatagattcatccaaacaaataaaaatgatgaataataccaactaaattgattgggacccgatgaaattgatttacgcattttctgaccgtccacggctttaaaaaatagattaaaagttagaaattttgattttttgttttttgcttgctggcttaatatcgcggcacaaaagtcggcaaaccgttcataagtgtatctcttttatgctaatttagcatattctaacaaatttacctcgagaattttcccgtcgcaaatgatgggtgctgaaaattatatgtgtaaaatttatggcatataataaggagggttcaattttatatatgctaaaaaccctcaaaatatgttaaaaagcgaaaaaaatccaaaaaatttctaaattaagtgctaaacactgttgaaaaaaaaaattaaaatttatttaaacaggctatttttctccaaaaacgctaaaaaagacataaaattattttacacatttctctcttaaaactagggttgctccccgacccctcggggggtaaaaagtcgggggccggagacctcgggggggcggcatgtcggggctcggggcggggaataggcccaaaaatgtcgggggtcggggaccggggagctcggggacggggagcaaccctactt

SEQ ID NO: 10610 - DNA, 4503 bp, Heterodera glycines
  unsure (1)..(4503): unsure at all n locations
atctcttattatgagtttcagtaaataaaatgagtccctcccaggagaaacaaatgcattaaaatgtcaatgcgaaggctaaataattttataaaatttgttataaaaaaatcgaatctcacaaacaaataggaaaacttcaaaaaaaagaatatgcaaataatttattatgaaaacatttattttttactctttttctgccattgccccttagcaattgaatttttttctttaaaattttgaattaatttaccatttgatttcatttcacttcaaatcaaattataaattttgtttgagaatcaattaaaatttttgcattcgaaacccggtcggaattccgaacacgtgcaaccctacttaaacatatataaaaactgaacgaagattatttgggttttaattaaaatattttaaaattcaattttagagaaatttatcgccaaagattaaaaatctgtaacataaataattgacaatatttttaaaaataggcacaacactttaaaaaccgagcaaatctcaaaaattattaattttaaaatggtaaaataagctaaataacaaaaataaatattttcataatttcggttcattttgtggacagaatctatcttttaggacgaattgtgctgagttttcaaagtgaaatagaaaatatttataatgaaactgtttgttttattattttttttgtcattgccccgggcaattgaattttttaaattattgaattaatttcccatttctttcaattaaaccaaatcaattggattttttgttgaaaatcaattaaatctttgcattaattcgcccaacgaaaaaatccgccaaaaacacttggccattgttgtcggcactttggtcgtattcatctccgattttttcatcttcttcaatctgtccccagtctttggccatttcctcgcagttttgaccaattgaaaaccgtcgcgaaacctttgactgcttcaatttcatgtgccttggaaaatgataaattttaactttcaaattataaaaaactaacaaattgcaaatattccatgccaaacattgcaatttatttttgatttccgcgggaggcgtagaggacaatttattggtggtggtcgaagtactcgtcggagtagtggaagagaaagttgaactcaaaatccaaatttaaaagcatacgagaatcatcaaaaagtggattcaaaaatcataaaaattgccaaaaaaaattacaaaagcggaaaaagtcggtataattttgtggtattattgcgaaaaaaaggcaaattcgaaatttgaaaaaaagataaggaaaaggaaaaaccaaaaaatattgtgaaaagtatgtctaatttttaggatcaccttttataattcgatttcggggtgcttttttatttatcatttattcccataaatgtttggaaaagttgggggggggggtatttgttcgtattaccgtaacttcctaattacggtatcaaattttttccattattatttaagcggggactataatattatattagaattagagatcggatgattgatcatttaatgggtctttttcaattttaattgaattcctttgtccggttaatattttactttttccaacttttgttgcatccgtccgtgttgcaaatgtagcaacatgctctcccgccttgaccttcgcactcactggtgaaatgcgtgcaattgaccatctccggcttctgacagtccacaatatttggcacaatttcgtctttttctaattgcatttttttaaatttttatattattattttttatttattatatttttacttttcctaattttgtcaatgcatcggacataagcgcattgatggccagcaacagggcattcataaaggtccaattggtcttcagggtcaaatttgcctttgggactgaactggacgaaacatttcaatgctaaagagtttcagaaaattcttaatgttatatttttattttttaccaaaggctgtgtacaaaaatccaacggagaaaaaagtgatcgataatcccagcatttaattattaatttatatttattttttattttccttaattttacttttacacataaatatttttcaataaaaacactaaaaaaataaatgagaacaaaataaaaataaatgttaatggtttttgaattgtacgaatgatttatccgatttaacgggctgagaatggacataactaaataaatggttgttgctgattcattggtaaggatgggattcttagttttttaactattttttctgcggctttaactcgacgagaaatgcacgaaaaacacattctttttcgaaaatttttcatttttagtgccactattcatcactaggaatcactattttggagctttgccactaaaaaaaactatttcggaagttggccactaaaataattttttgccactattttggcgtttcgtcattatttttgccactattttggcattgaaaatattttgtaactgcaatcagtgaataaaatctttttccttaattttaaattattttcaaattaaaaaacagctatttaaaaaattacacccctaaatttggaactttttcgccactatttttaccactattttggcattttttggtcactatttagttaattattttgagattttttatcactaaaaatcccatccctattcattggttttctaaaaagcaagccattgcacaaataataacaaattctcctttctatcgattaaattaaaaataaaatactttatttagcgccgaattttccaaaatgaaaaaataaattataaatgataagaaaattaaacgagtggttcctcgagagtcttgggcagagatttgactcgagatttcacgcctgttacgacataacaattggacaaaacaaacatttctatcggaccagaagttttcgctgaaaatcttccttttcggccgacaaccttttcgagggcacccgcaaaaagtcacgcaaccctttttttacagtttatttttttttgatttttaattttttttggtttttttgacaaatatgaaagtccatggatttttttagccaaaccctcaaagaatggcattattactttttagaaaacataaagcttaaacattgattgaatgttatagcaaatcctactggtgcctcaatgtaaaaatagagatcattgaattatttagtgaaatatcaattttttaaatgcatttacaaaataggcaatgcccatggatgatagatatagcaaattataaattttatattagctatagttgctataatgctatataaatttttacaaggtgatcaatgttgtataataaaatatttttaaaaaataggcatgtccatgggtaatagatatagtaaattattaattttatattagctttattgctataatcctatatactaaagatgaatgtctgtcagttcccgggccataccgnttcgtacagcacacaggttttttgactttaacttttttctttgtcaaccaaatccaacgatcttgatatcattcgagagcccttcagatgctctattagcctgcaaaatttcaaaaaatttcgttaagttttaaaaaaaagttcgggccaaaaatttggaaaaatctggttgtatgaattcttctggccataacttttttgagccttaacggtacttttcgaaattttgcaggctaatagaggtcacttagggctatcgaaggataccaacaatgttggatttggttggcaatgaaaaaagttatagccaaaaacttgtgctcgtacgaaaacggcccgtactaaaacgaccccgaccggtcagttccagtttatgtggcgttttgtttttgttttgcgttaaaaatgcatttgaaaaatgaaatgtttgttttcttttttatttgttttgattaattaattaatgatgcgccgaaggcgctaaccccgctagtgctatattaatttgatcattttagttaaacatcgattgtttttaattttggcgtgtaaaaaattgctttacaatgcaagcatttttcttaaccaagtaaaagagggaaactttggtgccaattcgaccactgaattgattcagaaaaatgcgactggcattttatgcaatgtaaaacgaaaatggatgaaaatttgaaaaaattgcaaaatgattttgcgactcaattattagcaattagtactgctaattaacctttcaatataaaagacaatcatatatggagaaatcacaaacaattttatttatttaagatttttttgattcctttatttattataaaaatgaacgctcgagaaattcacattattatttttattttttcatgaatttttaattgtcttttgtctaaaattttttaatcctttttattangggntncggaccccgcccccgtcaccccgcccctgccgggggcgggacaggttttttggcctcccccccgtgcccgtccccgcgactctgaccccgcaatccccgccc

SEQ ID NO: 10611 - DNA, 1175 bp, Heterodera glycines
atagggttcggaccccgccccgtcaccccgcccctgccggggcgggacaggtttttggcctcacccccgtgcccgtccccgcgactctgacccccgcaatccccgcccccgcgaccttcgcccccgcgggggcacgggggtgaaaatatacccgtaagaatggcatattcgtgggataaaaggcaaaaaatttataaaatttgaatttttaaccatctttgagaaattttttttatgaaataaagtaaattttgctgttaatttccaaaatatttgtggtttagtggttagtgcttcaaactaatagtatttcttgttaggagttcgacaccggttgacgttttcatttgaatttatttttatctaattaatgcagggtttctttatgttcttatttctaataaatgttctgattttagggagtattttcatccaaaagaatgaaatttctgaaaaatttggctaacttctaacaaaattcattaaaaaaattccccccggcggcgcctatcggtaccaccggcccccaaaaaacctattttttcttaaaaaattagcataaatcaataaatttggtcattctttagacaaaatctgtgtaatttatgccaaaaggaattgaatcgaggcgatacaccgactaaaggaatgtggagccaacacatcattcataaaaattaatttttttgtgagattttttggagctaattcaaatcaaacccccggccccgtccccgcgggggcggaatttcgtgctcccgccaccgcccccgcgacccccgccatcccccgcccccgcgaaatgccactcccgcccacggggtccgaaccctactttttatgatttacaaatctaaaataaaggtgctcaggcccaagtccaagcaaaaaaagttcttcaatgtgtttctgcttcaaaaagttaatatttttgtttataaaattcataattcaatttaaaatgttttccaatttgatccgtcgttttttaatattattttttaaaatttaatcttaaggaaaaatgaaacttaatttagttagttcattttcggtaggggtcaattgcttcatgccaactgcgtctgagatagcattaaaaagccataacatttttaagcaacccataaaatttaaaggttgaaaattgtagaaaattataattttgtatattt

SEQ ID NO: 10612 - DNA, 1543 bp, Heterodera glycines
gatgttagaaaacctaaataaatcccataaaattctcctgatttttctctatttttaaagctttgttgtatgaaaattgacttaccctgaggttagttatgaattttcaaatattaggccaaaatcccgagggccaaaaaattgccaaaaaataaagaatttttaaaaaattcccaaaattctgaaacttaaaatagacatcatattcgtactcagcaccttattttaccccagaaaaatatttttgaccccaattttcaacccaaaaaaaattttcgaaaatttctagggggcctagctcgaaaatttttgaaaatttccgaacatgttgcacatcatccgatagagcttaaaaagctctacaattttgctcttaggccatttttggctaaaaccaacccctaacgagttatgagcccgggactgaaatgtcccgcttaggccaaaatttttttctatttccgggaaaaaatcgaaaatttttcaaaaaaaataccagtcgatagagctcgaaaaactatgttttggaagtggtcttcgtttctctgggaaaaatcgttaaaaaatcctaaaattcaaaaacccgaaaaccgatttttaggcctagctcgaaaaattttcaaaattttcgaaattttaaaaactggaaaaatccagctcattgaactctacaataagtctgctggcaccccctcgctcagttcaaaccctggcgagttattcgcctgggactgaagtgggcaaagttggtactgaaaagttctagaagcacccagcccagggggttagagctagaggcctagaattttttttaacttttaggcaacattctcacttagggccctcacagcgggaattttttgatccgagaaggcacaacagtgattagaagtggtacaacagtaattagaagaggtacaacagagatgagaagaggtacaacagtgattagaagtggtacaacagtgattaaaagaggtaaaaagtgattagaagaattacaacagtgattaaatgacgtacaaaacgcccgtttttcaaattttgttgggcttggacgggcgttcagcaattatctattaataaatttaaaaaaagctgaataaattaattttttttaaatatgttaatatatacaaaaggtttaaaaaaaatgaataaaccaagtattatgtaaaaaatattttaaataaattatatatataatttaaaatatctaagaataaaaataattatgctggtgatatgctccccacagacagcccaaaaaattttaaatacaaacttatttattcaaaaaattctttgatactcaaatattttacttaaatatactagattaataattttaattttaatttcttttttacccatctttttctaaatttaaatgtattattaagtacgaggacataaatttataaaggcggcaatctgtatttgaaactaccattaatcatcaaaagagattatttgctaaattatatatacgttagaatgataaggcaactcatctcaaaaactaattccggtcggacgaagg

SEQ ID NO: 10613 - DNA, 3842 bp, Heterodera glycines
  unsure (1)..(3842): unsure at all n locations
ttttcagaaccgaggtataaatttttttctgaaaaatcgacaatttccagaaattctggaataactttttttcttttgaagctagaaatcccaaataaatcccataaaattctcctcatttttctccatttttaatgctttattcattcaaaattggtcaaaccttaggccagatatgaattttcaaattttagcccaaattcccgatggccaaaaaattggaaaatattttcgaaattttaaaaaattccaaaaattttgaaacgaaaaataaacatcatattcgtgctcagcacctcaaaataccccagaaaaatatttttgacctcctttttcaacccaaaaaaattttttgaaaatttctagggggcctagctcaaaaaattttgaaaatttccaaacataaaatacaccattcgatagcatttcaaaagctctacaattttgctctaaggcaatttttcgctaaaaccaacccctgacgagttatgggcccgggactcaaatgtcccgctgaggccaaaaattttttctatttccgggaaaaaatcgaaatttttccaaaaaaattaccaatcgatagagctcgaaaaactatgttttggaagtgctctccgtttctctgggaaaaatcgttaaaaaatcataaaattcaaaaacccgaaaaccgttttttaggcctagctcgaaaaattttgaaaattttcaaaattttaaaatttggaaaaatctggcttttaaagctctacaataagttcgctggcaccccctccctcagaccaaaccctgacgtggtatttacctggtactgaagtgggaaaaaaaaattaactgagtctccgtgtctgtacaggtccgggatttggtctgatcaaaaaataaaaaatactggattatagaggacacttctgcggagtgccctcacagcgggaattttttgatccgagtttcagaaaaaaagttatgggctaacaaacgcaagaaaaagtgagaaatcggtccccgggactcagtcgtccgcgcagaatttttctctatagttttcccggatgctcctcaaaaagttgtaagacccttccactactttcagggcgctcccggccttcggccgggagaaaatggttttagcaacgaaactccttgtcaatataacatatatagtaactagcgggtgcgtgaaccgtcggctatttagctggggaaaagcgcttcgcgctttgggagcttcgctacctaggctgtgaagcgattcaaattgatcgaattggttggagagatttttttgaatttttaaaaaattattaggggttttttagtcaacatcgaggctcaagacgggcgcttcgcgcccgtttttcaaattttgttggttcatacgggcgcttcgtgcccgttattcaaatttttttggccttacagagattagaagaggtacaacagtgattaaaagacgtacaaaagtgattaaaagacgtcaaaagtgattaaaagaggtacaaaagtgaaataaaaaaaactctacgctagtgcatttgctacgctagctttcgaaaaaatggtagcggactgacggtttcgctgcccttttatagacttttctgtgggagtagtgtagagtgtagagaaactacactggatactctacgctagtgcatttgctacgctagctttcgaaaagggagtagtgtagagtgtagagaaactacactggatactctacgctagtgcatttgctacgctagctttcgaaaagggagtagtgtagagtgtagagaaactacactggatactctacgctagtgcagttgctacgctagctttcgacaaaaatggtagcggactgacggtttcgctgcccttttatagacttttctgtgggagtagtgtagagtgtagagaaactacactggatactctacgctagtgcatttgctacgctagctttcgaaaagggagtagtgtagagtgtagagaaactacactggatactctacgctagtgcagttgctacgctagctttcgaaaaaagtgggagcggattcacacagaaaatgtgtctctttatataggctcttagctgatgctagtgtagcatctctgaatttaaaacaaaattaaatttaatgtaaataattaatttatttcatattagttaaacaaaaacatttaaatgaattaaaagcatagaaaataatgataaaatgcaaagaaaaataatgtacaccgcccggcttcgaacttgcccccccccaaaaaatgatgcctcagaatccccaatcacacggggattctgaggccttaacgatgtcataactaaaatctgatttcatattcgttatcagcgacctaaaatagccctaaagacatgtttttagattatttttggtgaaaaaaattttcaacacaaaaataatgtgcacccccctttggtcccgaatcccaaaatcacttttatttttgtatctttttaaaaaaaagtgataaaaataccaaataaaatttattttatagagaaaaaaattgcggatttaagtaatattttacttttcacgagtgacttttcagaaacgagttctgaatttttttctgaaaattcgaatttttccagaaattctggaatatcttttttatttttagagatgaaaataccaaataaatcccataaaattctcctgatttttctctatttttaaagctttaattcacttaaattgacaaatccttcaccgagttatgaattttcaaactttaacccaaaatcctgagggccaaaaatttcccaaaaaataaagaatttttaaaaaattccaaaaattccgaaacaaaaaacaatggtcaaattcgtgctcagcacctcaaaataccccagaaaaaattttttcaccacccttttcaaccaaaaaaaaaattccgaaaatttctagggggcctagctcgaaaatttttgaaaattttcccatcatatagtacaccattcaatagagctttaaaagctctacaatttttgtctaaggcaatttttggctaaaaccaacccctgacgagttatgggcccgggactcaaatgtcccgcttaggccaaaaaaattttctatttccgggaaaaaatcgaaaattttctaaaaacatcaccaatcgatagagctcgaaaaacgatgtttttgaattggtctccgttttccccggaaaaatcgttaaaaaatcctaaaattcaaaaactgaaaaaccgaattttaggcctagctcgaaaatttttgaaaatttttaaaatttttaaagatggatagatagagcttcgaaagctctacaaaaagtccgctggcgccccctcgctcacatcaaacccggacgcggtattcgcctggtactgaagtgtccaaaatgagatgacctcggtctgccatttttccaggccaggcctttggtctgatcaaaaaatttttgctggcaaagttgtaggccatagttggggcatttcgcttttggggtccgctaagctctgaaagcaaaagcaaaaaatttcgtaacactgagactgtcggcaaagtcagttttcgagccgctgggactcagttggccaccggaccggaaaatccgtatttttcccagatgccccgtctcgagctacccctcggtgcaaaatttcagccctgtacgcttagccgttcccgagattttgtttttgaggatgagttgccttgtcaatataacatatatataaactagggtggacagtcggctatggtgtgcatgcgtggcttggtaatatatggccctcatttgttattttaaaacatacaaaacattatcaattgagttctgttgtgnntggggaaagcgct

SEQ ID NO: 10614 - DNA, 1819 bp, Heterodera glycines
aaactaaacacattaaatttaaaagtttaaatacacatgtttatttagcttgagtatttgctgaataccgcgacaattattgtcaagaagtattgccaaactgaagctgcaagcgccgaccgcacacttttatccattgccaaacgtgactatttttacaaaaattaatacattttttttattgctaacttttggcgttgggcacactggcaagaaaagtcggaaaatatttcccaaaatctcggcgatgccaattggccttgcttaacctggtgtaattgaaaatccagttaggttgatcccacccctatataaaaactctcgggagaatcaccccaatccttatcgatccgattcccaaattctgttcgttggtcatgttttttcaaaattactgatttcattaccgaatattttgaaaaaataattatcgaaattgctaaaaaaaattctcccccccctcgcttgatccccctcccccttgtccatctataccgtaatcatttcctttattaatattcaaaatctcagaactgtccctactcgacaaccgtatcgacaacagtattcgcttatttcatgaagctaaatctttaaaaaataggcgaacatccaagcaacggagaactgatcgaagtgcaattaaattcaattaatttccaaaaaaattattcactgaattttttaaattaaaaaattcctttaaaattaaatcaataatttttcttcaatcattcatttctccctaaaaacattttttaccattttataaaataataaaaatgttttaccatgtgtttctgctatttcttgggatcccgcagggttttttcgggatatcgcgttattaaattcgggatcccgaccttggcatacgtcccaatcgcttttccaaaatcttctgggttaatttaatggaataattttaaaaaatttgcgagccgcattaacgaatatgaaatttatcacaataaaaaaattataaataaaacaaaacccaaaaaattactactaaattaatttaccgatttaaataaactaaaaattcattaatttgtaacgtaaaataaataatttgacatctttccatttaattgcacaatgtcgacgaattaagaagccctcctcgcatcagtctgaaatggaaaggagggagcagaaaatgaaatttccaaacaaatttctttaaaatgattacaaatcgaaaaattgagaaattttcccggcgtcgcctataggcaaatcgatggccccctcacttttagagcaactttgggggataatcatttttttaatatattttttaattttatgtgcgctgtcgaaagaattatttttcaaatgaatgacaaattttgcggttatcattcgaaattgctaaaaaaattttctgaacgccttttttcgccacattttttttgcggcaagttttttccagggaatttttgcggaacagggctgcggggggggggtctgcggtgccgataggcgccgccgccggaatttttttctatttgggtgtaagttgttaaccagattttgtcgaaaaaatgaccacatttacgggttttaaacaatttctcgaattttttgtaaacaggattttcattaaaactttccatgaatataaaaattgcgaaatccaacttcgtaaaaaatatacgaaatttataaatttaagaaattgaaaaacgaatgacacttcgtttattaagaaattaaaaccagattcaattcgtaaaaattttttttacgaaatttaaaattttaagaatttaaatattaatttaaaaaaataaaaatatttacgaaatgcaat

SEQ ID NO: 10615 - DNA, 2603 bp, Heterodera glycines
  unsure (1)..(2603): unsure at all n locations
atagattttnaaagaagtgataataactgttctgattatttttgtcacttcaatgaaattattatccataaaaccccaaaaagaaaaaatgatttttttcaataatttggcaccaattaaggctaaagaacgtgtttttaaggaccaataagttatatcaagcaagatattcttgtaatttaatgatgaaagccttgctttactattttatcttattgagataaattttccaaatgattttttttttttggcaaatttaatcaatataatcaaattgatgatttttattggaataaatttgccaattattaaattatttggcaaattaatcaatataaccaaactgatgattaaataattttggcaaaaaatgattaaatttttacattaaataaaaaaatgtttaacccttcgtttgcaattccttttatcattattatttgcctcctttttccattatcattatcaaaaacaaatctatcggtgagtttcattttaaaaattgtttaaattttaattctttttaattaggttgacgaagaagacaattagcctgcaaaattgcgaaaaatatcgttaaggttcaaaaaagttatggccagaaaaatttaaaaaaccaaattttccaacttttttggctcgaactttttttaaaccgaacaaaattttttggaattctgcaggctaatagagtatcagaagggctatcgaatgataccaacaatgttggatttggttgacaaataaaaaagttattgtccaaaaacatgtgttcgtacgaaaacggcctggcccgaacaaaatcaaatctgtgaatttacagcgaaaaaaatatgaggcgcaccttggcattgtgtattttttaagaaagaattggcaatgtgaaaaattaagaagaagtttgaaaaagaataccaaaaatatcgcaagtatttgggcattttgtacgaatatttgttcagacaaaacttcggacttcccggcgttaagccaaaatttgtgtttataatagaccaaacggaaataattgttcatttgttcaagtggtatattacttggccaaaattgcatgtttttattttgattccaatttgcgtgaaaaatatattttcattattgcaaaaccacgattaatgaatgagaaaagattgaattttgaggcaccaaaaagtgaccaaataatgtcaattaatgaatcgattttgcaattagcaattgatacgtcctatgaatggccaccaaatgaaagtgtggacggattaatgcgacaaatttttcatcatcgaatgcttttgattttggccttatcacacgtaaaatttttaattaagtggcaagggcgattttcggggggttgtccttaattaattaacgggaccgtaacgggcgagaattctgttcacgtcatccagcataatcgatttactgtttaaaatttttgacttttttggctccggcgccaaaagtgatcagaaaaaatcgatcaaaaacccgaaaacccgataaaagtggtcatttttttcaaaaagagggctttttaaaatattcaaatttcatttgatgcataaaaaatttattcatataaaaataataaaaatttatttattaaagcaacaaaaaattaaaaattgatttatatgtaaatgatcaaaaatttacttcatcaaaaatttaataatattcatcaataaatcacttgtaaaaggcatacaataatttattaattaaaaaataataaaaaaatccatcagataacgcagcaaaaaattaaaaattgatttatataaatgatcaaatatttactccgatcgaaaattaactgatggtgatgtaaatgaatgacataaaagagaagtgttttcccaagtgagaagcatcaaattccatttcccttcaaattaacactcacctattaattaattacccctgcgggccgaccggttttcgcttaaatgtcgcttttcaaaaaattcattagtaaagactaaaataccatttaccaggtaaatccaactcaaattattttcgccaaatacaaaaatgtaactcgcccggtgggactcgaacccatgggcattctaaaccgtctaatgattggaccgactgagctatggccgttacattaaatggctctcccatttttagtggatttggagaaaaaaaaactcctaaaatagactcaaggccaggaatggatattttgttttcaaaaattagtttcatttaaggtaagtcggccggtgggactcgaacccatgaccccaagcaatcagtgccgtggctctaaccaactgagctacgggcgctccttttagcggtcctctcagatcctttatcccactttctcctacactccgttccttctggcatcacactgaacatgattatctaaatttttgattcggtgacactaaaaacaaccaaaaattacgaaatgcatttaaatcaaaattcgaaatcgaaaaaaatgttttttccgggtctcgggaatgtatatgaaaatcgtcaaattcctaacattcattttctgcgccttagatggaaccattttaaaccaaaaatgcctatgttttaaaagtaaatactagaaaattatgagcatc

SEQ ID NO: 10616 - DNA, 1298 bp, Heterodera glycines
ccccactcgttgtgttgtgatgaacagtttcgttttcgtttcgtacggaaacggtttttttgctttcatgttttgttatcgtccaaaaattttttatttttttggattttaaaatcgttattttagtttgtttttcttttcatgaaaagtgaattcctaccccatttgtcgtggaaaaaatattattattttctgaaaattatcacaaattctccaaaattctcaacaaaaaaaaaactcccgtcattgcctatcctaggctctaataaacaacaataaaatttcatagcataaatttgtgttcccgaagtggcaactttatgctcgtttttcaccgcttgtgctcggattcggcattgaaccgttggcttacaagacattcaaattgcttgatgctaatgaaggtgatgcacgaaatggatcagtgataaactatgaaatcctgcttaaatgcaatatcagtcctcataaaaacgaaaactatgtaatcgggagcgaattttatcagcatattggaggagaagccggttttataatccaagtaaaactgtacgacattgagatggcacgcttatgctatgaagatgaatatggcaatgaaaatagcatttcaattaaaataagaaaaaacacgaggcttttgaggtaaaatttaataaatagaagaaatatttaaacagtaaaattgaaaaatttttccaattcttggtgtaatcattttcgcaaatttagcaaaattaaaaaaaataataataattaaagattacttctaagcaatgaaaattttattagaacattcattgttgaaaaatccagtttcattaaactcatgaattcgaacttgatatgcgaggtgatgttgaagttgttaatttattaccacattcaaaagtcaatgtcgaagctggcacgagctcaaatagcagcaggttaaacgcatcgataatttgtacgaattttagaaatggttatatttaaaacctaattttaagaccacaagccctaactgtcgatgataaaaaggagataaacccattcaaacactgatcaaaaagcaatagacttgtggatcggctaagtggatgtgatcagatggaaaagccgtaccccccccccacaaaagatagatcatttatgattagcatgaacagtatataaattgttgttgtcattatgtaaacctttttttaaataaatttatttccttgagccaaattcagtgtaaagctctaatttataacaataaataaataaaatcaggggccagctttatgtagacttgctttttttaataaaat

SEQ ID NO: 10617 - DNA, 2534 bp, Heterodera glycines
acgattgcttcttgcccatttttgatgactcacccttttttggtattaaaaatgcatcatttaaagacattgccgctgctggtaggtatggtacaggagttgaagagcttaaccaattaatgttgctttaaatttgccagaattttcactgtgtacaccgagaattataaatttaataaaaacaccgtcgcgatagtataaaaataccgtattcaatttaccgatacgataatataccgtatacatattttgcagtgggatgtacgagatcgggaccgagccggcaaagcctcggtcatcacaaatcccactcccggtagtcaaccgataagcgggaatgataagcattgataagaatgggagagggggtctgtgagtaaaaaattatggatgaaaatgataaaataaaaatttatttctttttggacttatattgtaaatttaaaaaaagtctaggttctctctatttttaatatgatgagaaacgcttaatagtcctaatagcctgcaaaatttcaaaaaaatttagctagacacaaaaaagttatggcacaaaaacctcaaaaaattgaatttttcaggctgttttggcaccgcacgccatatctttaatatattattctagaattttgtaggctaatagagaacgcttaggcctattgaatggtatcaagattgttttatttggcttgataagaaaatagttataacactttaaaatttgcggcgccaaaatattccgcgccaaagtgaccccgacccgtggaggagccacctagttcaaccgatgctatgccgttaggcgaaaaccatcaactgaaaaattttctaaagcaacaaaatttttaattctatatatcatttgatagctctaaatgttttctattagctacaaaatttaaaaaaaatttcaagaagattattatcaaaaatgttcaaaacaaaaaaaaaacttggttttttgagttactcagtttataactttttttaatgatttttttttttgaaattttgaacaaaatgtccatcaactgttttcgtgttgtccgcattcctggtaatgtcaaggtcaatccatgcggtggtggcaacaaatttttcatgttttgcatcatcgacggtttaaatggtcctcccgttgcttcttggacagcttgacgaaaattttgtttgtcaatatgtatcgtggtagtctgacgtgatgggtctcgccgtcgagatcttttccgttttaatgttcctacagatgacgatggtgctcggcttggcattctgtttctgtctctgcttgtgccaattttcaatgcgccattaatgccatttggattgtggcccgaattgttgtcattgtttgtgttggccaatatgccaatgttgtccaaatttgaagttaaatcgatgaaatttgagtccaaattgtttccaggtccattttcattattgatactaatgccattttggcccatttcatcataattgttgccattgtttgtgaccaatgtgtcagatgtgtgccaatttggtacaaaattgttgaaataagagttgaaatctgcactttgtgttgaaaccttgtccaaaatgttgttgttgttgttattattaatgccattttggcccatttcatcataattgtcgccattgtttgtggacaaattgtcaaatgtgtgcaaattttgtgttaaattgtccaaatttggttgataataataattattattatcaggttgattttgtgccgatctgtcattgtttattaacaaattattatagtaatttattgccaagccattgctatgatcattttgattattctgatcattatcattagtatgattaggcttattataattactatcataatcagtggaattgagtatattatgcattccattgcatacattaacaatatataaaaatatgaaggtaaaaataaggaaattcatacttctaaattgaaaattattattgttatattattattatattattataaaatgtaaaaatgggggaaaatatatgtttttaatattataacaaatatatttatacattgattttattttcttattttgtttttcatataaaagagacagaggcgtatgattttattcacgtcataaaattttctatcgtttgcaaaagtcggaagtaaaacataattaatttttaaataacaaaaaaaaattatttgcaaaatctggcaattaaaaattgctttaaattaaaaaaatcaggggattccagatgaaattttttaaaatcaatcaacattttgaaaaaaaactattcattttatgaaaaaaacaagtaaacaataattaaatattttatttttctttgtccataatccctttcaacggtgtttccatcatgaattttttgccatcttattttcaaaaaaaattttattggtagggtccgactacgcgggtaggcaccgtcgggaaaagtttgaaaatcttggccagatttcttaacagatttcctgtgagaacgcaattttgggtgtattaaagcaaattcaaataaaa

SEQ ID NO: 10618 - DNA, 981 bp, Heterodera glycines
aaatggcaatttttggtcccccaatatggccgaaattttgaccaagaaatcataaaaaagaattaggtaatttttaatttatggaatgagtaaataaaaaataataatttactttaaaataaagtaatttttctacgtttgttcactgatgatttttctattaaaaaaatttaggaaattttgactaattattaattacacttaaaataaagtaattacctttttcttttaaattcgaaaatttaccctaaaaagccaatttcctcttcaattcgtaattttatataccaattcttcattatctccattagatttaagcattaagcaaatccattgatccgcttttccaccatcacatagttttcccaaaagaaaaaatgactatagcgctgcttcagccaggtgcacattttttacgctcctccccctcctcgatccgttgaaaaatgatgatgatgatgatcaattgcgccgcctgcttggccaaatgatcacaatcacttcacaattgcctgttgggaagggagggggattaagggattaagccggatgaatcacaacacttcgatggaaatggtggccaacggcgataggcggcggcagcagcggcggcgccaaacattggctgatgatatatttcacccaaaaatctccccccccccccgccccgggcaaaatgcttcatctcggctcaacaaatccatccaatcccctgctggccccagacaactgctggagaaacggggctttccacggctctcttccctaaacaaatccacaaaaccttcttaacactgctatattgccaatgatctgctggtgatctctgctggctaaattggctgcaattttgaataaaacttataattaaattcaattattcctcgaattttttgataattaaataaatttaaattttctttcgggttcagctttttattttatattaaaaaaaatttcgattgatttattatatttgtt

SEQ ID NO: 10619 - DNA, 2855 bp, Heterodera glycines
  unsure (1)..(2855): unsure at all n locations
acactaatttgaaatgattttatttnttgaaaaattattttaaatatcacttttttgggttcttctaaaattaatttattccttgtttttatccgctattttgaattatttttccattatgaacaccattttttacattttttctcaaattaatttgctattcgatttttagccattttgaataattattttaatttgaaattattttaaatttcatttttggattaatttgttttttttcgatttttagcaattttgaaccaacgaacatctgccgagaagggcagatggcagttgaatgtgtgcagcatcgaatttgtcaacaaaaaactacaagattaaagcaaccgacagaaatttgtgcagcgaatcgtacaaacaaaaaaaatgctagcacaaaattatggtaaaaataattaaatataattaaaatatttgaaatttaatacaaaaaccaatgctttagggtcaccttttttgtaacgacaattttatttctcattggagttaccattgttgatacggtattgggaaatattttaattttaaaatatttaataagtgaatataattaaatattctattgttacggtattggaaaatatttaattttgaaaatattaattcgaatttaaaataaaatattgcattttttttattttacagcaaactccatgcagcccttatgactgcaatcagcgaggatgtttttgtgtgggcgaaaaaggttcgtaaaattaaaaacatttttttaaatttgacaatgtttataaaattcacttttttaaaggaatagtttaaaatggtcaataaaactttaaaaaatcaaatatttttcaagaaccatatatgaagggggttcgcaaaaatttttttaaatcgtaaattttaaggctctcttgggccaccaggcccccaaggtccacccgggacggcaggaattcgcggcttccctggcccagatggactccaaggcctcaaaggacaaaaagtgatgaaaatttaaaaagatttttaatttaaataaattttttcagggagcccaaggtccaccaggctcggctggcataaaaggcgacagaggcccggttggcatgccaggctttgccggaaatgatggcactccaggacgcgtaaaataataatttttgtttaattttataaattcgaaattttcagcccggcgaggcaggcccgcctggtccgcctgggtgggacggctgcaacggcacggacggatttatgggcctacccggcgtacatgggccggctgggcttcccggatttcctggacagcctggaacggacgggcccaagggtgagccggcacttggctatgctggcgctcctggcgaaaaagtgatggcggaaatttttttttaatccaaaaaaaattttcaagggtgacggaggagtgccaggagttcccggactgcccggaacacctggccgagacggatttcctggtgagaaaggtgaccgtggtgatgttggactgccagtacgtgaatgaatgccaatttatcaaatttaatcgtaaaaatggtttttttcagggccctcgaggtccccctggcgaacccggtttgcccggaaacccggggattggcacggttgggccgaaaggcgacccggtaaaatttattacgaaaaaatatatttaaaaaataatttcagggagagcagggcctagttggactgcccggaccgcctgggcctgccgcgtatggcctcggtgcaaaaggaacaattgttggccccgaaggccaccctggccacaaaggcgacaaagtgagtctgattgggggcgggataaatattattggacaaacattcaattaaacagcatttgggaattggtggaaagtttgattttattattagtgaaattaaaaataaaaattaatacttgtgtagttttcagcaatattaatcaaattttttaattggcgcaaaaaacatttgctaatgacatcaaattaattaacttgattaaataaaaaattaataataataatttgacaccaatttcctattgaaaatgaatctgaagtataatattataaactttaaatggtgaaatttgtaatggaaaaataaattaagaagtttattggggtattacacattaaaaaattttccttttataattaaaattttaagaagtgaatattattgttaggcatactgtaagtcgttttattgtaaataaattgtcccaaatatactcattattattattattatttccctgctcagggggaagcaggtgaattgggtcatcgaggctattccggcataccaggactgcccggtccgcccggagcacccggcatgaagggagaaaagggcctgccaggcccagcaggaccaagggtaaaagaaaaattttcaatttaattttgaattttttgaaaattttaaattccttggcttaagggcaaagaaggccgttcgggcttgcctggcccacccggcttcaagggcgaccgtggagtggatggcttaccgggcgttcccggctcaattggccagaagggcgagcagggctatgctggccgagatggtgtgaaattttttagtttattaaataaaaaataattattttaaatgcccattaaaattaatgggttttgattctttgaaattaattgtttaaatttttttttataaaattcataacctataactcaccttaaagtggtgaaaaacgcaactaattttaaatgaattaacttctgtaattatgtgggattaaattgctaaaaaatttaaaaattaaaacattgcaattgtttaaagggattaaatttcataaaataagctaacaaatttatggaaatctaatcataatt

SEQ ID NO: 10620 - DNA, 2113 bp, Heterodera glycines
aataaactattttttaaatttttatttaactttgaaatattcttcagaattttcccttcaaaatgagcacaaaatggttttatttggtctattattgaaaaagttataagctaaaaaaaattcataaaatcaagggtaaaataaaatgtttaccttttattgtttgtatttgttcttttggcgttctgtatttattattattttatttatttgctttaaaaaattgaaatttatacacaaacacaaggaggaattgaacttagagcccctttttggtgactaactcacagaccactaagacgaaaaaaccaacttaattgtacttggagcccaaaattgactcgccgtgtctatctaaaaaatacaaaaaaaaaatcgacaaaattataaaacaacaaaaaaattgacaaaacaacaaaaaactacctaaaatacacacatccaactttgttcctcgcgtttctctctgataaaagggtttggtttttctttttgctttaataaagttattcgaattaatccgtcataatcgtttgtttcttccttgttttcgttttcttctctaccaacattttcacactttaagaaaataaaagaaaatggcgcaggcagttgctgctgttgctcccgcaccaaatgctaacgcagcctcggctcacacaacccaaccgcaggttatggcaccatcttatccgttggcttctctctatgtcggcgatcttcatccggatgtgagaaatcaaattaaaattttttttttcaaacaccgattaatttttttggtattgccaggtcactgaggccatgctctttgagcggttcagcaatgctggtcctgtgctctccattcgtgtttgtcgtgatgcaattactcgtcgttcgcttggctatgcctatgtgaattttcaacaaccggcggatggtaagttaacacatttggactgcgtttttttaaataattttttttgcttccatcataagccccttattctgttaagctgaacgtgctttggacaccatgaactttgacatgatcctgaacaagccaattcgcattatgtggtcgcaacgtgatccaagcattcgtcgctcgggtgctgggaacattttcatcaaaaacttgggcaaggaaatcgacacgaaggccatctacgacactttttccatgtttggaagcattctgagctgcaggtgtgtttgcttaacttcaaacaatttcgtctttattgtccacaacaacttttgtagattgccactgacattgagggaggaagcaaagggtatgggttcatccattttgagactgaggaagcggcgaacagtgcaattgcgaaagtgaacgggatgcttttggatgggaagaaagtgtaaggatgatccccacctaaaattgtttttgtgctattaaatttatcccatcttttttgctgtaggtttgttggaaaatttgtgccacgcactgctcgtgagaagcaaattggtgacccgtccagtcgtttcaccaatgtttatgtgaaaaattttggcgaggcaatggattcggagaagctgagcgaagtgttctcacagtatggcgaaatcatcagtgcaaaagtgatggaggatgacagcggcaagtccaaggggttcggctttgtcgcctacaaggaccataaaagtgctgcgagggcggtggagaagatgaacgaggtttcggtgccaggcagtgagaaggtcgagcaaaagtttacggtgtgccgtgcgcagaagaagagcgagcgccaggctgagctgaagcgtcgttacgagcagtacaaagctgagcgcatccagcgttatcagggagtcaatctgtacggattttgtttggttggggggaatttttctcaaattttaggattttgttagtttggggggggagtttttctcaaattttccatggataacttttgtttattatattaatgtgccattttttgtgtaaaactgttcggaaagctctccactaattaaaaaaataatggaatccataaaggtatactaccaaattgtttactgaactggagattttaaggtacgtcatgaacctgcacgataccatccaatgatgagacactttcgaataaattttgaa

SEQ ID NO: 10621 - DNA, 825 bp, Heterodera glycines
gagcagttcaaagctgagcgcatccagcgttatcagggagtcaatctgtacgaatttgtttggttgggggggggggggagtttttctcaaattttccatggataactttgtttattatattaatgtgccattttttgtgtaaaactgttcggaaagctctccactaattaaaaaaataatgcaatccataaaggcatacgaaattgtttactgaactggagattttaaggtacgtcaagaacctgcacgataccatcaatgatgagacacttcgaagcaattttgaatcctacgttacttcacaagtgcaaaggtttgtcttcaacggattattggtatttgctataaagcggtgcttgaccagataccaaaacgaattttgcggaatcctaatccagcgaaagccgactttttttttgatttgggcattaattacaaacccggaccggcaaaaatttatgaaatccaactacacattttggctcgcaattttgattttccaatttctattttattattttccaggttatgtgtgatgagcatggtcgctccaaaggattcggttttgtgtgctttgaaaaggcggatgaagcaaccaaggctgttgtggaaatgaacaacaaaatcatcgaaaacaagccgctttacgtcgcgcttgcgcaacgtaaggaagaccgcaaagctcaactggcctcgcagtacatgcagcgcttagtgagtcacgaaaatggaatttggttgaacattgtcttcgaaaatccacaatgttaggcagtagtagggttaagcccctttcccacccattttttcgaaaaaataacccta

SEQ ID NO: 10622 - DNA, 1799 bp, Heterodera glycines
atgaaagtgcaaataaagggagaccgctgttttttaatgaaaagagcaaaataaagcaataaagataaattcgtgtgtgtaatctgtttgaccaatcgtaaaatttttcgttctctaggtggagcgaattccctttttgtgttcgatcttttacgattggtcaatcagatttcattacaatatcaaaattgaaaatcatttttattaaagacgaacgaataaatttttaaggagaaaataatgaattttccaaatcgacttcattgacatcttcaacaatttcagtcggcgacggttgaggagccgtcggtgttgtaatggtcgcgtagtcagacttaaagggtcaaaaaagtaataaagcattggaaattcgaatttaagaattatttgggaaaagtttaggcgatttctagaattatttaaagaaaacaaactaagaaaaaaaacttttttgtaagttttgcacaattttcctattcattaaatttcaaaaatttcccggcggctgctatcagcacagccgggttactgcccccaggggaagggttgtctgttaatttggtggatttcaaaaaaattcagcaatcttttttagaaacaattaataaatatatttatttatttcatctattagcacctttccatcctctcaactgaattttcgctcccgttttgttgctggaccgtctcgtcttcttgtgaaggtgctgatgcggtggacttttgctgcttttcctccacaattccgctttccatttgctcgctgaatatgttttaaattttttacaatgtttctcccattttcggccgattgaaaaatgtgcctttccacccgttttgactttcccataacattcattgttagttagaccaacaagactatcaaccccaagacctatccgcactcgaaattttaaagagaaatagcagctaaaaatctcggtttttttgttgttgttgatacccctccacatccaatctcacaaaaattccaaaaaataacgcgaaatttttgcgaacgcccataaaatagcaatttttggtgaaaatcgattaacgatatgtcgaaaaattctatcggcaccgctgctcatttttttaaaaacaccgcaaacaattgattagcaatttttagtgcaagtgcactttttgttgccgctgacctctcttaaggggacgggggcggagaggggtcaattaccaatacaacaacagttgaaaaaagcaaatgttagttacatatccccccacatcgttttcgttcttgcattgattacctcctatcctcgggtccgctcagtgcgtcgtccggagaaacaacagggtctttttcagcgtggccaggatacttaaaaaaaggaaaaagcttatttgttttgaaaatgagagcgatggtgcatttcataataaaaaattgattttttatataaatcgtgtaaacatattaggttttgagggtcgctgattatggatctgactcattttcggccaaattcgagtttaaattttcattcaatggaattaaagacaattttgggtttcactttttgtttgaaatcggcttcaggactgggaacgagtccaaatgccccagtaggcgatattaaaaaaaagcaaaaaatttggttttttttaattcccagcaaaataatttggtttacttcgtttttaggccaaacaatttatttttttgtctaaaaaaattgttatttacttttggtcccgctttgtcctttccctttttttcgctgccactcgcattctttgatggtttctttttgtctgaaaacccaagaaaa

SEQ ID NO: 10623 - DNA, 1756 bp, Heterodera glycines
  unsure (1)..(1756): unsure at all n locations
agccattacaacaagtggtccgagaattgaacaagaccaattacaaagcgtatgaattcaatcaccaaattactcaattcacagcaattaccatttcagtgttgtaaagttggcaactttggccggtcgggaacagctttgcatcaacgaaaaggtcatggaggagaagaacaccgagattcgagggcacatgtgccgaacattggtcaaatcgcgcaagtgcaattaccactggcaattggacggtgcgttttttctgtttgttaatttcagtttgttcatatgaactcttttcatttgtcagcggatgatctgcttattgacgcgatgtacaaagcagaaacggacggaaacgcaatggacattgaggatttgatgaacgcggcgcgcaaatttcggtttaaaatgcatttttttaaatgtattaaattcaattctttttagccactgtcctttttaccgggctcgtcaaatgtacgactcggctgaccttatcctgctgccctacaattatcttcttgacccaaaaattcgcaaaatccattcgattaaagtaaattccattttttttctttttttatattttctttcgtttccatttttaggtaaaaggcaacattttgatttttgatgaagcgcataatatggtgaaagcggcagaacaaaccccaaattctataaaatttattatttgttaggaatcaattgcagaagagtcgatgtctgttgatttctccaccaaatcattaagtgttgcaattcgggaggccaaacatgttttggaaatggttgtggacgaggaggaaaatttgcgtgacgaaatggtcaccaaaagtgttgatagtttggccattccgttgtttattttaggaaagaaatggcatttcattcgccgaattgaccaaaaaggagaaaggcaaaggccaaaaggacgacgatgaggaggaacagcagcaattgaagaagaatgacgtggcccatttgctaagtgatcgaaagagtcggcactttcccttcttttaatgccttccgtcgattaagcgcttctccacaacttcgaggagcaaatcgatgctttggtggcggcgggcggaggcgccgtcatcgacagagtgccgggccgagtctattcgggttttttcggatttgaaattgcaatggaaatttatgttttctcaggtgaaaaaatggttgaactgatgaagaagtcacagataatgcgtgttcatcgggatagaatttgcgctttgatcgataaaattggtctttttctcgccggacatggtgacacttcagaagtgaccaaaagaattaattaatattgaataaatttagccgaaagaaactttggcgtttggcccgtcaaaggctctgcacttggtgaattcgcttctttggtttctgtagtttttgaggagagcgatgaaggcactgacttcaattattgaaatgaattaatgcattttttaatggaaattgttaaattattgtacacatttttgtttatttttgcagatgcctctcgtcattttcaactttttgttgagcaaaaggaaaacattttggacccgcgagaacagcacaaagaactgatggaagttggggaaaatggaattgaaagcgcaaaacccgtaacggaagtgaaactcaattattgtacgagaaaaaatgngggcgggggggggggacaaccgcaaaatcaaaaccaatttgaggtgtttcaacgctggcgtagcaatgaatacctgcaggtact

SEQ ID NO: 10624 - DNA, 3421 bp, Heterodera glycines
tactggtggctctgctgttttccttaattatgatatgaatagaaacgtggcactcggtccatcgttctcgcctccggcactttggccccgttgccaatgttcaaacagtgcaatgggaaatgttcgtcttttctgtccattgctttccattagcgtcttttcagtgcgttcggcttcaccttggaatctccgcactgcgctcgttcggatcaagctgatcgttgccgctttgaaatagggggcccaccggcgtggaagttggccggcacttttcagaacaggcacttcccctccattaatatttcatcctccgctgtactttaattgtttaaaccgcgtttctttaggcatactcttaaggaacagtttcgcctacaaactttcggttggcgagtcggttttgctcacggcgaagagcacgccccagggaatgttggccttctttccctcctactctcaaatgggcaccgttttggaccattggaaggtcccttcaattaattttttgtccatttagcttttgctcctttcagatgtgtcgctctgccaatggccaatacctttgggatcaactcgaacggcaaaagcgtctcctcgtggagccgaaagacaaaagagaagtgcccgcattgttcagagagttcgatgccgccgtgcgcgaaaatcggccgtcggttggaaaaagtggcggtgcacttctgttcgctgtttgccgtggaaaagttcgccgcccttttctctgctggtcctttgacctatatttcagctgagtgagggcattgacttctccgactcgcactgtcgtgccgttgtcatcgttggcattccctttccgcccctttacgagccacggatcattctgaagaaggcgtgtttgacggaacagcgcaggaaaggccgaaatgtatatagagtatttcattggaaaataataattgggtttcttttccgctttcagtcgcttaatgcggacgaatggtaccgaattgagggcatcagagcggtcaaccaggcactggggcggatcattcggcacaaggaggcgagagtcttgagcactaacagcaaaagggtataactagtcccttttacccaatcccttttaggactttggagtcgttgtattggctgattcgaggtcacttccgcattcgttgattaattgagggcattttcgagtgtttaggtatgccaacctcaatcggcagatgttcccgtgttggatccgaaattccatcaaggagctgtcaaatacggctgcttttggacaaattgttgtccgtttcttctcagaacgtggcattctcatccaaaaatcgcacgacgcaatggttcaacaacagcagcagcaaaatgaacggaaacgacggagaacagaacagacgacggaccaacaccaaagacagcacccttcacttggggggacactccgaaacggaaagtcccaactgaatttggcactgctggacggaatttctgatctttacacgattgacgacggattgtcgacgccgtcgacctcacaaaatgcaaacggaagggaaaaggacgaagacgaggagaatgatgacattcaggcaagaaggagtgaaccaccgattatcaccgaatttggacaaacttatattttcaattttgcaggtaatatgcgttcagaaaccaatggacaacaaatcgagcagaacgccaaacccaccaacgatgaaaatactgcccgaaattcaatttgtcggacagcaattaaatggggtcaaacgggaacaacagcagcggcgaacgatggacagagaggacgaattgcgactgactttaagtgagaagtccaaatggaagagggcgaaactgcgcatggccgagctgaacccggcatattttgaggaaattggcgagcattgaagaagcaacgggcagcagtgaaacgggcaccaattaacacacacttaccggatgacctttttattgttcatttttactagtggaaaattaaaaaatgaaattcaattgggactttgtgctgtctgtcctttcgaaagggcttttccgtctttttggcatttgccttcctccagcagcaatgaattcgaattcaaagcgcccattgtcacagttggccggccacccattcgcttttgctcgtggacatttgccatggatttgttgggcccccgcccctttcccatcgctcgtcaaattcgctgctctctccgtttctccggcagcatggcacaccttttcctctaattccttggttttttacccttgctataacattacgaagggactggggaggaggaggggttgatggatgggaaggaaagataaccaaccgcaaaaccaatgaattggtcccccccccaggggcaaaagacccatcggccgattcatttcctttccattgttttgattaatttgtaataataattaacggttttattaaacttccaattcaaaaataataatttaatcgacaattttccccgcaaatggccgaagagaatacaaatcaatcggaagtgcgttttgccttcttttttatgttatcagtccaatggcattgcctttgaagggactcgacttctttctgaaccgaagcggatggacagatgcccaattggaggaagtcattcggcttttgtacggcaaaaggctccagtgagtgcccttccttcccttcgctttttccgttggcattttgtgccattttttttgaaatggtcggcccattctttcacaaaatcagacaactttcgattgcccagcgtttcttggactcggcgcaagaagcaaattttgagctgaaaggttttcaaatggtggcgcaggaggagcagtgccgaaggccgaagaaaatgcgcgtggcggccatccaaaacaaaattgtgttgtcgacgagtgcgccggtgcaagcgcaaagggacgcactgcaccaaagagtggcaattaattaattaactaattagggcttaattagggtattaatgaactgtggagggagagagagagttttgatcatttaataaaaggtcggcaaaatgatcgacgcggcggcacgagcgggtgcccaaattgtttgcctgcaggaggcgtggagttcgtttattatttttaaaaaatgtttaattattggccatttgaattgcctttgttttagcgatgcctttcgctttttgcacccgcgaaagattaccatggtaagagaaagaaagaaagggaaaagaattgaatatttctcatcaaaaggacggaatttggagaatcagccgaggacggagcgaccacaaaattcttaagcgaagtgagaaaatgaagaaaaaattaattaatttaattaaaaataatttaattaaatttaatttaactcttttttagttggcaaaccgtgagggcgttgtgatcatttcgccaatttggagcgtgacat

SEQ ID NO: 10625 - DNA, 2433 bp, Heterodera glycines
  unsure (1)..(2433): unsure at all n locations
gcactatgcggtcaagcccagtgtcagacaaaattgctcataacgccaaatagcgcatttggcgtaaattattgcgcgctatttcaaaatttacactggaaaatgccttttttgtattttttattttgatctgccataactcgcttcatacccaattaaactgaacaaatttggtatctaaaaaaagtttttgaaaaggagaatctttttctaagcgaatgctaagcaatttgacatatcagaaaaaagttgtgggaatttcaaacttttatcatgttataacgcaagtcctaggcagctctttctaaccaaaatgctaaatttattcttttttttaattgattctaaatgttcaaagtgattttgtaaccttataaccaaaattattataattttcgaatttatgttttttcatgtgttagagacatgaaaatagtacgccaaaacgagagaaaaagtaatgcattttcatgttttatatatatctcatgaaaaagtgtataaaacataaaatggctgtattacattatgcagaatttctttctctatcgctatgtaaaatttggtatagatttaacatgcagaaaaaaagttaaacatcacgaagtgaatgttgttttttacataattaaaatgaagagatagtacgccaaagtgagacaaattacaaagaaaaagagaaacgacgagatagtactaggcttttctctgcacagtggagttgacccatagtgtattgacacatgtctcgttttttgactcggtgtgttaacaacgcccaaaaaaactaagcccaaattcttggtgtcatttttaaccatttgtaatggatcaaaaaaaaataagttagaacccaaaaactcggcctggtgcgaaaacgaatgcggactccgaccgaatgttcaaaccaaaaagtttatgtttttttggcgttcttgttttttaataaaaataaacatttgcattggcactgggaacccaaaattaacttgctgtttgttttaaatgttctgaaattaattttatgatgtgtggtgtaattgttttgtattcttgggtttttatggagttctaattttaaatccgtgctgaaaacgtattatttcgctagatggttttatattagttttgaaaatgtagtgtccaatttattagcatttatttagctcgataaaattctaactcagttagacatggaccgtaatttgaagaggaatgaagacagtgcgattagaaatgagcaacggataaaggctaactttcaacttgcacaattagtggtctgtttgttttttttatttccttaaaaagcttacttttgtttagcctgatgttccgttaagagaggacgaacatttgttggaacacagctacgtattttcgtattttatgcgaccgcagggaaaattcgaccccgaagattatgcgatgttagtagtgagtgaatggttgaaagcaaacaccgtcagagggaattagagaatttgttgggttgggggaaaagcgggggaggaggaaggacagtcattgcttaaatctaaataacttcaggtacgtgcaaccagtctcaaagatcagttcagtcgaacagttttggcaagtgtaccgattcatcaaaaggccttccggtttgtttatttattcagggaagagcacgcgcttgtaccttttgtgctgtacttattcggacttcctttctctctattttagatatagcggaaaaggtcgacttccatttgttcaaagagggagttaagccaggtcaaaccattcgattcgtctcttttgtctctatgattttttggttttcagtttgggaggacccatcgaatagaaacggagggaaatggattctcaggtaagctacaaaatgccgtagcttgaattgtatgccactcagtttttcgtcccgcttaactgcttatagattgaagaaagggctttcctctcgcatttgggagaatcttctgctcgccatgattggtgagttacaatcaccccattaacgcttcatgactttttactgccaaaaagtggaaaattgaatttttaaaatttttggcataattttctgaaaacaaatgaaacggaaattttactgcctataaaaaacttagatatttttgaatgcttgaagttattaagcattttatggtcttgtgaatttttatgatcgtgcaagctgcaatagatccgtaatttttttgagttgcgcttttctttttttgaggcgaacaatttctcgtcggtgacgaagttgttggcgcggtctgcagcgttaggaaccaggaagagtgtgtttaatgggaaaagcaaaggaaaagcaatttttctttggtttagcattgtgtcgctaaggaatcgaccgnccgattctcncccggtgccactttaaaggcgcactttgcggagagtgctcaatttgccaacaaa

SEQ ID NO: 10626 - DNA, 1178 bp, Heterodera glycines
  unsure (1)..(1178): unsure at all n locations
atccaacgcagaattaaagtacaggctatagggaagctattcccgaaggattcggtctccccataaatctgggcgcatcggttcggggggactgccccgaaaacaaaaaaatcgattttttcaagtgtccgtttggggtactcaaacaattatggggagcaaaaatccaacgcagaattaaagtacagactatagggaagctattcccgaaggattcggtctccccataaatctgggcgcatcggttcggggggactgccccgaaaacaaaaaaatcgattttttcaagtgtccgtttggggtactcaaacaattatggggagcaaaaatccaacgcagaagtaaagtacccacaagtaccgnaaaacgcatctctacgaaaacattcgtacaaaaggggtgtcccacaattggacggcaccctctatcttgtttcctcaagaatttacacattatttcaattttttagtttttaatcttacacttttgctccgtcttaagacgattgtctgcgtgaccagcgttcctactgccacaccagcgccagcgttgggcagcaaacgcatgcgcactatcagaaccatcaccaccacccgcagcagcaaatgggcggcgggaggggaggggtgaagtgaaggaaaggcgaaagacaccgcaaaagtccgtcagtgttccgaatattgcaaatgtttctcgttgttcaaatatctatcaattgcttgggcaatggtaaagttttgtggtttcttcgaaaaataaaattaaaaattttggaagtgccttttctaggctaaaaaatacgctgatcacgaatctgagctcggattttgcaaaatcattgattttatcaatgattatcatcaagtacttgactttttcaaaaaattttaagaaaattaatcgggcgtaaaaaaactcatacacagatgttgtagagaacaaaaagagctttcgaataagctattgaaggtctggagaagtcaagtatttaattttctatggttttttgaaatttagttattaattagttgttgtcatatgagacggggtccggggttcgggtccgcttggccgcggcttattttttatgatatttgatgaaaaatcatagacaaaaacattgatttcgcatgatcggagctcggattctttttcaacgcattttttaacccctaatt

SEQ ID NO: 10627 - DNA, 1717 bp, Heterodera glycines
gtgtaattttccctttcccatgctttgggcgcaacagaagcgtcaccttattatccgcaaacaaaatcaataagtaatttcacactttgcagttttgtccttttttagctgatattttctaaattggttgtttgttatttgttagttccatttttgctaaaacaaaacaaagaatggcctcccaagtcgaccgcgtgttaatttatgggggccgtggggcgttgggcacggctttggtggagcatttccattcgaaaaacattgtgggttctaaacagccgaaccaattcaaagaattcattcattgggcaatgcttttggtctgtccctccattcagtgggttattagcgtggacttggccagcaatgaaatggcatctcacaacattttggtggaccccctccagggagtgcaagagcaggagcattctgtgctcgcggggttcgttttgctattctctgtgtatgtttctcggagttgggcttttgcagcgtcgatggtgcgctcggtggagaaaagctcgacgctgtgctttgtgtggccgggggatgggccgggggaaacgcggcgcacaaagactttgtgaagaatgctgatttggtgggcctcaatgtttcaattccgaaaatggcatttcctattggcagatgtggcgtcaaagtgtgtggagttcggcattagccggttagaaaaagcggcaacggggggcgggggggggtcattttttaaattaattttttaataaaaaacaatttaatttatgaaaaacgctttttgaaataaaaggcatttcaaaacattatctagctgggttgtctgtcctcaaccgaattgtcccattggctgggctttaaaatatcaaatgcttaattttttatcaaaaggaattggattgaaaagccgaattttgtgcctgagtttgtattcttgtgattagttaaagttgacctcatctgccaataatgaggcccttttagccaaaatcggcactcgctttctcaaaaccaacggccttttgcaatttaccggcgctgcggcagtcggtgacttttttgtgtcatttttaacggttttcttcaggcttctgactcgaccccgggaatgattggctacggaatggcaaagggtcggtcgatcaactgacaaatgagcattccttgatttggatgtttcattttaagcggccgtccatcaattggtccgaagtttggcggatgcaaaggctgcggggcttcccgaggggacgtgctctttcgctttgttgcccgtcactctcgacactccgatgaaccgaaaatggatgccaaaggccgaccattcctcgtgatcacttcgttttacagtgccggaaattgtatttttactcaggtggacgccacttccttttgttgccgaaacactcttcaaatggacctttgaagcaccttcgggagaacggcccaagtcgggatcgctggttaagctaagcaccaaagagggcacaacgaaaacggaggagcaatgaaagagggaggacaaaagggaagaggaggaggaaagggacgaacggaagggaaaacgaacgaagagaggaagaaagctaaaatgataaagagacgacggatggaagtgggggggggggggagaagaagttttggcattatacccaattcattttataatgattttattgaaattgcaaaagttaaattgaatcaattaatgtgaaagagttct

SEQ ID NO: 10628 - DNA, 3739 bp, Heterodera glycines
agaatcagcatgaagaaacgcagaaagacaaaactgctcggatggcgaggacaaattaaaacttcatccaaaaggtgaaagggaaatggggggggggggagaaagtgttgatttgcacgggaaagggacaaatagacacaaaatgaccgctggaagataacgaagtgtgaaaagaaaatgagaattcgagaggcaattttaacgtcgtacaatcatttcatggaatggaatgaaattatgcgatgaagagaatatacagattagcgaatgtcagcagaagaatgccaccggaagtgaaaggggacgaggggaatgagtgacggatcaaagggaaaagggagaaaaggggtaaaggaggaggaagaggaagagacggaggggagagcgtgcatagatggaattttttacttattgctaagcataaacattataatgatgtaagaaagaaattttatattgaaaaattaattaataaaatgatatataatatgaagtatacatatatacttatcattatttttacattttaataaatgaattaaacttatttattaataaattatattttacaataattaactactaatattttattaagtacattttgttaaaaatttcaagttaaaatgttctttgattgcattatacactacaaaagtaaaatattaataggaatttcctagaaatatacaataaaaacaagtaaaaatattgtaaatagtgaggatatcatacaatgctaaacggtgcacggttaaaataccttttatgccgtgctgagcggcgaaatagcctttattggatagaggttctgaacaactcctttaaattaactgaataataaataaagtaaaataaaattcaaattaattcaaataaaaagtaaaataaaaataaaaaagattaaaattaaaaataaaataaatgttaaataaaaataaaataaaaaaattaaattaaagttgtattaaaatataataaaaataataaatacaatagtattgattaaaattaagtaaattatatctaaaattaaattcaatttatggtgttactgacaataaatagtaaaacttttctcctcaatttatttaatatccccatccactaaaaacaaccacataaatcttttaaatataatgaagggtctaggtacaaattctaccacaactatcttctcaactggaaaatttgtatttacagaggcaattaatgagaaaaaaatgtaatgacattgaaaattttaatgacagcgctggtatcgtttaggagggaattatttgatgtctcaaaggaactaaggcattattaagggaaggcagcgtcttttagtacccattgatgtactaaaggaatgtatgactagtatacggcctgtatgcgatatttctagatcaataacttttcaactgaacacttggcaaattgatcattattctgtggatgaatagttggaaacagagagaactgcaatagaagtaagcggatatgtttagcatgcctgcaattagcgctacctagaagatgtatattaatgtctaattgaaaaaaataactgataaagtgcgggagaggaatgtaaaacgttatgaatttatacgaagtcaagttgtccatccagttgtaagtgtattaggctacgagatcgctaaaatgttaatgagcaacaaataaatgagcggatttgaagacggaatgaaaaaatttctatgtgacttcatttctctctacccctttgttaattttactacacactactcgattggtaaaccaatgtacataagtcgagttaaatacccggaagataaacactaccccttgacaatactcaaagttttggatgatttctttagaaaattcgatattctgttttgcccgtcaaagtggacgacaggctctgattctctttatgtatgaagtgcaccaaaaaccatccaaaaggcaggatagacgtaaatacatatgcaaacataatgacaaacaatgagatggctgagcaatctgcatttcaatcgaaattaatgttactacggttgaagaaggttacccatttaccaattgatactgacataaaaggaaatggtgagaaggaagctgaatttgtaagagagtgcaaagagaaattagagatcttaacccaataaagatagctgtgaaccaagaagagtaggattgttaaactatgcttgaacaatttgtgcgacatatttctttacgaaattacagactttaacagactttacttcaataatgatgtacttgattttggagaatatttgggataatcgttcaatagacgtaatggccatcgaggattgaaaggtgtatcatgttttgatcacctacgaaaataaaaaaagtgggtaataaaactattcagaaatgatgatatagccggggcgttaagtactctccaccgacacggatagtcttgttttctcacatctacgcgatgctttttagctgaataagatcgacaaaacagttcattgatggaaatcgtagaattctggtgcaaaatagtatgcgttggctttaagacgtataaatgttctacatgatgcggaaatggaatacgtgcttaaactccgtggattgacactcaattatgatgtgatcaacaaccaaggctttagatataaaaacaacaagtcaaacgttatgctcaaacaggagagattgaaccaattaatgtaatatacccaaactttattagacccaatattctaatatcaagctctatgcaaaaatgttatcacccatatgttgggaagggtattgtaggagccgattataatgttctcaattttggacacactttgtaattgctcacccattataatgtcttttcaccattcattgtaattgttcacacattgtaataccttcttcaccaatctttgtatctctcacacatacacatatgtacccttttgtattttgttcaccatttattgtatctctcttccacacgcataaacatataccccatacacacacgtacacatacatggacccttttatttctctattttataccaaaaattgtattattttatcgttttattcacgtttttaataaaaatgtatgcagaattaagcaatggaagatacaatttgtaaattattaagcatttgggaacgtcgtttttaggtagaaatatgcagaattaagagaaagaagttacaatttgtaaattattaaggagttgaagatacattttgattatgtgcacgaacttgtcgtttttaggtagaaaaatgcataattaaacacattaacatgtatgcagaattaagcaacggaagacacaatttgaaaattattaaacatttgggaacgtcatttttaggtagaaatatgcagaattaagagaaagaagttacaatttgtaaattattaaggaatagaagatagaattttattgagtgaacgaaattgttctttttaggtagaaaagtacataaataatgaagtgaaaatgcattcataattaaacaattgaagatacaatttgaaaataattaagcactcaggaatgtcatttttgggtagaaaaatgcataattaagagaaagaagtacaatttgtgaaatattaaagaatttacgatgcaattttaagaaaatttatgaaaataacgaatatatggagaaattacttaaaaaatgtttacatatattagtgtgcgtgtgcgtgtacatacatgtacttgtgtgtgcgtgtctatgcgtgtgc

SEQ ID NO: 10629 - DNA, 2014 bp, Heterodera glycines
  unsure (1)..(2014): unsure at all n locations
tttaaatcgttttttttgtattcaaaaaaaagttttttcttttatttattttttataacaaaaataaagnaaaatatcgctcctaaattagctancatcgaatggaaaataaacaaacaaaaggttttcgtgtgtaaatgacagttgagattgaattaggcatatgaaaaacaatgtaaatgtgggtgaagtgattaaacattgtgttatactaagtacattaaattgtactaattttcttatgtatttttggagtggctaaatttttattaataattataattctaattacttgtaatgccgtagaaatgccgtaaaataggtgtttaaaatgtcttaaaattaacaaaatttaaaaaaaaagagccagtatttttttttatgaagcaacagtttatatatagtattgacttaatagcatttctaggctaaactgatgcaaaggcagcgatcagaattccatgaaaatttatacaaataaaattgtatgtttggctgaagaaattgcatagatgtgggtaaattttttaatatagggaaaattatctttttttaaataatttcattttttagttaaattttacgcctgtgcattaaacatttacgaccgtacagaatgaattttgctgaccgccttcaagttgtgaggtcgatccaccgctcacgaacagtcgcgtgctgctggcattgttggaactgatgccaatgccgccatagtcgccactaaccgaaaaggtgcccgagtcgagcagcgacgcttgagacaagttgcgcgagcaactgcttggtgttgtggtcgaatcgccagtgcctgcgccgccacaaccaatgttttgcgaaaaacgtcgatttttgccagctgcgataaaaaattattaactaataattttttaattagaaaattatatatttaaattctattgaagagtcacttttattgtcttaataataatttctcacctttatttccatatttttcagttgcttctttcaatgccaaataaacgggatcgatgtttgactcggactcttaaaacttattgtataatattgttaattttatatataatattatttttttagtttttagtattcattaggaataatttttgggttgtaaaaattgtcattagtagagtagaacgggacctggactgagtcgggaattctggtcccgactttggtgtcccggcaagtcccggtcccgctctacttttgtttatttgtttggtaattttacgagattaaagttcaatattatgaattcttttgaattgtaatgcgttttttttataaaaaaatcgaaaattattcaaaaggttatgaaatgtatggaagtcttaaatatgataatattataattatacttttttatttgtcaaaaaggccgaaaaaagcatatgaaaactttcttaaaattttttaaaacccacaaaacaaatattaaaaagtgttgatgcctcaaattgtcaaaaaaaaaactttcaatataatcaagggcaacaaacgaataggcatattgcatgggattgatacacctaaattatccatccaccgattaatcccaccttgctcatgtgcttcatcataatttcggccaccactgtttggcaccgattcactggagcccgaaaatgaggacgaagcggtacggcttttgcccgtttcagcaccgttcatattcccagtggcaccatctgctggccgttgattgttggaatgctttaaaaaatggacatgataatatgtattcattaattcttatcaagcttaacaaaatcataacaacgattcgtacaataaaaaaaaaccattttattgaaaatcaatttaaattttattatttccgtcagccttttttatattaaaaaatgaaattttcgtccattatttttcttgggactaattgcctttggaaaaaaaataaatttattgggttttcaacttttttgtacgagttgctttgtttaaatgaaaatgctctcatttctaaaaactttattgttaaaaattt

SEQ ID NO: 10630 - DNA, 2339 bp, Heterodera glycines
atggtcgtactttatactttatgagcatatatttattttcaaaaaaacttacaatttccaaattttgcatgcttatttttcgcattaatttcatttcttatatgttttaattagcctcctccccccgctattattacatttaatgatggtgatgtgctgtaaaatgatggtccggcactcgtttttcgcataacaatgcccgactgggttgtcgactgtaaacatgtaagtaacactgcttactgtatatatatatatatatatatggtagaaaaaaattatatttaaaaaaaataatgttgaattttggaatttttcttcacacaatatgccaaaaaacaaaattttatgccaaaaaattctttttttttttaaaaaaccccgacaggctgtggctctgaacgcttttgtagcggttgcaatgggaacgtctgcagcgagtgttggcgcagtcgacagccggtccgagcagtaacaggacgacgattctgctgctgctggagcatccccatggcacacgaagcggtgacagtaccgcgcagcgaagcgatggccggcacaattgctgagggcaacgtgcgtgccaagcgcgaaagtgtcactgcgggttgcgatggcatgtgccgaggactgttgccgacgctaccatatgtgccgctaccgccaccgtcatcattattactacggtatttgtccgacgtcttgcgcgagttgggctgactactgtaatagtaccgttgttgtcgctgttgttttacagtatcaacaccgctaccaacaccaccatcttgctgcagctttgcactacgatcgccactaccatttttgtccaaaaatagtcggtggaccggctggcacaagatggaagaatggcgtccaaccggtttgtatgccgacgaatcgtcatcatctatcaattgatcaagaacagttcgatgatggcgcagcgaattttgtgtcgtcggctggcatctgtcgacatgccaatttgatagatggccaatgctggcacgccttcgtgcacttttcataatttgtttagccgaatggattgttgaaattttatagttgaaataaattatttatcctaaaatagtttttaaaataataaaacattctatggtaatagacagggccataaaaagtaattacctataatttatttaaatagcatttattttaatttgaataaagaaaatttttcataaaatataagatctcaagtttattattaaaatgaaataattatttttaaatgaattaatactggaataattttcaaaaaaaaacatatataaaaaaattctcaaatgaaaaatataaaaaattttccatttttaatacaattttttgcagaatttctatttttgttgcaaaaaattctcagtgtcatgccaataaggctagggacaaataaggcaggccaaattgtgtaatttgtggcctatgaaatgcattcattggcctttctcggggcgggagattaaccgccgggccatcattttcagtaagtcagtcagtcatcagcttaggcatatccaatttcttctcttctgccccgcttttcggggcaatgtttttgggttcccccacaaattctcagtttcaaatttggcaaatttatttattaagaaatcaaaaatctatttttggtttaagttaaaaaaattaagaaaaaaataattcttttcaaaaattgttacaaaaataataataattaaaatagcaataaaaaaagcaaaaaaatatagacaagttaatatgttaaatattttattacaaataaacaaaactagtaaatcacttaaaaaattattttaattaataaaattaattttgatttaagtggaaacatttaattttaaaatattattatcataaaattgtgttgttataaaaatgggaaatgaatttttaaaattttttggttgttttatatctaaataataaaaaaatttaattaatatttctttattagaagtgcaaacattaaaaaagtttttaaatacatatttataataaagcatgaaaattggcaataaaatttacattgaaaatgccaattcgtaaatttaattttgtaatatgtcacggaaagcaaattaaattgcgccaatttagcatttataataattgagtgcgtgagaattaattaattttttaaacaagaaaaattatttaaaaaatgcttaattgtaagatattaaaatgattttaaagatctcggtttttaaaataaataaaaattactattttttaaatatgaaatttaaagtaaaaaccccttaattttttttcgaaaaaaatcttcgattatcattttgtattcccgtgtaaaa

SEQ ID NO: 10631 - DNA, 1193 bp, Heterodera glycines
cacttgacctggcacattcggcatcatgatctcgttgacttcatcacacgtgtcaatgtgcggagcgagaatcaaacgattgagcagctccttgtcattgccaaggagttgttggaagttaggatagacataatctatcagctcttccttgctcttaacgaggaactgcggaggaatccagaagtgctctccggtttctccgagcccgatttggcggcacatttgcaagtacgcttgctgaccttggcccagtctctggttgatggtcaatttcatcgtggtgaattgaccaaacaacacttccccccccccccctcaatctgctgaataaattggtaaatcgaagtttcgctgcaaaatgtccgtcccttcgccgcctttcccttctctttccaattccattttgtttaccctcaccaaatacaccaaagggaagggccggggggaccaccttattaaggggctgctgttgctgatagtgcgccattttatcattggccgtccctttgggcccatttgcctctgccgggtaaaacaattttgagaacagctcaaagagaaagtcgccgtacaaatgacggcgtgtcacaaagaaggagagcattgctgggcagtttcgatgagaaatgttagtgtattagtagattaagctaaacgaaactcattaaatttgtcccttttcaaagcagcccttcgccggaagtgccattttttgtgccactttttctgctctgttaataatttgcgttgtttcaaaaatgaaagtgttgtgttgcgcatgacagcaaatgaatgaatcgatcaaatcaaaacgaattcatttcccgcacatttagaagaaacgcacagagaaaaggaccaaagggagggaaaaggcaggaaaaataattgggcaattgcaattattgaaattattaacttttatcatcagaaacaatcaaattaaacaatgtttttcattgaaattataatatgatataaattggaatgtaaagggaatgaatgttttctgctgaacccgaattggcagcatttcgtgccaaaagcgacccgaatatttaattcacagaatatgaataacgccgaagcactgacttggttcggattggatcattcaattaataagaacattagaattgatgaaaaaacaacgaaggatggaaatggaaatggaacggggggggggggggggg

SEQ ID NO: 10632 - DNA, 1255 bp, Heterodera glycines
gtctttcaaaatgggatttgaaacaaaaataataaagaaaatgaatacatttgattttttattcataaattgcagttaaataaacacagcgttttaattattttggcctcccctcccagtcaggggtctgtaaactcgcttaaatacgagtccaacatttggcgatgatggaacgcgttttgtcgctagttttttaatagggtgtgccttaaaacggaaaagtcccataaattcaattaaactccattaattataaatgtttcaattgtatattttgacgagttcatttgaagtggcgggaagcgaagtgatcggacaacagtgctcaattcggacctgaaaagagtcagttccgactattgtttgtcagcaaacaaaataaatcgtacgaagttgaaaatgcaggaatggcaaaacacgtagccggaaacggtgagaacggtgtcatttttgcggatccgacgacaaattgggcatttgtccacttccatgcaaagagtttgctgttcagtcggtaaattctaaacgaaagtcaaacaaagtcaggcggaaaagcattccgaattcgcaaaacattggccaagtgatagcgtacgttgaacggatgcgtcggaattcgaatattccgacgcccttccacaaattgcccgaagcgacggccgagttcatccgagtagaaatactcgagaaattggaccaggaaaagagcgtaagtaaagagacggcccaaagtcgagggaagcgaaaccaacgaacgccaaagacgcgcgaaaacactgacaaagggagggaagggaagcgatggcatactttaggacttgagacataaattcgatgatatttcgcaaaatttgatcaaatcaaaattgcgtcacttaacgattgagtcaaaaaactcgcaaaaatagctgtctaattttatttcggataaactttgccatttttagaagtgccgcgatgagcacggtattgggtattctgtgtttctctttgcgccccgccgatcactcactttgtcctccgcaaatgaaaaggcaattggccctcagcgtcgaattgcgccacgtcggagagagttaacttctcaagacgacatttggccaaaagaagggaaaggctggggacagaagagaaggaaaagacgaaggccaattggaagagcaacgtgacgaggaagagaagggctttcagagacggataaaagcgaaggaaaagacgacgccttccctcgaagggaaaagggattgggggaggg

SEQ ID NO: 10633 - DNA, 3217 bp, Heterodera glycines
catactttaggacttgagacataaattcgatgatatttcgcaaaatttgatcaaatcaaaattgcgtcacttaacgattgagtcaaaaaactcgcaaaaatagctgtctaattttatttcggataaactttgccatttttagaagtgccgcgatgagcacggtattgggtacggtattgtcggcgttctgtgtttctatttgcgccccgccgatcactcactttgtcctccgcaaatgaaaaggcaattggccctcagcgtcgaattgcgccacgtcggagagagttaacttctcaagacgacatttggccaaaagaagggaaaggctggggacagaagagaaggaaaagacgaaggccaattggaagagcaacgtgacgaggaagagaagggctttcagagacggataaaagcgaaggaaaagacgacgccatccctcgaagggaaaaggattgggggaggggcaggaagaacaggggcactcacgttccccccccccccccccccgcatcggttcccccgagaaatttctgacggattgtccttcactgacggattgtccggaccccgggaagagcaagggggcaaatccgagggaaattaaaaccaaattaataaggtttttcagataagggcaaaagtgcgtcgttcgccttttttcggattgtttcgttttgcactgactttttgccgaattgcatccctttcactttcaatttgttcacttaatctttcgaatttgtcgtgaatgtaaggcaaaacaacctgaaggattttagtaggaacaaattctcaaattaattaattaaacgtttttgaacttacaattagaaaaagcgaccgaaagcgatggcccagccgagaaaaggacgacgcattcattcgccacggaacccttttcatcccatagaaattctcggaaaatgaagcggcttaatttgagaattgctgaaatttataaaaaaagacaacaaaatcgtttgagaaagcgattctccagcaacaaatgaagcagcaaaaacagctcgtcaaaatgagagtcgacgaaagagagacgacggcccgaaaaatgggaaaacagctgaaaatgggcaattagggacaacggcaccaattaaagtggcaaaacggggagaaaacaatcacaatccgactttgacccgctttttacatttaaaacactgcgaatgccctgcttcatcgacccgctcagagattcttgcgccaaatattcgaaaatggacggcaaagtcattgcgcacggattacccgcgtcagtgcgtgcgccgaggacagtagcaaagtttggatttagtggaaacattttaccaaaatttaatcttttaaatttagaaaatttaccaatttaaaaataaaatagaaagtatgaacaaaaagttgcttatttaaaattcattttccagtttcgagcataataaataaagtccttgggataaatataaatgcaagcggagaatgaataaattaaaaagctgaaagttcagtttggtcttcgccacagggaagaaaacaatgaaacaaatcgctggtcaaatcgttcgcgtctcttttctcagtccacctccattttttccccctttcttcggcccgggcgtcctccatggttttgctgctgtctgatcgcttggttttgtgccttttccgcccgtctctcctctttcagttgttcagggtcgttcaaacggaaaagcggacgaaaatcattgggcgaacgctttaacattgcaattccatacctaaaaaaggatgtaaaattgggtaatattgcgtttaaggtggtgattacatctaaagatttcttacatgactttccatcggagtgacgccaaactttgcttgccaacattagccgcgacattatgcgaaagttctaatgggtcctgaatgttgaccagagaaaagcgccatttcttctcaattctcttgtcttcgtccacgtaaagactcttaaattcgtccagtccaaacattcgcccgtcccgcggggcgatcacacgactttctttgatttgctggtagaggaaagtgaaaagccccttaaaagccactgggtaattcgtaaagtgtaacaatggaaacaaactttgagaagagtaggcagtccttcgtcgagtgcaaaaaaggaaaggtcgtattcaatgggccatccttcgaccaatcgggaattgtgccggagcaaaagttgaatgggcggaatgcgattcttctgctggaggaaagcgacgacgagcagagaaagggcgtacgaattccaatgagtcttcggatgggccgtcgaccgctgttttgaggtagccgtcgtgccctcttcgccctccgccgcttttttcttttctgccaattgagggtcaggcgagaaaagtccgttgcaggaggcccaaagtttgaaaaagaaaatgagacgccaaagggtacctaaatgagcgagaaaatgtaatttagcaaatcagggaagggaggggaaaagccataagtggacaatggggggggggaaattaattaaactctcatggttttcagaccttcttttttaaaaaaaaaaattagttttgtggctttcgagatagataattttaaaaaatgggtgggaaatgaaaattataatagattttgaacagatcttacagcaaaaatggcttattgtgaatttttagttggatttaatttttgaatttaccgagtccctttcaaacatgccaacttattgtcagttatgagactaatccacacgaataccaaccagtggtttcagctcggaccaaatcacgaatcaaattggctttgcattctcctaacaaattctgcacagagagttcacaagaaacgcgtgccgatgagaggcgagtcaaaaaacgaacgacgggagtacgcgcgtcgggaatgggaacatgcgcagtgaccgaccctttctccttgcgaaactcgttaataaggcgattaagcagacgaacacgatctgacaatgaatgtgagtacagaagtaaacagacaattgactcttcccttaataaacacaattcgaaacgctaaactaaaggaaattcgaacaaatacaattcgaaatgctttttggtcaatttgtactataatttatgtatcggtgggtatgaaaagtagcaaaacctattttgggaagtcggttgaaagtatctctatcgatcgggcttcgtttgagcttttcaggagtcagttgttg

SEQ ID NO: 10634 - DNA, 912 bp, Heterodera glycines
  unsure (1)..(912): unsure at all n locations
gaaagtgtttcgatgtgttcgtttttctgtcagtatcgatgtgagaaaattcatgaacatcttttttcaaatgtcaggttttatcaggacagcagaagcaaggtattttatgagtttcaattgcaaatttaccagttgactcccgaagtcgcttgctccattggcattcaaaaaattaagcacttcttcagagnttaatttcgctttgttcggaaagtgagcggcaaaaggttgccaccccttcgaagtcgacacgtctcggatggattctgacgttacactaaacgaaaaattaacggcacaacccctcgctgaaagcacctttccaatgcgcaaacgttcaaatgaattgagcaaattctgagcggcgtcttcctccttaaattccacaatggcaaaagcgccgctgccacttttgtccataatcactctgtcaacttcgccgaattgtcccatgatccgagtcaactcagaatcatcaattggcttcgtaaaattgttgagatatacagaacgattcattaatcgatctgctgttgctcgaagttcgatgttttgattgtgcacttttcccttgaggtgatcgtcccaatgtgcttgggaatggaccaaaacacgacaaatatcgcatttaaattccatcaagaagacgaattattaaatgattaaacgtaaattggaaaataatctggtgcattcagtaacaaaaaaacatttaaaagaaattacaataattctaactatttttttcaaaatctataacataaccgtttactatcatccaaattgatcaacagaatttgttggctcgttttggttcgctttctgagcagacttccaattgagatattcataaaacttcctttgtttttggttctgaaatattactcataaacaaagtcacaaatcaaa

SEQ ID NO: 10635 - DNA, 2394 bp, Heterodera glycines
cttttgtttagtttttgaattttcaatttttcatattttttgcacgtaaaatcttgttactcaaataaaacgcacgttaactttaaaaatataagattagtttagcgcctaaaattacccaaaaaaatttcgagaaggggtcacaaaagcgataattaagtgccataaaattacccttttcgtttttcaattttttatattccgtttcaaaaaatttgtttttccattcatcgtacaaattgaattccagtagcattttgcttctccacctgcccaattcagtgctattcaagaaatattccctgtaagtcaatgcgaataaagcatcgcgcggatttgcaattgttttgcctaaaaaattatggaaaaacaaaataattatataatgattaattggactgatagtctaattaatgtatgattaattggactgatagtctaattaatgtatgattaattggactgatagtctaattaatgtatgattaattggactgatagtctaattaatgtatgattaattggactgatagtctaattaatgtatgattaattggactgatagtctaattaatgtatgattaattggactgatagtctaattaatgtatgattaattggactgatagtctaattaatgtcttttcatctaattaaattattattactaaagccgggattttatgttagaaaggtaattacaatatgaattaaaaatggcaaaaaatatgcgaaatattaacataaatctcctaataagtatcaaaatgtaaataagattttttgcattatgctttctctttggataaaatttctttgaaaaaagtgattaagcacaaaagtcataaaaagacctaattatttgcaaaatagttttaggcatttttaaaaattaattttcggttattaattttaaattggtttttagtgattttttgattttcaaaattctcaaattcaaaataacaatgctaatggacattttttaaagattttatactgtatccccctccccccattcctcctacggtatctgctcacaaagtgtggccaattctttcatttgccaatcgcaaatcattgccacccgcacacttccgaggaggtcgatgaaattcatttgcgcttctcccaattctcttctgtttttttgcgtcgataaatcgcttaaatatttttttaaatttattattttttttgcattttttaatttacccaaaatatttgagcagtttttgcctttgccccaatgaatgtaaaaggtcactcagaaggaattccttaatttgttcagaaaattcgtcaacgattgccttcgctctcttctcattttcacattctttgtgatcaaaaattctctcaattttattatatggcaaattttgtgaatttaaaagtcgcaaaagttcgaatttgagacgtaacaataagcacatggcctcgtcaaagagttcataacgggcgaagaaaaattggatactaaattaataagattaagaataataattatttgtatgcctttgaatttgatttttaaaatgttcttattttaagctatttcttaaaaaacgaacaaattgaaaaataatgattttctcataaagtttcgttaaattttcaaaattttccaattggcgcctaacgccaaaaatgaaagctgattaaagaatatttatttaaatggaaaattgattaaataatattatttaaatgaattgatttaataatatttgtttgttttactttgctaagttggctttatgtttccgatatccatttaatcccttgggcatattctcgtcaagcaaaattatcttattttgatccaatttccatctcagaatgtaaagatgcgtgtaaatttcaatttttgatttgaatttttgccgaattccttcatttttcgctgtaaaatatgacaaatagaattcgtccagcaaagtgttccgcgcttttccgtaaggggaatagagaaattggagctcacagcaaacgtcaatgtaaatggctgttaaagcaaataaataatttaattaattaattagggaggggacagggggacgacgatacggtaacacaccgaacattaattacacttcccctggatatgtttgcttaataattctaaaaaccagtgatcagcttaaaacgtacatttaaagaaatttaagccaggcaatgcatttgtcggtgaagtgatcagatgaaaaatgaaagtaaaaacaattggagacattttacatagaatagaaacaacggcagtagaagaagcagaatatccaagctgcttaaatttatttgctttttcaaaaataattttaaaaaatgaaaaaattattaaagagaaggaataaaatgatgggtgagcaatggggggggaataggggggggggg

SEQ ID NO: 10636 - DNA, 3804 bp, Heterodera glycines
tgtaaaaccatgccaaacggcaggaaacgaataaaacgacgccttacaataaaaatgatcaaacatcagcagggaggcagaaaaatttgttgattataaatatgctaggatagattggcttgctctattagtatgaaaaatttcagaaaaattcattcagtttttagaaagttatggcaacaattgaaaaacggaaaagcaaaaatttgaactttaaaattataaatgcaatttcgaaatgcactaaaacatcaaccaaatcaaaaaatttaacgtagaaatgatatttttgagcccctttcttcatagcatatgagcagaaataaatatgcaaaatcacacagtttataaccccaattatcacataatgtacattcgtctcaaaatttttacataatttaaaaggcaattgaaaatttaaaaataaataaaattatttaaaaaaataataaaaaactatttctaatgtttcaacttattttgatataattaaatctttttggaaaataatgcgtcatcaacgcattttccactgtcgcatatttttttttagctgagtagttcaattgtcatgtagaacaatttggaatcgtttaacaaaaaactttgttattttaaaaaattttcttcaaaataatttagtttttttcgtaaaagcaatgcttaaataaatgttaaatgtcatcattaatgtttatctgtctttgtgcgagtacatttataaataagcatggttttgttttttggctagtttacttttgtaactttttatacacaaaattatctcaatgatttaaaaattattttaaaaatgtttttttctgaatttgcttcccttttcccttcttttgctgattctctgctcttctttttccgcattattttttgattaaattaaatgcttaaaatgcaaaatgtcaaaattatttttaaaagcgaaaaatacaaatttttttgtcttttattatttaatatatttttccactattaattaccattcacaaattcatcttttatttgttttgctgtggtcacatcgattcgattggccacatttttttcgggaaatattggcgaaatgattggcatttccaaccaaatttggtgcccatctctctccacattttgctgcattttgtcgaaccattcgcgccccaatgaccaactcagaaattcgcctttctttgtgtaattaattctggccaattgtaacggcaaaggccaatccctaattattatttattattatattattaaaattaaaaattaccaaattgagtaaatcaaataaaatttctccaccaaaaatggcaccgaaacatcgcccggaaacagcaaaaacactttggtcagcataacaaacaaaacttgggaattgaaatggccaaaatgggcatcgaaaaagttcctccctaaatattattattattattttattattaaagcaatttttaataaataattatttatttttcacttttcgcccataattccaaataggtataagctgttctgaaatttctcaatttgcttccgttcatcacttctctgtccgagtggtgatagattctgttgaattcgtttttggtcagcaaaagttcgaggattttcaagtgaatggcatggtctgtttaaatttgaatttttacaattaaatgattaaatgccatcgaaattcttactccacaaaacggtcattgcttttttcacttcctccattttgtgccttcttttttccgcctcctttttgccattttcttcgttttcgtttctgtcggtctctcctttttttgtggtttcttcacttttatttagcctttcaattttgttcaatattctcataattgcttcatcgtcataattgccaccattctctaaactgataataattgtcctttttaattaattataattattttatttttgtttttcatccctccgaattcattcgtttggtgatatgtcgttatttaaaaaccatcaatatgatttgatgaaaaattatttataacttagctcaaaagtaaaccaaatttaattcttgatatcattcgattattctctatcagtctacaaaatttcaaaaaatttatttaagtttcaaaaaagttgtggctagaggaactcaaaaaccttgttttcgcccatctttggccctacttttttgatactcaacaaaattttttgaaattttgtagacttatggagagttcttagggctattgaatgatattaagaattaaaaatttggttccttttgagctaagatacaaataatttttcatcaagtcatattaatggtttttccgccccattcgtttgtacggggccgggagagagtgggcacgggcgtctcgcttccgacgcggtaaatttgggtctccgtttcatttcccggggtaattactagggatgcgatttttagttaaatacctaaaattttgcgcatttaatacgcacagataagcacgaaaaaagcattttccacttggttttgggtgtctacgatgacttttataatacctatttttacctattttggagtttttctacctattatacctatttaaggattttcagagaattccttaacaaaaatgcaataaaatcaaaaaatacacccctaagaattggaaaatttttcccaaaaatttatttgtttttttatgtaacaaaatttttaatttaaaatgtcaatattttctaagaacatattaaaaatatttaaattattcgtttacaaagaaatagaaccaaaattttccccttttgtttgcttttttccactaaaaatcgttaataaaaaattttatttacctattttggtacctattttggaatttttgtacctatttaatacctattttgagatttttttttacctatttaagtacctattctgggatttttcttacctaaaaatcgcatccctagtcatttacatcaataaaaaaacaataaattttagcattttgattataaacagggattctatttttatgtaaatacatatttttttcctggcctccatgctctaaatagtgggaaaaacactttcttttttgtgtttgcgaacaaaagttgggacttttatttacatattttgggatttttctacatattaaatatgtacatatttttatacatattctggactttttcgcattttttcgtacatattttgcattttttgagaatttttaaggaattttttattaaatgcccccaaaaatatccaaaatttcgcaattttttcaaaaattttgagaatttatagaattttttgtgaaaatgtgctccaaaaaaataattttttttttttgaaatgggatatcaaaaattaatttttttttttttaaatactaaaagatgattctaagtctatttaggtcatatattttagcattttttatacatattttatttacatatttcgcgatttttcttacataaaaatggaagccctggttatttctaataaatgttctggttttggggttgtaccttattttggtactagttaagcttgggtcctacggataacagtacaactgagtacaaggtcccggttttgaccagttttgaccgggaccggggaattcccggcttttttcccggttttcccagccaaaaagtcccggtttttcaaccaaaaaagtcccggtcccggtcttgcccaaatttcccggtcccgctttcttacattttgcttgtagatagagaattttaagggttattgaatgataccaagaatgttaaaagttatgacaatttttttgtcgaaaaacagtacgagttgggttt

SEQ ID NO: 10637 - DNA, 2485 bp, Heterodera glycines
aaaagtaattaaaggagatactcgagagtctcagtttcgaatcgagaaaaaaaaattggcccaaaagcgctttatttgtatctgttacaaattgtcttaaaaacgatctatcggcactagggatagcattccgaggccccaaacattttcgaaaatcggaattccgagcccaaaaatgtcagaatcggaatttcatgccatccctgatcggcaccgccttccgaataatttggcaaattagtttcattaattatttctgtttgattaaggcactcgtcgctcgtgtgattgacaaaatgaacagagagtccaccaaaccgtttctgtatatgcctgtcaacaagatactcaccgtaaacacaatgtttggacataactatgtaatgaaaatgttggtcggagagtcaaaatgcgtaaaaaaagtaagtgcaacaatggactgaaattggcacaaaaatgggcaaagtcggcacaaatactaaaatactcaaaaaattttcccggcagcacctatcggcaccgccggaccactattttaccatatttttgaaaaatggagaccaaaacggcaataaatagtaatttttggcgaaaaacggcaaaaaattttgtaaaatacacccccccctaatttgggatttcaaaaaaacgaaaaaacaccccctaaaaatcgactgaaaaaagaaaaatacacccctaaaaatcgaatttttgataaaataatgctaatttttaaaggagccgctgcagccgccgccaaagattgactacacaaactgtgaagcgaaagctgacccggcggcgctgaaacgggcattaattaattcataataattatttattaattagcctaagccctaattaattactcttcaggattacaattacaccgagtgtgtgtgtggcaaactttggtgaattttgagtcgattgaattcgataaaaaaacattggtaaatttaataaattgttacgaaaggatgtatgggagggataaagtgatcaccaaattgtcaaaatgagcatattaaaatgccaccctgttgaataaaacgatcatccttaattatgactcaccgtcacaattactgtaaattgaaatttgtattttaaaaaatttcaaatccaaaaaaatttgaggaaattttttgatgatttgttcacaaatcgtgtacccctgctactgttttcacgcaaattaagaaatagaaataattatacaaatcaagtctttattttaaattcaacgagggaatggaatcaattgcccaccgaaccgctccctgaatttttgacgcaaattcaaaaaccataaaggggcatggcttttactcgcttaatatatagtaaaaagtgatttttgggaatttttaggacctaaagtctacccctattttggctatttttagagcctaaaaatataagcactattaatgagcacgacaatacatcaataacaactgttgggttctagtcggttttatgcgtcccatgtcagattatgcgtcccatgaatgaccatacccagtttcttaggccataacttttttcttacttggtcaatacccatattcttggtaccaagcgaaagacaaaagtctcgagattttataaatgcaagaaaagagcaaatactggcattaaaaaagaaattacaatgaaaaaatacgaaattcaacttttccgagtataattttttgtctattgcctttagctaaaaataaagttatacaaaagcttctatagaccttaagcttttgtttaaattcttaaagctagttacagtttcagaaaatcactaaatttatcctaaatgcatacacataacacaaataaaagttgatcaccgcaacaaaaagaacaatattatatataattcaaatgggctcaaattcattctccaacaccgcaattcaaattgatcggttcgatcacttctcagcaaatcattcattcacttctcctgatcacttgggcccatcattgcgtgaaacgtctaaaaaagcaacaatttcgcattttttaataagcatttgacccatcttacgctcattattaatttgaatgtcgattatgttccattggtgattaaattgccagtcaatcgcttcctcctcccattttgcccatttgtccgtgtcgcgcacaattggacaacggaccaacagaagacgatagcaatagtcagttcttttcaatgccaattgttcccgagtgaattcgttcgtcagatcaaatggcacaacggagtcatctccatcgaaagacaacatagacaatatgacaacaatgaaattagcaggggatgaagcattggcaaatgcctaaatatggcatgttaagaaatatgaaatgaatgacattttactacggttggggggggggggatcaaatatgaaaaatttctatttttcaacttatttttaggaacacatttttcaaaccaaaaacgagttgaatgccgtcctaaaacataataattctg

SEQ ID NO: 10638 - DNA, 1001 bp, Heterodera glycines
accagcattttaacacctttggcacattgtcaggacgaggagtgaacagccatttggcaaatgcttgtccattcgaagcattggcactgtcatcgcaaggaaattcggcgaagaaaccatcagaaaatgaattgataatacgaagcgatggacaatcgtttagaattgacggcatgaattgtcgcaaacggtagaaaattctggcatacaaatgcatggcacaaatgcttttcgcgatcattggccaaaatttgcgcaaaatgaactccaaagtgcggtcaccacccgtgtagatggccaaattaattggacgggaggtgaaaagttgacgaaaacggtggagaaaagcgatggcattttggtcgatgtatctgtgaaaattaaggaatcgttttacaaacagaaaacaaaaaattaatcattcatttcacttgattgaaatgtccttgaatccgacgattttctttggcaacgctttttgtggaattggcaaaggctttccagcgcaattgacaatttcccatccatttgtgccatccgcttcaaatttggctttaatttccatggctttgagcgcccagcgccgcgtcttgaagtgttcgtcgacgtaaaagtcaaaacggtggctgacaagtgcaattccaaggcccaattgagaaggctcaagcaaatcgaacacacaaagccaaccgtcgccggagatgaaactgaaaaaaaggaaaataaaatttaaaattgaaattgaaaattggcattttaattttacattgcttttgccattttttattcggcttcttttcggttgtctgacattttgttgcagcaaattattaagacagttttcggcactttttcagttaaataggctttattttcttagaaattcatatgaaaaatgcaatcaaagaaaaaagaggagaccttcatctaagtacataaaacaatcacgagaaaacatacattttattaacgtataccgaaatcttttttgaagctattgt

SEQ ID NO: 10639 - DNA, 5704 bp, Heterodera glycines
ataataaattaaattaatgaaaattttcaaacctttttgcttgcattatttcaaacaattaatcatttttggactaaatcatcgaatattaatagaaattcagatttgattttcacatcactttttttcggagcgctttttcaaaaaacttttgggaaagaaggggtccggcggtgccgataggcgccgccgggggaaattttaaaaatttgggtgcaatttgttaacagattttcaacaaaaaaaggttggtttttgcgattattaagctcaattggtaggattttcatttaaaagatgataaaatatgtatcaatttaaaaaaaactatgaggaatcatattttctttataggaaacccacgagtatacaaaaaaaaaattgaaaataatctaatttctgtagagggattgaaccaggggaaagaaaaagggaaagtcaaggagactagccattaggccatttgcacactttggcagtgttacttttaaagaatatattaattattattttttatttttccctttgactccaattttcttcactaatttttcactcagacccccattcttaccagtgcttgtttttcccggttgccctaccgggaccgggacctgagcttttcaaaacccgggaaccgggacctcggatgaccgggaattcccggcccggtcccggtcccgtggcactctactatttagttttaaatttcattaaataaattatgacaaaagaaatttatttaaaaaataatattcgaatttaatatatattttatttattaaagtcgaaaaccaatttaataatcaaacaaatattcaatttaaattcacattattcagcggctccgcctgttttttcccgctctttttttggcttccaccaccattagcatttttccgcgctttcattagactttcttccatttttgtgatgccgccccggggcttccgtttgcgcgtttggacagtcaaaaatttcaaaaatatatataaatttaaatattttaaattaaataaaagtgtttaaaaaaataaattttctatattttccacctcttttctcatggtcaacggcctgttaatgttatgcagcttataatagagaccacaagcactaaaatgtgtcaatttagaattttttttttattaatttgtaattttaaattaatttttaaatttttatgttatttaattaattttaattttaaattttattttttaaattgcttgtttcacttgcacactggctccccatgttgattacgtctccacaatgttgttgaactgccatcacaattggaacacaccaaattttggcgccctccctttggcggttgcttaattaatgttcgttaattaacccattatttaattattttacattttttgttggtgatgcggatgttgaagcagcaaccttctttgttgtcccattttttggctttgatttcacactttttactgctgatgctgtggacaattagttttttttaaatttgattattaattgaaattatttttaaataattcattattttaaattaatattaatttttttgcatatttaaaaatccatttttaattcaccttttgcctcgagctgcgattgattttcaatggccttatagtgaatgggtgaagaattcaatttattgctgttcaacggggggagtgcctttgaaaaaatttatggaattcattataaaaaaaatcaggaaataaaaaaaaattttttttatgatttacccgaaaaaatgtaaaaaatatataaatctaataggattaaaccaagcactttttaatttttttttttttaattttttcaaataatcgcaaattcgtatttttttttgtccacctcataaaaaaacactcactgccgttatattctgtggtccaacaatttgttgatatgcaaatgcattggacgacaacacatcatcctttccctgctgattgtccatgcttggcccgtaaagtatgcggccctttaggcaaatttactttaattgaattaattagtttttttttcaccatttggctgctggccaagccgtcaatttcgagctgttgttgctgctgcggttgttgcagatgcaactccatttgctgctgttgctgctggtggtggtgatgatgttggtgttgttgctcatggcatggctcacaaattgcataactgaagaaatttgaatcccaaaaatgaattatggaatcaattaatcaattaattaattaattattggcaacaaagaaatattaatgaataactgagtttaattgattcattaaattgataggttgattaattagttaattgattgattgattgtataaaatgaatgggtgtttaattaatttaattgattgataattggttgatgaagtgatatactgtttgattgattgattgattgagtgaggattaattctttgattgcttgataattgattgatttattaattgattaattaattaagtgattgttttaattgtttgattaaatgattgttttattgattgattgattgattgattgattggaatacccgcgcgcatcaacgcggaccgattcagcctcatataaacggccaccacatgaaatgcactcgcggtcagcagcggttgcagctgcggccagctgttgcgatggaagcggatgaacaaccagcgaacccatcagaaaatcgccgccaccttcaattcagacaactttttacatgtttataaaaaagatattttggaaaataatttttaaaaaatcttaaaaaactttttaaaaaagccaaaacaataaaaaaaattgtggaataaaacttattaaattgaattaattaattagggtagagggaggacccagacgcctaccccgaaaatttaggctattttttgaaatataccgtggcccatatcctcgaaaacttattatccgacccctacactcaaaaatgtagccatttttcagggtataccccgacccgggcgctccgcatctggacaaaccctgactcccccgacttttttttacccccgaaagttcgggcgggggcccaccccgaatttaatcataaaatttttttttgaattttaccgccaagtgctgcggactgatgatggtggccaaccatgtgatgatgatgttgctgatggtattgcatcggtgctgctgcttcaatgccgccagtgataaacgctgaaaatgctgttgaaaaattagcagaatactcaatttcttaaattatataaattaattgatttaaatgatttaaaaatggataattataataattaattcaccctgttgtccagcaaaaagtgggccaaaatggccataggcattgagcgaatcgagcgaagctgagcccccaagcattgacgaaggctgaccaaaataggatgaactgcaaaaaatatgatttaatataaagaaaattttttatttatattgaaaatttaaaaaggacgtaaaaattaataattttttaaataaataaataagaatttcaaaaacatattttctatttcttaaatttttttaataatttcaaaaaaatattttaatttcttagatcatttaaaagtgtattaaaatataaaaaaatgaaaataacatgaatttaaaacatatttcaaactttgtaaaaaatttttaaacattaaatatattaaaatttgcaaaaaataaataaataaataaataaatgattttttactcagcaaaatacgaatgcaacggttcaatgtaatattgtggtgtttgactgttccatgagttgctgctgttgtgcagctgctgctgtgcatagaacgtgccggtgttgttgttcattgtgctgttgttgccctccactggggcagcctccattttcagtgtgaaaactagcaaaaatcttatcaaaaaatttgtcatcatttttttatcaaaaccaaattttgccgaccccagcgccgacccttttatcattttaaaggcaattagggttaatgggatagatattatttcaacagataaaggttgggtggtgatgatgatatgatagttttcagttctcaagacttaattactctcctcgttgtcactcttgagatattgtggtacccaaaaatggcccctccggcgtttttgggcgggggcgggagaaaaattgttgtggacaacaaatgacagcaacaacaacaacaacaacttcaagacgtccacttatcataccatctttataatcattagcaccagaaaaattatcatttttctaatcgctgattttgttggacaagatttatcagcacccacacacacccaacggttcaatttttggggggtatatcagtgtcagtggtggtggtggtggaccccggggaaaagtgccgataaatttttcgactcgtccacccccatcatttataagtaattatgatttgattaatcatttttcacattttctacgcccagcagtgagtgatttaccccaattttttgtagttgtcctttttttggcaggaaaattttctaaaaaattgcaaaaaaaaaattttttttttttttgtaattttattattaatttattatttattgttttttggacatgtaaaatcagtccattttgatgaggaaagtacaatttgtgatgatgatggtgattgaaagaggaagaaggactctgtgctcttctcatcatcgtcataagcccgcggtgatgaatgaagaaaaagaaaggatggtcccacccaccaattggcgttgattggttgcccaaaaacttcaaattttccgacaaattacggtattttttattggtaaaaaagaaatattttacaactctttttgggaatttttttttatatattttcatttaaattccgtacaaattatggtatcatttatttttaaaattaaaaaagcatattttaaactatttttgggggaattttttaaagtttttaaaatatttacattttttttatttaaaaacacataaacatttcacgaaatttattcccaaatattttcaaattgaaataagtgccaatttttgagagcattgctgcccattttggcatggccgtttcggtaattgcttaccaaaatgttctgctgcattttacctatcccaatagccccatcctgctcattttcgtcaattagcgacactttcaatcacggcatttcacacattaccacgcagcagccgacaattagcggctaattgaagctacaacaatcttaattacttaccacgcagagccgacaattagaagctactacagtacgcctaattaccctcccctcgcccagcgcctcatatgactatgaggcgattttttttttggatcgatcaacagcagcagtgatcatcgtcccatacatattttgcttgctacctgccctcccaaatatttgccatcccagcaaataaaatttcccccattttttcatggcaaaaagtggtggggctcattaatcgacggacggaaagaatccgtctcaaccccccgcccccccccctcagttccccaacaaaatcaccgccattttttccaatttctaagacgatgttgatcatttgatagtaatgatgccttcctccccccccccccattccccctcatctcatccctcattagtcaggctccaccacaaaactgataagaaattattattattatggacacgaaaattctcccctactgctttttttgatgt

SEQ ID NO: 10640 - DNA, 1018 bp, Heterodera glycines
gatcaaccacttactaattctggtcatatttgccactgtttccggcctatgccatcgtcgccatcgctttgaacgtgccgaaaagtggcggcggcaaattttgtccgttaatcaacgaatttgccaatggcaagcagtgccaaatggggcggcatttcctttgacgctaaaatttgaatttgtaaacaataagctatggataatactcacttttgaaaattttagtaataaaacagtcatttgatatttaatttaaatattttcttaattcaatttaattgcttttcaaatttttcttttaatttataatagaaattttttgaaattttattaattaataaacttgtattatttaatagatttataattctgttaattgttttttcaaattttccatttttgattcaataatttttttttaatttttattttatccaatccgtgcactttcaattgttttattattgttcaaacaccaaacaaaagcagcacactttaagtggtttgtaaaattgagttaaaaaacacagacaaaaaatacaaagctacaaaaaacgtgtgaaatttggtattgcaaaaaaagcacgcaaaaagtgaatattacaacggtgtatttcggcatttttatcattgtgttttccgtcaaatccacattgagtaatgacgtgacaattcatccgcagcagcagcaacgtttggcaaaagtggcccaacaaatggtgccgacgccataggcgtgtgctcacgtttttgacggatctgcaaaaattgcgtgttaattgaaattagccacactaattgggtttaattgtttaattgatgcacattaccgcagtggccggatatgagccaccagtgcggggcaatgcgaccacattattgggagctcctccgcttaaaaaaaataaaaatttgttgagtcattaaaaagtaattaatttttaaatataaattttaatactttttttaaatttatttaacggataaaaaataaggataaatgacgctagcaatgaaa

SEQ ID NO: 10641 - DNA, 4871 bp, Heterodera glycines
  unsure (1)..(4871): unsure at all n locations
aaaaatgaaaatattttttattagttttatttttcccctcccccagcttgattatttggaaggncataaatccggatttcttctaagggtaaaaaatnntnaagnaatatnanttgtnaaaagntatgaaaaaaaggaaataaagananttgatgtattanatgganaanttatgnataaaggnatanagatttntatatgnantttgaaangntanntgnataagataaaaattgtttttgngnnnanaaaagataatgttgattnatnanntaagnttgaagtggaaaaatggttntnnaaaaagntgantaanantatttatataattggaaatggatcaattggagaaaatacattcagactaatgaaaagaataatgatctctacatttcgtgctccaactgtttgtatttacgtgaaaaggaaaacaatactagatctattatctcaacagcagtgcttcgacaaggagttaatcttattatgttgcgctcggaacataattctgagtgtaagccagaaattttggaaaaattaaaagccgaacaaatggaccgagaacaaagaaaagaaaatatacaatgtatatctgagggaaaaatttgcacaaaattattcggtatgcagacaattatattcattgatgaaacaaattgagaggagcaattatcagctatcaatttacgggattcccgacaaattgaaaaaggaggtaaaaatttcatgagcttagaattctattaaaaacagacaataattggggtgtaaacattatgatcccgaacttaacttttttaattatttgagcttagaataatcagtggtgattttcaggtttaaaaaatctgcataaaagtccaaaaatccaaacaattaattaactaaatgtattcgaacaaaataagcaacaaataaatataaggggcaattatccgatcaatttctattcataactatcgatcaatcatttcctaataattctttcacttttcttctgttgctgtccgctgggcccaggattcattttgagacgattttttgcttaatttggcccgcttctggtggagacaattgcctaattaaggtcaatttgaattactttaaacaaaagaaaatgttgttgccactcgcccaaattcataacgaagatgcaacttgacattgttcaatttgttcgtctttttgtcgtcctatttaaccgttgccgtttgcccaatttggcatcgtttcattatccattttttgtaccatttatattcggtttctttggccaatgtcagcttttcgttggtccgttcattcaccaattaaaatgggccaatttgctttgatttaaaatatttaattcgaatttcgtagctggccgaagaagagttggcacggagaaatgcctataaaatgggaaacgaaaagcaaataaatggcaattaatccgaatattttattgaaaatgtggccacacctctttgaaattggtgatcattcttttggtttttgacgtataatcacaactcaattgctttggctttccattttttgtcagagtgtgcaaccatttcaaatggtgaatctttggcgcaaaaatgggccaaatttcgggactgggtcgttttggcgcccacgttttggcgccgacgatttggcgcccacgttttggcgcccacgttttggcgccagggtcgttttggcgcccacgttttggcgcgaagccaaaaattaaaaagggaaagacgtaaatttcaaaaatgttgcaaaaaaaggaaaaagattttttttttcaaatataagtaaaatttaacaaaatgaaaaaataacaacaattcacgggttcatatgataattgcgcgaaatgccacgaagaaattccaaaataatatgaaaatttggatttatgtggtaattgtgatcattttcattgttcgggttcaccgggatgtaattctgcaccaaattgaagaggcgctcatcagccgcttggtaggtatttcttagctttctgcggtggctcacgtccagcaagaaatgacgcatacttcccatcggtgcccttctgctcacggcggagaacgtcaatgaagtgccagatcgatggatgacggcagttgaaggcgccttgaagacggtgatgttctgcctctgcgtggttgttcgtcctttcttccccgttcagtgtgcgagtgtagacgtggcagcggatatttcggcaacggaaatcgtctcttctcaacaaacactgttgcatttgttcgcatcttgctaatttttatcaaatttctaattgtcagttcgcttttgccatcgaaatgtttgtccactaaaacatcgaaacgaggcgaaagaagtgccaatttgaattaataaaaaaaattgcacaaaaatcaagcgtgaaattgtgtttcatccacctttatatattcatgtgaagtcaaagtcaatgttatgaatgctaaactcaaatcgacgcagttgcgatttgtatcatcccatttttggccaattaaaattttaaggactccaaaaaacaggaaaaaaacaatgaaatgatggacattccaatttggcagaaattgttttgcttttatgcctccaaaatatgtaagtctattaataaatgggtgtgccttaaaaacaggaaagtacccaaaagcaggacggaaaacgggaacggagcacacgtgacgggattattcgagaaaggatttttagatgcttcaaatcgcaaatccggtacttactaacaaaagagctgaaaaagtgccaaaataatcgtccgttattcaactcgtaaaaattaaatgtattcaaacaaagaagcaacaaataaatataaggagcaattatcatatcaatttccattcctaatgatcaatcatttcacaataattctttcactgttcttccgctgtcctctgggcccggcattcattttcagacgaccttttgccttcattggcccgcctttgcggagacaatggcctaaacgaaatggaaattaaattgtcgagacaaataaaaacaaaagccgttgccactcacccaatgcaatttccataaagcgaaatgatgacattgttcaatttgtccgtctttttgtcctcccattgaatcgtccgcccaatttggcatcgctccaacacgcaattaatatgtgtatatacatgatcatcatcatcttctgccttcaatgtcagcttttctttagtccgtccgttcaccaattcaaactgcgcaattgaggtgtaagttttgaattggattatgtaactggcagaagagttggcacggagaaattcctaaaaaatgggaaacgaaaagcaaatggcatttaatccaaaattttacgaaaatattggcacacctttttgaagttgacgacacattcattggtttctgacgcagagccacaacaaatcaattgcttcggctgcccattttttgtcggtgtgttcaaccatttggtcaatgcttgacgagcagttgcatttggcccatcatcagcaatcgccgcgggcaacaaattatcggagacaattgaattcaattggttgcaatcggtgaaaattgtcggtgaaatgtgacaacgcaaatcgcccaaatgatggccaatcaaatgccgaatgtttggcacgaaaatgggccaaatttcaccagcaaaaaaattccaaattggctggacaatgcctttgttgtcataatgcaaattatccaaatccaaatataaatccatatgggtgcctttctcaaaaatttgccggttggaacgaagaaattcgatgacggaatggccaatgtatctgaaaaggaaatcatttagatgtatcatttagtaattctttgatttactcgattcgaaggttgataaagcggattttgatgggcaacggattgctcttcgtagccacagatagttttgttcctttctttgcaattctgatttgtctcaaaagtggcaattcgcttttgccatcaaagtgtttgtcgaccaacgcgttgaaccgtggcgaaagaagtgccattttgaggccgagttgagcatggtcaagatgcaggaaaatgtccatccaaacgtcattacacacccaactgaaattgaatttaaaaaagtttagttcaatgaaatatgtaattttataactcattaccgtcggttcattttgcggcaattggcacaatttgcgtattatgaaggatgtcacaaagagacgattaattgcgttggaaatgtttttgataatgagaggcaaatagaaaaagcaaacacttttatagtcatgaaaatggaattgaaaaaatggagatatatttccttaaatctttgctgtttctctctctttataaatgtattaaaatcgaccaatggccttcagtttgtaaaaaaagaaaattttcacccgaaaattttaaatgattttgcgtaaaatttgaattgcttcctgacttcattaatgatgctgatgagttccgctcgtccgtcattcgtaaaagattaaaaataaggagtaatgactaaaagacagatgaatttacaattttttgacgaaaagtttaaaaaaatcgccattttttggaaaaaaatgaggttgaaacaaaacccccgccggggattctaattgaataaataaattgaaaacagagagcacttcctttccatccgaaaattctaaatcatcataatacataattgacagaaaanatggaattttgcgattcatttattctttacgcccaatttttgttttaattttttaaaaaatttcctttatttaggctactanattacaaaatattttttctaaatggcacccgccaaacaaaaggaaaaaactttctccgccaaccatcgcctcaattctgcaactgatacaaat

SEQ ID NO: 10642 - DNA, 969 bp, Heterodera glycines
  unsure (1)..(969): unsure at all n locations
agatagttttgttcctttttttgcaattctgatttgtctcaanaggtggcaattcgcttttggcatcaaagtgtttgtcgaccaacgcgttgaaccgtggcgaaagaagtgccattttgaggccgagttgagcatggtcaagatgcgggaaaatgtccatccaaacgtcattacacacccaactgaaattgaatttaaaaaagtttagttcaatgaaatatgtaattttataactcattaccgtcggttcattttgcggcaattggcacaatttgcgtattatgaaggatgtcacaaagagacgattaattgcgttggaaatgtttttgataatgagaggcaaatagaaaaagcaaacacttttatagtcatgaaaatggaattgaaaaaatggagatatatttccttaaatctttgctgtttctctcactataaaggtattaaaatcgaccaatggccttcagtttgtaaaaaaagaaaattttcacccgaaaattttaaatgattttgcgtaaaatttgaattgcttcctactttctttaaactttaacgatgctaataagttccgctcgtccgtcattcgtaaaagattaaaaataaggagtaatgactaaaagacagatgaatttacaattttttgacgaaaagtttaaaaaattgccattttttggaaaaaaatgaggttgaaacaaaacccccgccggggattctaattgaataaataaattgaaaacagagagcacttcctttccatccgaaaattctaaatcatcataatacataattgacagaaaaaatggaattttgcgattcatttattctttacgcccaatttttgttttaattttttcaaaatttccttattttaggctactaaattacaaattatttttctaaatggcacccgtcaaacaaaaggaaaaactttactgcgccaaccatcgcctcaattctgcaactgatacaaat

SEQ ID NO: 10643 - DNA, 1865 bp, Heterodera glycines
cttaaactaaccattggggaagagaacgaaagataattgtcctacgcggaggccgcgtgcgaggaaacgctggcgatgccgcgccactaaattgtgcacgacgcattccctcacccgcggggcgtcgtcctcctccattagcatttcgctaattggcaaaacatcgtcctgaaaggaagcgatcaaacctcgcttaaaagtcatttctttgtgggatttgatcatcggtcagctcattctcgctagtgcttctcaattgattccgaatcaacaaatgatcgctaattagggaaattaactcccaatgcccaatgatcgctgatttagtattgattcctcattaaagctccctgccaaatgattactgataaaatgcgtgttccatttctccccctccccatttaccagttgattaatcccttcatccatcatctcttctcccaaaatgtctcttcctcgcaccatttccacttgcttcttcactgatgatgatctccgccgtgaattggccattctccgcccaatttgctcattttcctcgccctcggcaacagaagtcgtggaaaggccggccaaattgaacagagagccaatgccgagagacattcgcaacgaacgaaggaccattttcttgtcctatcatcggagagagcgatcagaaaacaatgccaaattaggggagggtggagagactttgtaagcgatgaatgccatttcgagaagagaggcgaagataaaagcgatgcaaacgaacatgaagtaatcgatggactcaaagggggggggcgatcagagagaaggaaaagccgatcagagacgggacggaccttcacataagagacgggcggaagggaacctatcacattgccaaactgaagtgatcagaacgggcattttggcattggtattttccaataattgcctggagacacaacgacatcagcgtgttcactgaaaggatcactcgggcgggcaaagccttaagagagatgcaaaaggcgatccaggagaggaacacgttgatgtacatgttggcatacaccttaaacagcaaatgataagcaataaatgggataatgggcagctgatgcctgaagcacgtaatagccgtaacgacgacggaagccgacctctaccgtaagccgataccattcgcctgccttgtagtactgtaagtgtgggaatacgggattcctatcctttgtttgctgcttacctccgtgtgtttgtagtgttttgtgtgggtcagctcaaagtcggacgcactgatctccgccgtttggagagtcaccgcggccaacggtagccaatcgatggttacggtagcggtgttgaaggagtaactctcgaacacctcaaaatcagagtgaaaagggtattttgatttgcgagaccaaagagcaaagaacggtgtccattgggaagtcggacagacgaaattcgcatggcgcctcaacacggaccgaaaatggaaaagggcacaattcaaattgggaaaaatgctttttaaggacttttaaggacaaactctgtaattgagccaaacggtgccgttgctgagcagcatcaaaagcacgttgggctttggcgagctgtgcacacgactcatttttgtgttcaccaaacaaacatttggcgaccaaagaaactgtaaaaagagagaagagggaaaatagtaaaacggtacaaaaaaatacggtaggaaaattacaaaagaaaaaaataacaacaaagtttgacaggataaccttttcaaatgtgtcgtcgaaagacaaattttgacgacacgaattgaaatgagcaaaggaaagtcgcgggtcgtgacaaatggcactgaaccaaaggtcggcggagaaggaattgct

SEQ ID NO: 10644 - DNA, 952 bp, Heterodera glycines
ctcgttgatgtcctgaatggtcgtctccacgaacacagccacaggattagaagggctaacacttctaaagaaaggaacaccaattaacagaagatgctaattgggatcagctaggaaagaaaaaacggaaggtcctaatggcccattttgaactgcttgaaaaggacgaaagaatgcatcttattgtccatttgtcattttactaatgataattactttttttacctgctgtaattgttcaacaaaagcttgatcatcttttccgtcggaattgtgttgcatttggcaattgagtgttcttttttgcccattttgtgctgtcggattgggtggcgaatggggccaaaagtgggcgaaacagtcggaggacaacagcacaaacagaacaaacccatggccaaccaatggaaaagcattttctgatggaaatgcccgcggggaaatgggcgaaagaaacccggcaaaagcatagccaacggctgacggcggcacggcaattgctcaacagtgccaccccaccattttcattttccgatttgcccctcccccgcccccttattagcacaaactgcggggtgccaattcaaaatgccatcggagagagttttctgctcacaattacacgcaaacattagcaaaaagaaattaaattttatttttccgtttggggccaaacatccaaattaaaaaaatgttaacaaagagcgcgcttaacattcacacggtttccatacgcataaattagccactcattttattgcattttttaaaattttatgggccccaaacggaaaaataccgaaatttagttatttttttttatttttcatatttttcgcattaatttgtttttatctgttaattattatttattttattaattatttttgctgattatccgaagaaagaaagttgcctttttatgttcatttttcacccaattttccagact

SEQ ID NO: 10645 - DNA, 2418 bp, Heterodera glycines
aggaagaaaaaggggaagaggaggaagagacgtaagaaaaggaaaaagaagaggaatattgaacaaaaggaaagaagcggatgaggaaaaaggaagagagacgagagaaaaggaggagaagaaggaagaagagatagcgaaaaaggaagcaggaggggaacgaaaagaggtgttgctgaagccttatgcataaattattccaccggcagtgacgaccattgaccattatattttatttgtcctactcgcaccccccccccccccccccccattggcccatgtcaaacaccggcccaaattcgtcgttggcgcggaatgactgttctttgaccacgctcttaactcatttgccactgctttttcactgtgttcatccgttctttgcattgcgaaagtccatgaggaatgcaaatgccaaagtgtgccgcccccatcaatctccgctccctttaattgtgtccaaaaaccctctccccccatttgtgccaaatccttggcccactattcgtattttcaattgttttcctccctcagattgatgaatttgtctttcactgccgccaccacattatcaaatttcactctttcaaatgcagcggaagagccgaccatttccttttcagtgccttcggcggatgacgcggccgatgcccgcgagatgcaagcccgtgccaccataaaattggtgttttgcattgcctatgccatcctttttctgctcggatcactcggcaatgggtcagaaatgatcaaatgccaatttccacttggcaatttccttctctgctcggctgatcagtcattggtcccaatttgaggttggtcattgtgatgatttgcaacgttttgtccacgttgtcgcgcaatcggaggaagacgagtcggaagatgctgatggcaagtgcggaacacgtgttcatttatgtgctcggtcagttttatccccgtccaatgctttttcctccgcttaatccctctattttcttttccgatgattcttcccctccatccggaaaattggcatcagaaaaagggacaccgaaaaagcttattcgtgcaattcaaatgaaaattgcgatttggttgggataacgaaatttcttgatatcgatgccgaaatttgaacccgaaaattaattgttttgagtataatttaccgtctttgtccaatactctccggcgatgtccaattcttacaaattattttccgatttttttatttccaattcgccccatatgatcccccactttccgtccttcctcccaggtctgtccatcgtcgatctgttcgtcatcctccatcttccgcttctcatcttcgaaatgcgcgaaggccaatggcccttcggcgaatttatgtgcaaattgtattggtttggagaaagtgtgaacaaattgttgagctcatttttgatggttcgttgattgggtcaagggttgctcgatctcagctctcaaatcggggaatttcccggctttttggtgtttcgctttcgacttttggccatttagtttctattaaaaaagattttttactcccttaaatttcaaatatagttttgtttttggcttgggcctttcttttctcggttctctcgagcagtccttttctgtttgccgtttttcttcaaactaataaactgttcagacggtgcttagctgggaccgttatttggccgtttgttcgccaatcaaatcgatgaagtacttaataatctttatcaattaattgctgggttataaaacaatcgcaaattttaatcaataactcattaattgattgactaattattttgttaattaaggatgcgcaccaattcaggtcgtccgtcacttccatcgtttccgatcacttttctcttcactttcccaagtcccttcagtggccatcaccgttctgatcagttgctccgcgttcgccactcttctcctttaccccgtcctgaaagaggccaccgttttgcgggtcaacaaactcaccggagtacgtcttcacacggacgacgacggggggagcagagacagcagccgggggggacacggagaagaacggagtgagggggggggggagtggaagagtgaatgggggaagcaattccaggaaagtatttcgctgacccacacagtgttatagtctcaaattggagtcttttattattaagatgttgtctaaagtcatgaaaggccgtattatattatgtatatttcaaaatctatgaacgcgaaaaggctaagggtcctaaattagactcattttgattttataaattgtgaaaaattttggacatttcgtgggtttttactcttttggacatttcgtggcttggacactttgagggggcgccaattattttcgtaaagatatttacctttttttgcgttttttccatttctatgacccccccccccccctctccc

SEQ ID NO: 10646 - DNA, 974 bp, Heterodera glycines
  unsure (1)..(974): unsure at all n locations
attgtaatttaattcatntaaaattnaatttaaattaattttccatttctctctgattattattttttttgtgcttttccctttgacctgatattcatccaattgatccgagctgaatacgccgccctttgagaaaaggttcaaatcgccaagtgccgaacccgtgttgcccattggcggagaatttgccccgagggaaggaaaggaattgccgaattttggaggaatggccacgggcaaagagaaagcgtatcgaacgaatgttttgcccaatgaaaagggcgagaaaaagagaaagcgaaagaaaagagagagaagggagagacagagagaagagagagagaaaatgcaatggagaagaaaaggaaaggcgttaagccaagagtcttcgagactctcgccaattaattaagaccaaagggatacttttatttttcattttattttcaaaaaattaaatgaaaaaaacgaaacattggcattaataagcagcagaaacaaaaggcaaattagaaggaaggcagctgatcagtcaacaaatcgttggagaagaagcttcatcttccaattgagtcgttgcgcaccaaagaaaatccaaatcaacttgttttgcttattgccaaagtctttgtaattattttggcgaggatttagggaagaaaaatcccaaaagtagcggccattgggtcaaaaaatggcgaaacaatggatgtttatttcttaagctaaaaattttggcgctatttgcataatttattttttgatttttatttctacagttttatttaatgcttttttcatttttttaacagatggtcaaatttcctgacggaatcgtaagtgtaaatgaacgagtttttagacttaatttcttggctaaaggatggattctctgtttttaatgactttggttgaattattgtgccataattacaatagtaatgcttatttttattaataatgtaacattaaaa

SEQ ID NO: 10647 - DNA, 4689 bp, Heterodera glycines
aattattttcctatttcttaatatttttctactctttctcttcttagcttatttctcactgttgttctctattatcccaaaccttcttctatatgtctaaatatcatttttcgttaactcatttctaatgtccaccttccaaccaaatcttctattctcaatcactccttacactaaattctctctatctaaaattgtctctcttcaactatctctgatttttataccattcctctatccttttctgacatttttcactatttcttacttccacaattaatcatccgtccattcaatgacgcagtaattggtcaatatcctcatatgttctcttcactcttcatttattcgttttacaagtcctttcttcactatatatttagccattagtctaccgtttctaacatacagtcagatatttggaaaaacacactctataacatatttattttcaccctcaaaagtgtacactacatacgcccatacgcacacgcacacacaagtacatgtatgtacacgcacacgcacaccaatatatgtaaacatttttttagtaatttctccatatattcgttattttcataaattttcttaaaattgcatcgtaaattccttaatatttcacaaattgtacttctttctcttaattatgcatttttctacccaaaaatgacattcctgagtgcttaattattttcaaattgtatcttcaattgtttaattatgaatgcattaaaattacacaatttgaggtataaaatagagaaataaaagggtacatgcgtgtgtgagagatagagatagagatacaatgagtggtgaatgatgaacaagacaattacaatgtgtgctgacaaaatagttacaatcaatggttaagactataaacattataatcggctcctatcctattatccttcctaacataagcatggtaaatttttgcatagagcttgatattacagatccaccatcacgaatatttggtctaaacatttttggagataccaattatttgctaaatttaatgtttttcataatatttgacttgctgtttttatatctaaagccttggttgtttgttaaccacatcataattaagtatcattccacggtttttgagcacctattccatttttcatcatgtagaacatttatacgttttaaagccaacgcatactattttgcaccatcagtgcagaattctacgatttccatcaatgaactgttttgtcgatcttattcagctaaaaaacattgcgtagatgtgagaaaaccaagactatccgtgtcggtggagagtacttaacgccccggctatatcatcatttctgaatagttttattacccactttttttattttcgtaggtaatcaaaacatgatacacctttcaatcctcgatggccattacgtctattgaacgattatcccaaatattctccaaaatcaagtacatcattattgaagtaaagtctgttaaaggctgtaatttcgtaaagaaatatgtcgcacaaattgttcaagcatagtttggcaatcgaccgcttccctttgttcacagctatctttgttgggttaagatctctaatttctctttgcactctcttacaaattcagcttccttctcaccatttccttttttttgattgtttttggtgcacttcataaataaagagaatcagagcctaccattcactttgacgggcaaaacagaatatcgaattttctaaagaaatcatccaaaactttgagtattgtcaaggggtagtgtttatcttccgggtatttaactcgacttattcattcagcacatgtacattggtttaccaatcgagtagtgtgtagtaaaattaacgaagggtagagagaaatgaagtcaaatagaatttttttcattccgtcttcaaatccgctcatttatttgttgctcattaacattttagcgatctcgtagcctaatacacttacaactggatggacaacttgacttcgtataaattcaaaacgttttactttcctctcccgcactttatcttttatttttttcaattagacattaatatacatcttctaggtagcgctaattgcaggcatgctaaacatatccgcttacttctattgcagttctctctgtttccaactattcatccacagaataatgatcaatttgccaagtgttcagttgaaaagttattgatctagaaatatcgcatacaggccttatactagtcatacattcctttagtacatcaatgggtactaaaagacgctgccttcccttaataatgccttagttcttttgagacatcaaataattccctcctaaacgataccagcgctgtcattaaaattttcaatgtcattacattttttctcattaattgcctctgtaaatacaaattttccagttgagaagatagttgtggtagaatttgtacctagacccttcattatatttgaaagatttatgtggttgtttttagtggatggggatattaaataaattgaggagaaaagttttactatttattgtcagtaacaccataaattgaatttaattttaggtataatgtacttaattttaatcaatactattgtatttattatttttattataatttaattttttaatttagttttatttatttttaacatttattttcttttaattttaatcttatttttattttactttttatttgaattaatttgaattttattttattttatttattattcagttaatttaaaggagttattcagaacctctatccaataaaggctatttcgccgctcagcacggcataaaaggtactttaaccgtgcaccgtttagcattgtatgatatcctcactattttcaatatttttacttgttttaattgtttatttctttgaaatttctattaatattttacttttgtagtgtttaatgcaatcaaagaacattttaacttgaaatttttaacaaaatgaacttaataaaatattagtagttaattattgtaaaatataatttattaataaataagtttaattcatttattaaaatctaaaaataatgataagaatatatgtatacttcatattatatatcattttattatttaatttttcaatataaaatttctttcttccatcattataatgtttttgcttagcaataagtaaaaaattccatatatgcacgctacccctctccgcctcccatctgatatgaaattcttaacgcttttttcttaattatattttaatatttattttttctacaactcttcatctcttcattaggcttgggttatgacacaagtaccatttgccacccctccagtcgccacatgtcaccacacccctcaaataagttttgggttatacgaccaccatttggcaggttgccaactaaattgttcatgctatgccacactacactaaaatgagtcgccgtatgaccaacattttatgccatccacggtcagtcattagcgcttaaatgaccaccagcgggcgctcagatagcccatgcgggcgcttaggtgacacgtgcgagcgctcaggtggcctggcatcccttccctccccaaaggccacgacagctgatgtccgtccctccaatacgatttgactttaataattatttaattaattaattttatattttttcatttatttttaaatttttatctattattttaattttattttaatttatttaacttacctaattttaatttattttattttatttttaatttaatttgaatttatttaatttaattttaattaaatttaattttttaattaatttattattattattatttatatttttatgtggtattagagagagcaagagaaaagagagagagtgagagagaagagagaatgagagagagagagaaagaaaaaagagagagagtgagagagagagataagagagagaaagaaaaaagagagagagtgagagagagagaaaaaagagagagagagaaagaaaagagagagagagaaaagagagatataagagagagaaagaaaaaagaaagagagtgagagagagagagtgagataagagagaatgagagagagagagaaagaaaagagagagagagaaagaaaagagagagagagaaaagagagatataagagagagaaagaaaaaagaaagagagtgagataagagagaatgagagagagagagaaagaaaagagagagagagaaagaaaagagagagagagaaaagagagatataagagagagaaagaaaaaagaaagagagtgagagagagagagtgagataagagagaatgagagagagagagagaaagaaaagagagagagagaaaagagagatataagagagagaaagaaaaaagagagagagtgagagagagagataagagagagagtgagagagagaaagaaaaaaagagagagagagagaaaagagagatataagagagagagagaaagaaaaaagaaagagagtgagagagagagataagagagagagtgagagagagaaagaaaagaaagatagtgagagagacagaagagatatagagagaatgaatgttagcttttttattcaattatatttaaattataaaaattttttttttttaaatttatttattttaatttagaagggattttattttaatttaatttattttttaatctttttttt

SEQ ID NO: 10648 - DNA, 3199 bp, Heterodera glycines
  unsure (1)..(3199): unsure at all n locations
tccatgacagatttggaagaattttttaanttgattgggactccgcccggccattttctacgataaagcgtggaaaaaataaaggacccccttaaaaaagttgaggaattaattccggaaatagaggcattaaatgatcactttgattcacaatttgttgatcattttaaagaattgggcataaaatcgaaaggaaaaaaattggaaaaggaaaaaggaaaacgaaaacttagtgaaattgacaaattggaagatgaaaatgagcaaaaaagaaaacaaattggaaaattaaagaaggaaatgaaaaagaaagtgggaaaatttgatttaaaatttgtgaacgaattaaaagaaatggtcaaaacaattgacgaaaacgatggacaaaaattggaaaaagtgaaggaattggtgaaaaaaattctggaaatgtttgaggaaaagaaaaaagcatatggtgagaaaatggcggaagaaaacgaatgaggacaaaaagccaacaaattccgattgaagggcatttttgcggatagctttattggcatttagactaatttttgggactatttttttttgagtgattcgtagggcgaattctaattttttttcgattttctgggccaaggaaatttgattttatgattgaatttttgaacgccaacattttaaggattttaatttttaaaaattatagaaatatgttctatcagtagaaaagaatctggaagattattaattatataaaattggaatggttccatagggatttggcattttattttattaaatttatttatttttgaattttatttcaattctcttcttctgctattagcctttttaagccgagatgtattgtcctttatatgtaaaaatttgttttttattttcgaatcaccgaaagtctgaccccgagaaattaattttatcaattgtgtcgctttttgttttttcatttaacacatttggcttttattcttcctgtggtccattttattccataagataaacttttctattctcttttttgactgattgcttcagcaaaaataagttatccaataagatttttttaaacatttcttagattttcccattccttagcattctccttgtctttttcctttttttggcattttcttattgcaggtcatttcttcttaaccttataatcggaattaaatcccttcttttataagaaaatattttaaatctgaaggactggcagaaatcattattttaataattggttatcttcgaaaaagaattaataattatttcttggaaatttttacaaatttcataaaaaattaatttcccagcggttcctattggcattgcggcaaaaaattatggccgtaaagctttcacttttttcgagcatttcggctccaatttatttttggaactcaatataatttcaattttgctaactctgttaaaactttgtcctattaaatataaaaattgtttaatttggttgcttaaaattggcggcgccaaacatatcccttcccctcaaaaaccacgaaagttggtcagtttttttgtattttggcattttgtgccttattgcatgcttttctaagaatttattgttaaaaacgcataatgtttattaaaacattcacatatgtattttggtaatatttcgacattttttgtaagtatttatgcacatattttatgaatttcttaaataaaattttacatttctacttagaatactaattaagaataaatgacaaaatcaatttttttttcattcaataaaataataatttaatgtttttgctttaattggtcagcaaaatgcttcgtccggcactgtcacaatgtaagtgcgcccgtctctgactagtcgactgtttttatgttcagctgacatgacgcaaattttttactgatttccacaatgctcaatccatgttccttggcttctcttcgctagaaataaaaaaaaaattgttcaccaaaagatttaactgatgacaattaagcataattaaccaaatcactataaattaaggtcttggattttattttaaaaaaacacaattataaaaaagttttccaaaatcttgagatttcgtacttaagcctccaacttcataagcatattttgtgacagatttcagcttggtagtaaataatgaagtctattatacatggagggtaaaagttcggagatttagttcagatacatttttttaatagtttacccattgtaaaattcagtttctttgaccaggattcctgttaaatcagcacttatcccatcctattagtcctgtcctggtgcgtctcggaaataatggcaaaatcccagccctacttgtttcggtccaagtgttttaggataattaacaatttgccgtttatccatggtaattagttagtaattactcaaccggaccaattcattaaaataattaaatttattaattttatagaatatttatgcatccacctgcacctgaattccaacattcccaacagatttgttgtcacttctccaatggttctgtccgccgttgtttccaccaaaaattctttactgtattcgccccggcgacagcacttggcatggtaacacaatgttgtgactttgacgagaatttctatcttaatctccaggaaaatattttaaaaaatggaataaatctagaaaataataattattttaatttttagtcaaattttttaccccttcccaatttgtcaaaaatatatctatctcgactcgaaaagtctcggctttagagacctcgaaaaattttcagtttcaaatattttttcataatttatcaaattaaattttagtcaaaactcgaaaaaaatatatagcattaacgaattgtttaatttatagattcaaagaaatttttaattttatccccaatttatttgaaaacattttggaaataattgtatttttttatacccttgtaaaaggaagcgatgactgtgatggcaaaaataatgggaaatctgctggcggaggatcagtttcagtcacatccaaaagcatcagctcacagtgcaacatttcagtgcatggcaccataacgaaaagtggcaaaacggtgaacaaaagccaaacaaaattcattcttcaaaaattanaaagaacggaacgtcattaaaggattaagaaaaaaaaattcaaaatactaattgaacttgaaattatacgaaa

SEQ ID NO: 10649 - DNA, 1898 bp, Heterodera glycines
  unsure (1)..(1898): unsure at all n locations
tttatatttgtaatttaaaaatataatattaanggacactnttaaggtacgcaacgcggaattccgactttcgactttttgaactcgactacttatgtatatgttgtacgacaaagaagcaaaaaattaccgaaaatatataaattttaaataaacgatttataaagtttgctataaatcaaagtgtaaaaagccttactctcgaagaccgagtccgaaaccccgtgagaaagacagcaaaaaaaaaactctagagggactcgagaccgagacgctcggaaagcgctagtatataaacaacttggcctgcctttttcaaattttcagcaattttctctgaattaaatcaaaaattttaaaattcaaatggggtatttcttcggaaaggggagggcgaataacagccaaatgttcctgttacttacttttcaaaaaaaaattatttagggggtgcgacatttggcatcccttgttttcctggtaacgggactgattaattccatttttaccattttcggggaattgcccttcgttcacattctgctctgaatttttcgttccacacagagtatgttcggcaattaacttctgttggtgaagtgaagatggcacttcaacagctgctccactattactgttttgattacagcaaatttttatacggtaattgtagtcgttggatatgggaggcggataaatggacaaatttatttcccttttagcagcgcagacggtgactatgctaattgcaagcaaaaagccaaagagcaaaagctggcagaacatttctaaatgttgcgctttgaaattatttcgctttaattttaacttattttatttttttaaacgttaaaaatattataaaaaatttaaaaaagtaaaatgtaaattaaaaataatataaatataacattattaaataatgaaaatttatttcccttcacattatatgcatatgcataaaaagatattcagcgataatgtaagtgtaaatcacatgaaatagggcaatacatatagatgaatgaatacgaatatgcgggcgagcatttttacaaatgaattttatgtgcattgattttgcatttttctcagaatatacaacataaatttattccgaatcatattacgattagggatgggatttatatatatttttaaaatacatattcttgctgagaaatgcacgaaaaagacctttgtagcgcgaaattcttaggtttaatctccaatatccattaaaaaatatttgactcttttttatttagtaaatattttggcatttttcataaatacaaatcctatccataattatatattcataaaactattaatgtttctatattttatagttcgatttgtccgtaacccatgtccgccatcgtcgctgacgatacacaacccaaacatcgaccaaataaacagccgagcagagaggcgaaggcccaccacgaggccgcgaagaggccgagtgagtaccttcggtgcaggaaaattattaaattttaaaaattttttaattgctttttaaatatgccaaaaaatgtaggcttaacttttttagtgaaaattcgatcactcatattttttgctaattgagcagaagcgtaccaaactttgcagggatactccccggtaaaggactaacttacactgaaatgagcgccgagctagctggctcaaaaaaattttcgaaaatctgagtctttcgtttttatttgttttttgcataattaattcataaatatttttttcagaaaatgctctgaaacgcaccaaattttatttacatgctagtttaggcactctgatgctttttctatcaaaaagggagatgaataaatttttaaaaatttttaattcctttttaaacaggccaaaaagtttaggcttatctt

SEQ ID NO: 10650 - DNA, 4318 bp, Heterodera glycines
gcttggcatggctggaggtcagagttgaataattctaaaagtaaggggtactctttttccacaccccgaatttttcggctcaccgcacgacggaattgtttctttcgccgaataaagttgacgtgcaaatatgcgtgtttttaagaaattttcaacgtgagccattaaaactaaataactaactcgaatattatttaaggttaatttgtttttttatcgcttatcgattgaacgttttaagacccaaaggcatcttaggcagtgccgctcgcccgaaaatggcaaaattttaatgaaaagatattttaaggttttgaaatatctaaaataaatgtcttattcccgaaataaaaacgagcggatcagaaatagttctccttcatcagactattcggcacaaagaaacagaaatggaaaaatggggaacaacatggacaaaaaacatagcagaagaagacggtcttcttcaacttcaggcgaggagaaagaattcgacaaagtgcttggacaggaaaaggcttgaaaagattttgagagaaaaggaggagaaacagcgactcaaagagattgaaacgcccgatgagaaaaggacacgaagacttgcgaaaaagttgcaaaaggttgattttagctgtcaaaataattgttaaataaaaattgtttttttaaggaggaaagaagacgagcagaaacaattaatggctttcctgaagtcattccttatacggacttgaacaatccattcaatgacaccaatttgactgacacatttatttggaagaaaaagtgggaatccgaagggaaggcgaatgtatctgtaaaaaaggccgagaaagtgtaagaaaggcagccaaataaatctttaacttaaataattcagaaaccgcgaaactattgctaagaattttgccgaaatggaacagttaaagcgaaatagggaggcgcgggacgcagcgagggaagacatggaaatgatcacgagggaccaggagagacgccagtgcgattggagtcgtacagaggatgtttttcatctaaaacaggcgaagttgcgctcttctattcgcataaaggagggcagagcaaagccaattgatttcttggcaaagtgagctaagggacggaaaggatgggcaatttgtaaaagtctgtcaaaggtatatttcttacacggacgaagcgaaccaaggcacagcatttgaactgaacaatccgttgactttccttcccacggactccatcgaagattttgaagacctaattgccgacattcaagtaagtctgttcttgttacacagttcattaatttggttcaaggcatagtccaaaacctcctctttttaattcaaaaataacaaaattctactaccatttataggtttatcgtctaatcgatggccataagaacaaatgttattgggatgacatagaaacagtcgccaaaaatggaatgaaacgattgttagacacgcgaaaacgaacagcagacatcggaacagttcattcatcggtacaagaggaagtgcataagatatttaaggtattctaatgctttgctaatttaaatttgaccatggataattcaggggaaaacttacgacgaacttgaacagcttgagagtcaaatcactgcaagaatttcgaacgcgaacagagggaccgatgtgacatattgggagtcgttgttggattcgctaaggccgtttatggccaaacagcgcctcaaagagttgcacaccaaaatgactcaactgcgtctgaaaattattcgtcaggagcagattaatcaaatggataaaagtgatgaccgtgaccaagttgaagaagaaaccgttgaaaaggacagtggggagacagatgaggagaaaccatcagaggacgaattggagatggaaatcgaacaaaaggcgaagctggaaagggcgaaatacgaggacaaacagcaaactgtgcagcaggaaacgaagacaatgccattcacaattgagcagttcatcggggcagacgatgaacaaagggagcaaatgaatcagtaagtaacgacaatttggatccattaattggttgatatttaaggcaactcgaagccagaggcatgtcggagcaattctcaacagttctatatgagtatggtcgctacagtccggcgtacggaagcttatcacacacaatgcctggcatagaaattttggacgaagcggaagatgaaaaacggatgaatgatactcgtttagcaacacaacataaagaagatggaactggaaaactgacggtggatttgcgggaaaatcatatcttaagggggggggggggaagttcaggcattggttccctaatgtcgcctaaaagtagaaattcagaaattgtgaattttagaaggcccttttatgtgcacacaaataaaaaaagaatgtttaaaaaaatgcgtgtaaaagttatttaggaggcaaaaaatatcttaatttagccaaagtcttcaagggatttcctttattcatttaatgtcctattttgttttattgacgttttcttacaattgttagtttctggtttaatcgatatgttaaggccaaggacaaaagaatgttggagatcgcaaggcaaggaatggaccaggacgaggccgaattttctgtcgaagaaaagctcgaaaagcagaatttcctttggtctgataaataccgtccgaggaagccccgctatttcaacagagttcgtgattgacttttgttggtttaaaatttatttctgttaaggtgcacaccggatttgactggaacaaatacaaccaaacgcactacgacattgacaatccgccgcccaaaattgtgcagggataccgttttaatgtatttgcacaatttggcttactttcgtataacataaaagggtgattctgttacagatattcttcccggatttgttagacccgacacagacgcccaccttcactctgatcagatgcgatgaccccgacttttccattcttcgcttttgcgcgggaccgccctatgaagacattgccttcaaaatcgtgaaccgagaatgggaggtcaactacaagcacggatataaatgtcaatttcagaatgggatttttcaactttggttttttttcaaacgataccgttatcgtcgctgattcttttccattttaaaactgtaataaactttcttcactattattgaattttcattaatggttgaattccagttttaatttatctgtttgtttttccttaattgggtataaacagttaagggaatgcttcgccaaatttgtggtggtttgttgctgcgtaagggtgcgtctgctgctccgcctttcgccgtcagaaatgccgtccaaatggcctctccgacgaaggtgatgggtccgcatgccttccattacaaatttgaacgttattacgccgctgcgattgttccgctttttcccctcgcttatttcgtccacgcgcccctcgtggattatgctttaactgctgcgattgttctccactcgcattggtcgtcttttaaattttattattcgttgttaatcttgtaaaatgaatttcaggggcgtaatggctgttgtccaggtgacttttgataatgccgtcatttggaagtgtccacccaaaacccctttaggactacgcgaggcccctggtcattggcaaaacgttggccaaaatggcgccggctgtcccttacatcgcttccgttgtgcttttggttggcttactgatgttcaattacaacgacgttggactgaccaaagcctttgaaatggtcttcagtttataggtgtcgatcatttgttaccgtagcattttaaatactgtataaaaattttatggaatatcaattaatggtgcgaaatcgtataaagttcattgcagcaaatacttttctctttttcaatttaaattataatttgggtaattaaactttctttatgtcaattaggccgtcgttctttgtaaattcgatttgaaatgttggacaatcgcaatttctctttttccactactcgaaatggcattctgctcacttttctgaatttgatgttcactgttaactcgaagggttttcttctgaccgcttctctcatgtttcttgtcgaaattggcatcgttttccaaatcattcgattggtcccatgtcggtggtccttttattgcttttcgcttttcaaatcaattttagacacggatattgactggtccacttacatgcagcacgttggagtttatgaagacggacagagaaattacacacaaattcggggggacacaggcccaattgtgtgagtcaatcaaaaataataatt

SEQ ID NO: 10651 - DNA, 954 bp, Heterodera glycines
cagtgccattctcctccacgtccttcacttttctgtgattatttgtcctgcagaaattcttcgtcttccgcccattttccgctgaagaacgaataacaaaaactgtgcctttaaatttgcatataattacatcatttattcactgtgacttctatgtttatttattctgttgttatttccccttttctgtttcataagttgtttttaagaaatttgaaatttaaaaaaatattttaatttgatcattaaatttctctttccttcaaatacggcatgtcaatgccattctccgctgttcttctgaacactgtccgaaatgccttttcccctcgcagggcgatgagtgtgcgcactttgccccccgaattgaaagtaattatttgaaaaaaacattttatgcctcagattttcgacagagaaacgaagcgaaaacagcgcaattgggcagcagagcaaaacgaattcggagaatgcaaatttataagggacgaagtaaagcgggcggagaagcaatgcctttctttttctgagcttttccatttttcagtttggctatcgaatcgccgacaaaggtaccgccaaagccatttcatgggaattgcgctgaaagattgtgccgcactttttagtgttcgacgtaattcggccgaatccgttggtctttgagttgggctgcgcggcgggacacgtcgggtggactaattacgcataattagcaccaatcaatttaatacaattggcacactttgaagacctcatctgatcggcgaaaatgttggctgttttgtgcagtgtgacatgagcgagaaaatggtggccaggagcgaaaaggcggcggagaaagaggtggcccagcgaaccgctcaaaggatttggcccaccccggccggcattttaaattgaacggagtcccggaaattcaaaacaatttgtatcgaacccccccccccccca

SEQ ID NO: 10652 - DNA, 3345 bp, Heterodera glycines
  unsure (1)..(3345): unsure at all n locations
tgcgaagttgcgattgtttgctctgattctgcccctagtttagaaactggccgaagtggatgtcatattcatgaccgcttgcgggttgcttccttgttttatgtttgcttccgatttatctttcccagccaccccgatatgaccatacaatatttttataactataattctaccaaatgaaaaattactttttgagaaatcttattacacttgatgatccatctcgtattatatgaaggctcctgacagatctgatgttatattcgtgatcatcggccctcgtaagccccgagggggacaaaccatcgaagaaaaccgcctgatttattccttttttatgggaccactacaaataaccattaccgaaaatatgcgtatataaacacggtcgatagcatcggtagcggagcgtgtgtcgattttgatccaattgctctggctcagctgcagataatggtagcaaaaatttccacaatctgcgaatggtgatgacgctgtgaggatgtgaagctccggatccaggaatgcgttgagcgtcttcttgtcaatgcggatttggaccggaatgtagcggtaacagttgttgactgcttgatattccacattttgcattgaaaactcagcgcacgagaagatttgcatcgtgtcctcgtttagccacctggccataacatccttgcgtcgtaaaagtcgtctggcctgaatggtcggatttcctcctctggaacttcttcggcattccttggaaaaaagctgcgcgattgatcggcttgtggcgagttgtcctgcggttaattgtgctgcgagttgttcctcctggatggctctttttcccaatccacgatcgttgacgatcttcaggtactcatcctccaggattccaaacgattggtccgacaagcgaatcggttttccgttgcatgctgtttccattttcgcctctttgctaaacgttagcgcctgttccttgcttttggatatccatgttccgcctgcccaatccgttgatcctgtgtgctctccgtccatactttcgacgaaatggtagtcgcatggcttacagctctcgttgcactccgtttcccaatttagggttgtgttgtctgccatgttgcagtttccggtcaaatagttgcaatcctccaagtgtgagtagagcgggctgatcaactcaaaattgtgagggcggtaaaacagcgtcgccttctcgacaaaacaattcagcgttacgctctctcgctcccccgaaattagacttgagaatcttcccggaaattcctcgttcagtgggttgttgctgctccatcctcctccttcaatcggagtcattggcttatcttcgtacgggcatttgtgctgttcgatcatggccatgcagattctcttttgtactggcaagaattctttctccgtacgaacgaactgatcccccagaaggttagtataaaaatactccttcgttcgtttgatggcacatctgtaggccttcttcacttcttgtggcttccgatacggcatgtagagtgagatggtcaatcttttccactgagaggtgagccctggcggtggtttgcagaatggtgatttatccgcgtccggtattctccacaaggatgatcctttgtgggcacaccaataaatggggtcggctccacggtgaacttcctccaattctcgattgagtcgtcgtaccgccggtttcgtttcatcggtcaccgtgccctcggttgggttcggctttgtcgttgttggcatggcactggcttgagatgggccttccgtggttgctcggattcgatcagtccagtgacggcttggagtttgagtccactgcctccgtcttgagtccatccttggttcttgattcgtagtcttccgctgtggttgcgtggtgactccctttgttttcgtcgtcgttctcgtggttaccgtcgtttcgggagttcgtagagtagtcattactgtactggcactggtactcgtacgcactgtcgtcgttgctgccgaagtttgagtcgtaccacttgtttgcatccgcgcctttttgtaccattcccggatatgcgcaatggacatatccgccgctgttgtcggcaaagtgggcgtgatttgccccctcttgtcgaggctcatccgaggtaccgtcggctccgcaaatccaacgagttcctccattcgtagtggtcttccgaagggatttacaggaatccatctgccgtttcgttccggccgaatgacttgtccattgatcatcattggttgcaacagcgtgatcaataacatgaccagcatggtcaatcctgtcagacttttggttacggctcgcctccatccggttgtactcttctgggctgactctcctgactcgggatttgttcccgtgttggccggtgttcctctgatcgccgctgcgagttctccaattttttcgtattggtaaattccacagccttgcatctcggcgaattcctcaaactctcgtggcaaacgtgcatttttccgagtcgccaaatgaacttccagtcctgcccttgccatatcttttatgtcttctttgaacacttccaattcttctctttcttccctcctcagctccaaattgaagataattttgatattccaattggccgggaacatcttttcacgcaacggtttgtcaccaaaatggacgaaccagctcgagccttcttcctcaaattccttggctaccagctcagcggcttcttggttactcacaaccaataccctcttgctttggagatggcagtccttccagtactccttggctctcagtttggtcaaggtctggccgaatctctccgtgagattcctgagccaactctcaaattgcgcctctgcacttatcacattcgttttcactggcacatcctccagaccaactggtccatagatttttcctttccactcttgtccaaaaacttggcacgaattgtcccatgccatcagcacacactcgagttgcttctgtggtatcgtcttctcattgttttggagcactttcgtccaccaattcctcaatgaatcctcaatctcgcttcctcttcccagcaaggcgcaccaatttggcgtgcatacgtcctagccaatcgaatgcgaaggcttgggccaggcagaccgcttttgattcggcttgcgggattttggttagccggccgtgggacagacttcccatggtgcaattcctttgacaaccttcatgtccctttacaccaggctcacatcgcgtaaacagcgaataattgatggtacgtcggtagccgngacttgctggntgcagctttattctgccagggntctcttcagcttgnttgccctttttgcctt

SEQ ID NO: 10653 - DNA, 3293 bp, Heterodera glycines
ggtcggaagttgaatggacaaatacataaatgtaaaaaaataagcattgaaaaatgctttaagcatgactttttcacgaaattgacacatgacactcgctgctgacaacagctgccaaatattttttttaattaatactttttttattattaaaatcctttctaattagcccatctctctgtcagcagcagctgttggaaaataccgttcaagtagtccagcagagccaaaatcagacaaaatatttataaattgacgtctctcgatctgtaattgaagaatccgaaaattttcgggaaccagttcctgaaaaaatacagccccgggactaaaatggctaaatacctttaggactgaaccgtacactgaattaaaacgcaaggaaatgcgaaaaagataaaccttagaaggtttaaaccgtggtgcgatatttgaggatttgacatttgaggacccgactttgaggagccaagatttcaggacatacacaatttcaaaaaaaatggaaattttattttatatcattataaaaaaagaaaatgcttttacaagggccaatgggagtaatgtaaactatatgaaatctggatcatatcagttttcaaaatcattgcgcatgagactgccgcagcttatcggttccgaaaggactgctaatttgtaggctccggactaaaactttgtatttttttgctttaataagtatagcttctccctctgaattttgcgatgctttgtccaagatagaataagcaaaacgaaatttgtgtcttttcaatttaaaaaatggacttacgacaaatttatttctttaattagctgtgaaagtgaatattttaaatgatgcaagttgcacaattgtggtgatgaaatgataaatttgccgcccgagagtccgtatctttttggcaccgacgtgttggcgccatgcaggaggcagtttttttgttttcagagaagtgaaatctacaaaagaagtagatgtcagtaaatttaagcattcattattattttttcaatttacatttggttcaaaaaaagatggcgcactgcaccaaatggccagtaaaagtctattttggccataacttttttgcatttcggccatttttcgtaattttgtaggctaatagatactgtcaatctctttaaaaagatcaaactttttgtgatcaaattgcgagtaaaaatgttttattctaattgctttttttaaatttattttgtttattcataaaaaataaaaaagtcatcagaagggcgagaaccacttactctgacgactatcagataaatgtcgtagagtaagtgacaaaatatatggatgatcacaggaattaaaaaaagacaaaatatgtgaaaataaataataaataaattgaggtcaaagtcaatgaggtcgaaataccaaatcacttagaaatttgttacattctaactttcccggtcttacagattaccctagtgaacttttaagttttattttaaattgatttaaagaatttgtttttattagttctttatcgagttgattccacaattttgttaccctcccagcaaagggaatgaattttttgcccagtttgtattttgtgttaaatctataaaaggggatgttaaagcgtgctgatggattaaaaatagaaaatagtttcagatctgttcggccataagcaattttatgcgccatgaacagatcaaacagctttcgcctattctcaagtgttggcagttgcaggtattctaatcgattttggtatggaattggcggaaggctgcatttaaaaaaggctcccggacaatccgacagtggacaatccgacagtgaggacaatcggacagaagtggacaattggacagtggacaatcggacagtcaaatataaaatagataagaaaataccggtcgccgcaatggaccgattgtgccatatcaagaaaaaacaaaataggcaaataaactaatgttctgggaatgacctagaaaatgtaaaatgatgtgaatatgagctgataaaaatgtttgccaaattacttacaagtagaaatgaccattcccgtgcactgcacaaattgaccacttccttttccttcccaaattttcacttgtttcctcacaaaattaattcctcatcttccgaagaaggcgaaattcatgagcatccccagccaaatcccccagttcaagaattgcatccaaatccacaagcccatgaccctctcccgaaccttcaaccaaatgaaaaaaaagttttttgttgctgaaacaacacagcgccgggctgttcttttggcggacggttttgagtacaaggcgaccggtattttcttatctattttatatttgactgtccgattgtccactgccggattgtccacttctgtccgattgtcctcactgtcggattgtccactgtccgattgtccactgtccgattgtccagtcacctttaaaaaatacccttttggtgaaatatttttgacacttttcgatttttttaatatttttttgaagagacggattccaaacctccggagcgtattccaataaaggcctaatataagttttatataacgtaatccaaatcttagacgatttggatttaattattcgaaacaaggaacgcatacgtaaatacgcattccttgttatttggttaatatgatcggaaaattgtaatttgttatcaatgtttactcctaaatccctaattgtatccacagcatttattgtatttccatcaaatttatatgtttcttttgggttttttgaacccaaatatatacaaaagttttttgaattgaaacttttatttgccatttatttgcccattcgaataaattatgcaatgcattatgcataatttctgtgtcggcttttgctttataacaaatatataatttaacatcatcagcatataattttattttcactcctgatggcaaggcatcaggaagatcgttaatataaatcaaaaataataaagggcccaggacagagccctgggggacgccagaggtaacttttttacttgaggataaagaatccccaattttaactcaaaaagtcctattactcaaaaagccctttatacacattaaaagtttgccctttataccaattttttccaatttgtataaaagtaaattatggggcactgagtcaaatgctttttgaaaatcaatataaatacagtcaacattttttccatttatagttgcctcgtaccaatcttccacaactgttattagtttaaaggtcgtagacctatttctaacaaaaccaaattggta

SEQ ID NO: 10654 - DNA, 3865 bp, Heterodera glycines
  unsure (1)..(3865): unsure at all n locations
tcctggaccgggataatcttggatatttcaagaaaaaaaccaaaaagattattaatgaattaattatttacacacgaaaggtaagcgattaaactaaagtaaattaattttagtcgtttctaaatatttttatttttctaaattttgctaaaccttttatggtattttcaaaaaccatctcttgccgggatcccggttccggactctccaaaaattgtactgatacaaaatttctgaaactcttaagtggccataccctatcaagttttcaaagtcgagctgcgcgtacagtctgtaaagaaattataaggccactaaagattttttcatttatcatacttcccatgtcccaaccgagctgaaatttttaccaaatttaccctccccataaatattaagaatcacactaaaaatgaaaaatgtatattataaggtcattttattaaacacaaaaactgtaaaaattttaagtggaagacgaatatggcagaaggggccttttttatttatttaaaattttacattacataaaagaattattatttcaaataaattttttatttcgtctattcattttttaatgttttatttatcaaaaaactcaaaaaagctaatcaattacgtcttgactgaattaaaaatttttctgaaaaataaattttaataattaattaattcggttatgaaaataattattcatcaatttaaaagaatattaaaaaatcatttctttgaatttttgatttttctttctttaaaaatctgttatttcgaaaaaaattggttaaatttcttttgaaaaggtatttgacttatgttcgactattaaaaaagcaaataaatagttattttttgaaaaattttccaattattatggatttttgaaattttcgcatttatcgacgaaacaagttgcaggaataatttaaaaaatatataaatcttatactatacttaattttttatttaataaaaataattctttaagcagaactattattcagtctaaataaataaaatttaattcgttaaattacctaaaaaaatcccacataattggtacttgcatttaaatatgtaatcacatttattaatcaattaacaaagatttctgaatttataacaaaaatgttataatcagggttcccagatcaaaattttcaaaagcctcatttggcaggcaaaaaagcctcattttgactcaaaaagcctcatttctacaaatttattcaaaacatatttaaaatgttcaaatgttatatttttgattgtccatgacccattttagcaattttttgctagctttttgtgaaattttgtgattttgagcaaatttttaagaaataaaggactttaggggctggcggtgccgatagacgccgccaggggaaaaattgagaaatttgaacatattttagcagattttcattaaaaaattattaattttgtgattttttagaaaaaaatttgttcttttctggtttttataaaaatttagcaaaattttttggaaaatttgggtgagattttcgttttgatgctctattagaaacccaaattattaaatatttgtaaaacattatgacaatttatcaaaatttaaaagattctgaggattttcccaaaaagcctcaaaaatcccaaaatttctcaaaaggccacaaaaatcctcaaatcctcattttccaaaaaaaaatcctcattgacctatcaaaaagccacaaaatgaggataaatcctcagatctgggaaccctggttataatagttttttgataaaaagcctattaaactattaaaataaaggatttttggataaaaactcgttaaatataataattttacaacaaaaataacgaaaaaatatataaataaataatgaaaataataacgctttatctatttgataatatataaatttatgtttgcattaaggcattgaaactccaataaaatattttaaattctctttaattattaaacgataaaaaatttagaaaaaggccaatattttattaaaaatcaaagatttaacaaaaatttacaatgctaaacaaaatcaaattttcagaaaaaagaataaaatgcttgcctggtacaatgacaaggaaaattttaaaaattttgaaaaacattaatcatttaaaaataatttttaagaaaaaactttttataaaaaaaggaaaaattatggaatgttacatatttaaataaatttaaacttaatcagtctattaaataaacgaaaataaatattaaataaaagaaaataaatttatattaaaaaataataatttactttttttaaataaaaaagagctaaaagtttatataaaggaaagacaaaatgagaatagaagaatttaatattgagaatagaaccattcatattactaatacgcattttcaaacaatacccaaaaacacattaaatttttaaacaaaaaatttacactaataaggcaaagagtttaaacttaagctgtaaaaatgcagaaaaataaattttaatttgtatttatttatcaatatttattcaaacggaatatattaaataaatgaagataaacgaagatgctcagaactaaatttttacaaaatatataaacgtttttgtgaataatgaaaataaataaatttgcattaaaagcacagatttaaaataacataataaatcaaagttattttacctaataaaatgaataaaatataaaaactatcacatagtaacaaatattatgatgaaaaaaagatgtagccaaaaaagtctaagaatagacactcttttggaacaattttgaaccacggacccaattattgccattttatccattttttaactttcctcaattttcactaaaatcttataaaataatccactgagaatgcccgagggcacaatacagattcgaggtggaaggaaccgaaaatagggaaatgttagatcttttgtgtcttggaaagcatagctaacttttattattaaaatatctttggcatcgattaattgaattgaataataattattttgaacaaaattgtacaatacgattgggactggattttacaatatggctgcatttttgcatcgcatgcatttgtaattttaatttggtatttttgtgaatttataaaacgaatttttattttcccgtggccctttcagtttttaaaaaatctgaatgataatgacccaattgaactcaattaacaaacttaattatgaggaagagatttttgactcttttgcaagggaaatagtaccctttgcttgttttgttgcaagggttcaaatgaaaaagcgactgattgaactgtggtagagtccacgggaacgaaaaccaagaccgtggttttccgaaatttcaatagccgtgaccgggatttgggaatttttcttcctggaccgggataatcttggaatatttcaagaaaaaaaccaaaaagattaattaatgaattaattatttacacacgaaaggtaagcgattaaactaaagtaaattaaattttagtcgtttctaaatatttttatttttctaaattttgctaaaccttttatggtattttcaaaaaccatctcttgccgggatcccggttccggactctccaaaaattgtactgatacaaaatttctgaaactcttaagtggccataccctatcaagttttcaaagtcgagctgcgcgtacagtctgtaaagaaattataaggccactanagattttttcatttatcatacttcccatgtcccnaccgagctgaaattttaccaaatttaccctcccatnaatattangaatcacactaanaatgaaaatgtatattataaggtcattttattaaacacaaaaactgtaaaaattt

SEQ ID NO: 10655 - DNA, 1562 bp, Heterodera glycines
  unsure (1)..(1562): unsure at all n locations
tctttttaattatttattggataaatttattgttgcttttgtgattgattttaaaagcatgagatgcctaatttcacatacaattgtccctttgttcgcaaaatttggaagtgcaaaaaaagaaaaccccggcaccattccttttcgtttccaacagtttgatgttcatatagtaaatgatagaaaaaaatagccataaaatactcatatgtcatatataataccagtgtgttgtagcctgaaagatagacataacagataagacatatgatatctgagtaaataatcttaaaattataanntttattatatatannaaattcttatttatgcataaaatgacattacatcctataagctatagactttaccactgtaagtcgaaatgttattcagtcttcggtattaaaatgtacactcttcaagtatgctctactacttatgtaatttttaaaaaattagtaaaaatttacaaaaagttgtaagcaagaaagctcaaaaaacttagagtgaacagttttgactctaatttttttcaaattcaataaaatttttcgaaatttagcagaataatagagaaatctttgggctatcttttcgtattaagcacggagtcaattaatttaagtttgaacaattttcatgcatttaaacgaccttacattttttggatgaccataaaaatatgacactattaattctttcataacttttttctgaacgaacgaattttaattttgtttatataattagatagcccaaagatttctctattattatgttaattttcgaaaaagtttattgaacttcaataaagttagggtcaaaattgttaagtcaaaatttttcgtacttttttggttacaattttttttaattttactaattttttaaaaaattacataaatagtagagggtactttgagtgtcgctaaatactaaatttcattaatttgacaaagtttaagctatttatgattaattatttagccaatttaattaaaataataattaaatttaattattacaaacattcagacttttgtcacttcggctcaccacgaataggagattatgcgaaaaagaaaggaaaaggagaaaaccaactaagagaaagaaaaaatgagaaagagaggaaaaaaagtgtaaaagaaacggtcaatgacaaaagaaaagcaattggcaaaaaagaaaaagcacttcagagaaggagccaagcaaaaaaaagagcaaaaaaggagaagcaactcaaaatatttacatcaatggcgtcgtctgaaggtgaactttccacgtggcgagactccgactttccggcatcgaactgaggaaaagcaaaggaattctgtcgtaacggcataaatgccgaaagaagccaaccagtaatgacgccaaaggcactgaatcagtcgggcagctggcacgcgccttcgaatcaaatgcttttggcgctgatgttgttgaactttcagggcaaaacccgaaccgagaatacccttacaaattaggggacgtaaattagcaaaggggaaaaaggagaggggggggggaaaggggggggg

SEQ ID NO: 10656 - DNA, 2667 bp, Heterodera glycines
cagggcatccgcaaaagtggtgtacttgtcgttgtactcttctcacaaaggtaaccaaaaaagaggagaaaatcaggccaagaaagccgatgtaaagtgtggtgagcaattcctaaagagtgccgtggcattggcaaagcaaaacaaaggaaaacggcacctgtcgatgggcccaaacaacagacccaagcagtttccaagtgcctgctcgccggtcgatgcgaagcattcgcaaaatttggaagaagcgaagtccgcggatggccgacgcggcgaacattcgatggtgaagcggactggaggggagctgagcctgtgcaaatgcgacctttgacattgacgtttcttataattgaacattcccctcacttccgaattaaatttttaaagaaaatttcagaatttcttttccattaaaaaagtgagaagaatggcaattttagaaagatgccaacacggcaattaaaattaatttaatttaacaaataaaaaatattattttaaaactttcttttttcgatctggcaccctccactcttccatccttctcaactctctttctcttcccctctctcttatctctctctctcttctctccttccctttctctctcctctttctctctctctgttgctctctcattttcacctgttcccttgcacccatacaaaggacaataagtgatgcagtgatcacgatgatatcttaagagtgtcgttagcttataaacgcaattacttttgcagctcgttcccaccaattatgcaatatgccgaagttgcgaatcgaattcggccggcaatgcctgcgggggatggaaatgcttcgacgaaaagatggcactgaccgcggtaacgactgcgacagccggcactccaaacgcggcaaatgtattcgatggcaagccaaaaaacaaagataatttcctaaattttatttaattgaaattggcaaaaaatgaatttatgtcaattatttgtccaaaaaagacatacaatgtaataaaggatgagcgtggactgctcctcaaactcgggcattgtggagaagacactcagtgcaagacacgtcagaaccatgacgagactgtcgggggagggggataaagcggataaagtggggagcgacgaatgcaaaagaatgccttacacagccaaatggtagctggccgccttccatccccggggccgttccaaaaagttgtgcattttggactgaactcgtcgaaagcgttgatcggtactgtagtttttgtagaccaacggcttgccaaccaaggacattttccggaccgaaaagaaatttcaaaaattaacagaaaaattgagggggcaacttgggaatcggaacggttgcgggaaaagcggaggggaggcggctgaagcaaagaaagggcggggacagtggcgagggaactcttcggttgacgcgccgcctccgcgggaaggggcgacggacgcggacggacgacgaggccactctcacaatcgaagacagaggccgggccggaaacggacgcactgcacttacagaaattgaattccaaacttttcagaatgtcgtggaaaacgacacgccgatcattagcgatttgctgagtgccgacggcgggagagtttgtgccgccggtgatgggactggtggcatttacgccctacataaaagagattagtgggcaactgacgagggaagtgaagggaaaggcaaaggcggatttggcggggatttggcacgaaaagcgattgggcgaatcaatgcgaagagaaagagtggaagcatttaataagtgaataagtaatattggtcaaaagaaaaaccgcaaaaagaatgaaaaaacgtcttctatgaatatttcttatcattttgtaatttcaatgccgaaattgcggagaacggacggcgtaagttggcaaattatataattaaatttgaataaaacttaaccaattggtcacttttgttgccttttttcgagtttgccgcgatgactcaccgtttcaaaaaacgaatcgtttggcgaagtgttcgcaccggcgaagtgcgccaattcccttttttgttccgcggggcgttttggagacgacgaattggtcgagcggcggcttcggcgagtgaatcggcgcgaagaaagcgaagcggcgccaaattcggcgcattcattggggccgacggccaataatttctgttggagtaaggagaaagtgttttgacgccataatttctcaaattattttaataatattttaaattttaaataaaaattgcgttgagtaatttttcaaaggattatgagttttggtccgacggcgaccaaaattaattagcaattttaagaaatcagaaaaaaaaaattgcattgatccagaaataagggcaaatcttacaaataaggaataaatttgtaagatttggacccttcaaatcgaaatatttttttataaataaggacaaaattgaggcccttatttagcaggaaaatttaaaaagaagaaaagggaaagcgaataataaaatgaccaaagataatctcattgttttggtcagccgatgattaaaaagaaattaaacgattaaaaaggacagaaaaagagggaggggggagaagcatcaaaaaccttttaattcgagggagtgccggaggcgaagagctgccgaaagagcgacgga

SEQ ID NO: 10657 - DNA, 1121 bp, Heterodera glycines
  unsure (1)..(1121): unsure at all n locations
tcatatttcgtttagaattcgaaaacaaaacactntcgaaaaagcacagaaagaagccggacagtcaaatcttttctttgtttatattcatattttacaatttttgccatattttttatacgtatatttcgtcccttttcatcagcaacaacaattgcttatgaatcggcgtttgcactttgaagagcgttcatttccgtcgattgtttgaaagtccttccatttccgtcttttttttaccacccgcgacaaacgttcattgtcctccttcaaaaagtttgtcgtccttgctttttgttcgaaaaaagtttttgtgacttccccccccccccattttcaccgttgctctccaccccttccattttccccttccccattttcatccccccccccctcccgcacctgctgttttctccccccttcgtttttgcagtgatcgcgaaatggaagaacaatcgattaagctgacaaatgagctgagttattaaatgcttttggaacgtcgggtaaactgatcaaaagcaaagaaacgttcccacacacacaattcacggttattcattcataaaaataaggataaataaattccatcttccgctgctgtcaattactttgcccatcatgtgaatgtgtgcaattcagcaactactgtagatgcccgaaagtctgcggaattactattatatcgaaatgcttattttaagaaaaaaatttagcgggatcggagtctcagtttttcccgcgagaatccgttcccgcccaactcttaatttttgctttcatacgttttatgggaattacgtaaaatatacgtgaaatcagatcagaaatatcattactattttacgtttacactggcgcttaaataacagaaaccagaaaaaaaaatcggaaaaagttgtcatgtaatttgtgacttggcgactaacaatgcatttattttgcatttttgtggcggtaagatgttaaacgacgcaatgttggtgaatttgatgagattttgcgaaaagcagaatatgcagcttgttttttctattttcacctttattttcatgtataaaaataataaacgtcttattcgtgaccaccttccaaaattagctagaaaaaataataccgct

SEQ ID NO: 10658 - DNA, 2940 bp, Heterodera glycines
  unsure (1)..(2940): unsure at all n locations
ccccccccccccaatgtccgcttgtcgtcgcccccccaccccncgaatttgttggtgtttgtccgcatgaatcaatctctcctctaccataagtggttaacggcgggaatgaaaaagggcatggaattgacgctgcgcgagtacgaacatagcccccctttccccccctctttcccctcttcccccccccttttccccattcccccgtccgttcctttagtctcctcatttgcacaaggtgatcggttggctgttgtttaattacccactcaattttaataccctttccctctatcaaaatatatatttatatgttttattttcacttgcttttcccccatttcagcttttttctgtgcattttattttgttccaattagctctaattatccgtcaattaagtaaaatagaaatttattggataattaagcaatttcctccaaatgtccattagtgtcaacatcaacgacccacaattcccagccgaactttatgagattttcttcgctcgaagtcccttcatcttccatcgatggcccatttggtctctgagaaacgcctctcgtgtggcaaaccaaaggcaatggcactgtccgacactttgccttcttcgctttcccagggacgacgacattttgaacatctcaatggcaattagtggcagaaccataagacgaagcgaccgccaaaggcttttcgatcgcatttcaaggtcgaaatgacaaatcactggccccaaatttgctaaagcaattatttttcgccaaccgtttggatggccagtgattacagagataatccatcggatcagttcacttcacttcatctcatttcctccctaagggatgtgcgaaattttactttctcgtaaaaaattgacttcgtgagtttcgcacatcccttcggccaaatagcgctttttgcattgtattatacaggtattaaacagaaaaaaacaacaacatttatttccgcaattttgtttcgtttcctccattttctcgccaatttccgtccgtttcgtttgttttgctcaaatggccgtccgtcccctccttccgtcctcctgccattttccccgccactttgccgttctcccaaacccccgtgcgcatttgccgcgcccgtgtctgatcagcaatgatcgaccgcatcgtctcgctggcgtagttcagtttgggtttccgtcgttggcgaatgaatcgtcgcacaatgccacaaattctcttttggtaaaaagtgacacagcaaagagaaaggaaggcgtggaacagaggcgacgccatcagaagacaatgcgaaagctgcaaaaaacaaaagcaaggccaatgagaaactgaatttttagcagtgccatattagggtgtaatcattaccgaataataaaagccaatggcaccgggttgggccttttcatctgcagcaccagtggtaatttggatggacaaattggtactgagtaattgaaggaaaatcccgaatttgccgatggcatcgacacaaagaagacaaaagaggggaagggacaaatggtcgacggagagagagccgaaaaaacggcggagcaaaagccgatttaggaagagaccgacgagggcacagccggagaaaaccaaagagaggagaagcggacaaaacaaagacaaaagtctgaagggaagcgaagtcaaaggcgcagaaagaagcaccgactgactgaattgacctgatcagattagctgttctgtgctctgtccacaaacacagcaaatggacgtccaacggaaggaatgccgccacgaaaggaattgtggaaacgatggcacacactgctgcagggttggcatcggcggagtaatgcttgaacagcgtcaaatatcgatcaattgaaacaaaagaaggacaaattgctgagcaatcacaaatgtatccacaagttcagtttggatgaaaaactaaacgaaacacatttggaaaagcagttcaaaagtagctaaaagtcactttggcaaattgccaaagtgagttttttggatggggcggtcgagtgagaaaaagcaaagtgtcgaaagagtcaacgtcgtagaagacatccagcaaaagtgtatgaacaagaagcccaagcgagagaagtgtgttgcacacggcgagagagcccacgagaaactgaaccctgcaattggggggggggggcaattaaagtctgttaaaaatgcaacacatgtgggggtaaattaaaacaagttaaagtgccatggggggaaaggtcagttgcaagagcaagtttcgatcaaagagatcccacaattaggcaccaattctcaatttcctacttttgaatgtgaatctgttgtcgactttttccaagagaaaggtaaaggacgaaaaagttgagtgcaatagaaacagtccaagtcaaaagccaatcgagagaaacgaaaagtcttttgccgacatcggaccattctatggcatcggacatgatcagaaggcttctaaaatttaaagagagcgcggcattcacaacgctagcaaagcaacagaaaaagacccatccgcggcgtatttaagcgaacgattggaacgatggaagagcaaattgccaacccaaatgtcggaagagggaacgacgggggcggggggtggaggaagcggagaggagccggcagaggaaggcatcagccgaagagcatgtaattatttaatcataacaggaacattgatggatggcgtgaatgattggcagagagtaaaaagcactcacaatcaacagagatggacagagcaaaatgtacgggtgcaaaggctttttgcaacttgacgaccataaaaataacatgaaacttacctaactaacgcttcataactttttcatcaaagatacaaaataaacattttggtatcatttgataacttaaaaaaggagtattatgtagtctataaatttttggtcatttttta

SEQ ID NO: 10659 - DNA, 1457 bp, Heterodera glycines
cctcagaatatccaatcacacagtgattatgaggtcttaaccatgtctaaagtaaaatctgattacatattcgtgatcagcggcccaaataacccctaaagacatatttttggaggatttttggtgaaaaaaatttcccactcaaaaatcatggtcacacccatttggtcccgaaccccaaaatcacttttatttctataacttttttcaaaaaagtgataaaaagctaaaataaaatttataaaatagagcaaaaaattgcggattttttgagtatatcatttttataaaatactttttcagaaaggagttaggaatttttttctgaaaaatcgaaaatttccagattttctagaataatttttttaatttggaagatagaaattccaaataaatctcataaaattctcctaattttttgctatttttcaaactttattccactaaatttgaccaaaaacaaagagagttatgaattttcaaaatttcactggattttccggggctcaaattttgacgatttttcaaaaaattttaaacacttaccaaaaagtctgaaactaaaaataaagtatataatcaagttaagcaccttaaattaggccataaaaatgcattttggctaatttaggagcaaaaaaatttttcatgaaatgcaaaaccatggggtcccccctatggttttgaatttcaaaatcacaattaatttcataactttttttaaactcgtgataaaaacatgagataaagcacattagattgggctttaaattctctacaaaaaagctcttagacgatttttttataaaatcaactcctgacgagttattgagccagaactgaaattgaggcctagcaaccaaaattttctatttccaaaaaaattttgaaaattttttctgaaaatgacaccaatcgatagagcatcaaaaacggttgcttgaaagtggtctccgttttccccggaaaaatctgtaaaaaatactaaaattcaaaaacctcaaaagtgatgagggggcctagctcgaaaatttctgaaaatttcagaaaactaaaaacatggttggatagagctcgtcgagctgtacaataagtacgctggcgccgcacagctcagcgcaatgcccagcgagttattcccgaaaaacacaaaaaccggaaaattggaaaaaaatttttacaattttttgcaggccagggctttggtgctaggggctaggtcaagaagaaaaaaatttcccaaacattccaacttagtcgcctcccagcagaagttttttgctccaggttcccagaaaaaagttatggccccaaaactgcatgcatttttcctcaaaaagccgtttcagcgccgctggcgctgaactggcccccagatcaaaaagtctatagttttcccagatgcgccgtcaaaaaagtggttaagcaatgtcacacttaaaacccaccctcggcgc

SEQ ID NO: 10660 - DNA, 1953 bp, Heterodera glycines
  unsure (1)..(1953): unsure at all n locations
ttttcctggggaaaanatcggcaaaaaataataaaattcaaaaacgaaaaattttcgagggggcctagctcgaaaaattttgaaaattttcaaaatctgaaaacgccatcggatgcagctttaaaaactgcacaaatgctcaagcggcgccaacccgctccgcttaacccccagcgagttattcccgaaaaacgtaaaaccggcattttgagcgccgttcagtcgccaatttctacaggctcggcatttgatctgatcaaaaagtgatcagtgacaaagttgtagccaacatgtctggggtgtgccctctcagcagactttttccgctcccggtttccaggaaaaagttacagcccgaaaacggcgaccatttttcaaagttggccgtttcagcgccgctggcgctcagttggcttccggaccggaatttccttatttttcccagatgcgccgtcaaaagttacccctgcctgcaaaatttcagccccctccgggcaaaccacgggcacttataattttttctacgaactgcaacattattctatatatatataaactagcgtgaccagttggaattgatgggggtccggtgcaggcagtttgcttttggatgaagagaaaatggacatgctcatttgttattttaaaacatacaaaacattaattgcattagtgtgctgttttaaagcgctatcgcgctatgggacgcggcttcgccgcgtcgctagaaaatgatgtaatttagaaattcatcgcagcctcaggacgggcgctttgcgcccgttttttaattttttgaaggacattcggccgcttcgcggcctcaggacgggcgcttcgcgcccgtcttaattttttgagaacattcgtccgtttcacggcctcagcacgggcgcttcgcgcccgttttgtaatttttttgggagacgttcaaccgcttcgcggcctcaggacgggcgcttcgcgcccgttttgtaattttttgggggacattcggccgcttcgcggcctcaggacgggcgcttcgcgcccgttttttaattttaatcacacagggattctgaggtcttaaccatgtctaaagtaaaatctgattacatattcgtgatcagcggccaaataaccctaaaatcatatttttgaagacacacccctttggtcccaaattacaaaatcacttttatttctataacttttttcaaaaaattgataataagctaaattaaaatttataaaatagagcaaaaaattgcggattttttgagtatattatttttataaaatactttttcagaatggagttaggaattttttttctgaaaaatcgaatttttccagaaattctggaataacttttttattttggaagatagaagtcccaaataaatctcataaaattctactaattttttgctatatttcaaactttattccactaaaattgaccaaaagtgaagtgaattatgaattttcgaaattccgcttgatttttggaggcctaaaaattgacgatttttcaaaattttttaaccaccttccaaaaagtcggaaacgcaaaataaagcgtatatacgtattcagcacctcaaattatgccataaaaatgcattttggctaatttaggagcaaaaaaattttcatgaaatgcaaaaccatggggtcccccctatggttttgagtttcaaaatcacaattaattttataactttttttaaactcatggtataaacatgagataaagcacattagattgggcttaaaattctctacaaaaaagctcttagacgattttttgataaaatcaactcctgacaagttatagccacgagaactgaaattgaggcctaccaaccgaaaattttctatttccgagaaaaattttgaaaattttttttgaaaatgccaccgatcgcgtgtgcgggaaaaacggttgctgaaagtggtcttcgtttt

SEQ ID NO: 10661 - DNA, 5088 bp, Heterodera glycines
atttgtgtacttcttcggcgggtggcgccgtttctacgtctccaaaattcttctgcggctgactttgctccaccgctgcgactttgtcactatacgaacgaatggacgaagtcatttcatttgcgattgaaagagacataaacacaaataatatggccatctttcgcaatttaaacgtttatatagttttctctccgtcaggacgccgataatgttggcagtttattgggtacttaggcactttagaccataaaaaaaatttctttttaaatcatataaaaaatttctagggggttttcggggtcgctaatcacgaatctgacatctatttctaccaaattctaactccgaatctgtattcgagttattttcgcaccataaaatgattttttgaaaatttgaattttcaagtttttgttcgaatacgggtcggggttcgaattttgtcgaaatggatgtcagattcgtgatcactgatcagcgaccccaaaaatcctttagaaaatttttatatgatttaaaaaataattttattttttatggtctgtaaagtgcataagtaccgtttattgcgctgtgaaaacgagtctaggtattctcggttgccgagcttaaaggttcttcattcgagctgggattttatgtaaataaataatttttcctggatttctacacgctctaattcccggattaaaattagagatttttcatcggacgaattctagtgtttttggcaaattttatttttacaccttccgtttttcggattgatatgcgaaaatcggatttgaatgattcgattaaattccaattttgactacataggtattttaactaggtataatgctggcaatcatggagtttactggtcccgttttttttgcttttgaaaatcttggaaaatttttctaattgttctctttgtatagcgccgctaagcctatgtgcaaattgtctgtgttgtatgagttgctattgtacgttttaccgtgacaccaatttcacaagagagcaatgccatcatcgttgaattcaaataaaaaaagaaatgctaattaccagggcacttcctcagtcaaggaaatcgacgaatcattaattgaaacgacggtaattagggcacagagaacaaaggtccatattcagttcatttgtaccactttttcttcactctattttgtttcatttgatacaaatttagccaccaaaaacccccaaaatcgacggcaatggcagtgccggacagacgccgtccccttcgcgccctcactaccaaatgaacgcactcgaggccgcactgagtcactatttcagcccaaagaagcgctcccccggccgtccggcgcaaaggtcaaatcgaacggacaattgacgatttttggaaattgaaatataagtcaaattcgctttttgggagttacagctttaaaatttagaaaagtgcaatttgatgatacatcatcacattcggaagggtctgatggggaagaagaagttgaggaagaacgaaagtcggaaaaatggaccaaatgcgattccaacagaagcgatttcgccgctgtcaaatgttgctttgaagtcgtgcctttttatttattggacataatgtattcatttagaaattggacaatcatttgccttggaagttcaaaaggaatctaaacggagaaacattcggcagacatttctcccaatggtttcactttttggagagcggccaattcagtattttagtgagcagttagttcattattgtttttcacatttttttgggatttaaactgttattccaacattcatttttagctccatgggcttggttcaaaacgtcgaattttggaggattttcgcgactttctgtccctccgaaaccgtcggtcgttcgtcggtgatggtctcaacccttccgacacaatgccaaaaatgattgaccgaatgacggaagagctaaaactgaagggaatggccaaaacgaaggaaaaatctgtcgaagcggcggcaaaaggtaaaacaatcagaaaatccgtcccattttttctcttctgttatcaaattaattttgttaattgggctggtccgccactttcctttctcaaaatgccatcctttgctgtggttttggctagaaatcgaaaatattgcgaaagcgaatcattcgcaaaaattcttttttttgttcctcacgaaatattttgctttgtaatacaattttatttttgccttttcccttcgtttagctttacgaaatgctgtcgatgctcagctgcgttttccgattgttttcattttgctgaatatcgactcgccccaactgaggcccgtcagacaaatgccctttttggtagcaccaaactctgttcagatctcgggaacatcagaaggccctttccgtgttggccaagtcgagcaaagtccaactgatcgcttcggttgaccacgtcaacgctgcgctcatttgggaccaagtgcgacattctctcataatttttttcaaaattgagctatcaaaaagggttttttgtttgaattttcactttttgcgcctctttttgccttttttctgtccaccgtttccccatttccctttcagtcccttcgcgatgcgttcgcttggcttcacttcccaatttcgactttccattgctattgggccgaagtgatggccagtggaactgagttgctcggccttgacgacaagggaattgcgaaggtaccattagtccaaaagtgacggccatcgaccgaatggtcggactttttcgtctctcttcctcagcacactctttcctcgttggacgccttttggggggcgaccacttcgaacatgcgcaaaatcctagcccaactggcgctgcacgccccgtccagggaggaccgtggtcgcatggatgcgctgggcattccgaagttctgtcgcattttacggtaggcagatcgatggaaatgccaatatttctttaaatttaacggcaattcgaattcgtgggttcagagatgagttcgccaccacttcggagactgtgctcagacagcagctgatcgaattttgtgaccatcgcatcatccaattggacaaaaacagccacattcacttggtacgaacattttaaatgaacggaatgaaataaatggcaaattgcaatcaaaaaaaaacagctggtggaccgtcaattgctcaacacttttctcgactcgaaaattggcaatgaatgaaaaaagaagagaaaagaactgacgactcaatttactctttccttttatttgattttgtttactcttctaccgattaactctttgaactttaatttttcagtttaaattctctgtttggtattatttgtatttattattattcggtaacaaagagaaatccctaattttgtgaaattattaattaatatttgaattgtaataagtgaaagggaatacatttttgaagcatttataacaacaaaaaataacaaagatttgatcataaaattggccaaacttttaaaaaaacggaaattctccccccgtccctccgtttataatgagcaaatgaaaattcaattgcctaaggcggtgactttattcttccgtttgatttgctcccgaagaaaggcaaatgtaataaaaccaatagcaggcattgaaggcgatgaaaagagcggggaacattttggcggagagcttaacaaaaagcacaaacattggacaccaaaagagggctaaagcatggaaaaggcgagggaattgagacggtctccggggagaccgaagcaaagccccccaatacaaaaagggaatgagcggacaatccgctgggacttccctttccgatcggtccgacccaatccctgccacgggcgactgaatgccggggaggggccgaccgcccgactcacatcgtcgatgaattctccgttcagcatgtaccaactgtcctcttccccatcctcggccattgaacgcttccagcgtggtctgctcgtctttcgttccctcgtgccgctcactttcagtgtcaccgatttggccgtgccgttgtccattgatccgccgtttgtacccctcgaacctcttttctcggccatattttctgctgctgtttggcatggcattggcacagttcccaattgcccccccttctgatcagtgatcacctcgaaatgcgtgggtattgggcatcgattggcgcgaaaaacggttcatccgggacagccattgctgctcgctgtccgagttgaccatcagaaactcttttgtcctttgcgttcggcgtttgcgcgcctccaatttgtcaaaaaagccaacgacggccaactttaggggggagaaactttcgaattcggaagtgccattttgttcctttcataagtaatcaaattcttttgccgtccccccccccaattccattggcacccgccgtttcgccccctccaaattttgtccccccccccctccctctgccccacttcgacaagcgaaaggaaaatgaagcccatgcagccgaacatccaaatgtccaatgcctttacataggaaacgcgcggcaaactgagaaaagaaatggcaaataatttgaaaaagccatttcaagtcgaattgctcactgattggacagagttttgaacattcacttactttttgacgatatttccgaactgaaaagtcagtgccatcagtgaactgacgccgagggtaatgcgagcgggaagtgccgaagtttggatccaaaaggcaatccaactgatgaacacggacagataagtgggcatgaaagcctatgggaaaaggggagggggaggggagacggattggcactcgaagtgacgagccaacttggagaatgtaaaagccgtacagacgacgaaatttgaacaccacttccaattggtcccaaaggcctgaaaaggggggactctcaaaagcaaaagagcagtgaatggcaccaattggacggatgacaaagcgacagagaagggaattgaaaatcaaaataatgatgacacttttttggagcaaaaccattggccaattcttctgccgaccgttcgcccgtggcgattcatttggcattttcacacaaaaggacacttcattccg

SEQ ID NO: 10662 - DNA, 1188 bp, Heterodera glycines
  unsure (1)..(1188): unsure at all n locations
attccatgacttggtccatttttacttctcacgtcttctttcattacatttttaagaccacttcaatgggcgcgtgtatttatttttttgccgaaatgactaacaattttacacacctatactccctttttttcactcgtttttctaattgccattttttaaatgttacccccaaatttgatggccttaggcattccatatgagctgaaggcccatgtgtggggcgtctgttcgggcgcgctcgtcgaaatgcgcatcaacgagggcgaatacgcggcactgttgcggcgcagcaggcacaacagcgcggcattctctgagctgacgatggacgaaattgagcgcgatttgcatcggtctgttttattttgcatattcggtggcacattttttgattggcacaattagggaacaggccccaatttttgctaattaccaattatttaatggtccgtgaatctgtcatttttaatttcagttctttgcctgagcatccggcattccaaagtgccgccggaattgatgccctgcgccgaattctcacgggtgccgatgcctaattaaacaaaaaatatttttaacaattatttttcagcgtacgctgtccgaaacccaacaattggttactgtcaggcgatgaacattgtgcgttttggcccggggttgtcactgttcgagagttggtcttgaatcccttggaaatcgattgggatgtacgagatagagtctctcgtttcccgggtctcggttctcgatctcgataaaacgtttcccccaatcccctaacaattctaatccccttttcaaagcttgggggcatttcatagagaccggggttttattcggggctgaaaatttgtctaaaaactagctttaccgtatattctcccatcactgctcacagattacgtccgttctgttactgtacgccccggaggagttggctttttggctgctcgttgccgtatgttttccgcccatttaataaaatgaaaaatggatttccctnaatcttcgattgtcgtaaattttaggtctgtgaacgtttgttgcccgactattaaacacaaaagtggtgggagcattggtggaccagngtaagtgactgatctcttcgctgatcacccattttgatcgcattattcctattatttttgtcgttcccccccccccccccccccccccaag

SEQ ID NO: 10663 - DNA, 3261 bp, Heterodera glycines
gcgttggaaatgttgcgcgaaaatgcggaaataattgtccgggcacgggacgagggcgaagcgctggtggcactgaacgaattcaccgacaaaatcaccgattctaccgtcaaaaattccacgcaggtgaggggaatggatcaaattggtacataattgttgggatggatggaatttggcacataattgcgagtgatcaatttgcaattttttttttttgcagattttcatcggcgatctgatcggcaagtcgtacaaacactttgcggacacgttcaccaacgaaaccattgagaagctgaggctgaaacatcggctgaaagtggtgcagaatttggaggacagtcaggtgggcaattgcacaatttgatgagtgccaatttcgaaggtttttggtcaactttttttcatttgcatcatatggcggtgcctattgacaccgctggagggaaatttagacgaattttataagaaaaattccctaaattttcaagaaaaaatcctcctatttttctgttgtaaatctccgctgaacagatgaagtccatcgtgaagagtgtgggccgcgagtgccgtctgctggccgacgagctgtgccggctgtacagcgtggtgcgtcaggaacagctgttgacctggagaggcgtccgtctcactggaagcagcgcgacggggaacggcgacggaacgcaacggcacgacaaaaagacggcggcggagcgcaaggcgagcagcgccagcggtcgcgcgggcgtcgaacggtgcgaaaaacagctgaaaattaaatttaaaacatttaattgcttaatagaagactaaacgagatttttggcacagtttatgagactgggttttgtgatataacttaaaagtaacacgaaaaattcttaaaaaatatacgaattttttccgtcattgcacaaatttctgatgtcaattttatataaaatgaattgggtaccaaaaaaccaataaataaataaatatttggtaataaaatttcaatatttacactattttattaaatctaatggtgtataattgaacaataattttccttttattttttcgcctaaagattggcaaaaaaatggtataaaaaaagtgcgaaaaaataaaatggattattttaattatttccacaaaataaaaatgtttttcccttttagtgctcctccccgtgtcgacccgtgtcttcagtcgtcgcagcaccaccagctggactttgacctgttcgcccaaattttgagccgttttttgccctggcgacccggcgacgaaattttttatgtccgcgcttttcgggtaaaaaaaaattcattttttttattgccaaaaactgagtctttaagcttttggatgcgaatgagacgggcattttgacgtttcgcgacttgtgctgtttccttggcattctgttgaggggcgacccggccgacaaaatcacattgttgtacaggtggcacatggcaaatgattggggcggttgaaaaacattgaaaaaaagcacggcacaataacttcctctttttcttggtgcaaagatgccacattccgcccgccttcaacatgtccgacttggacgagctaatcagggagtcgccctcatttggtaagaaattgtaaagtaaatttttaaaccccaaatttcggcatgccaatttaaaatgctttaaaaatatggggaaatacggtcattttatcttggcaaatcccatatctggcaaggcattttccaaagctttcctcctgccaggtgccgccgagttgggcgtcgaagcggcacaagcgttgggcagcgcggacgcatcgccggaacatggcaccgccgctggcactttggctgcaacttccgtcgtgccgtcctccggcattggcaccgatggagcgcctacgtcgccaatgtccaccaccgtttcttccctttcgtcatctctcgcaacaacggcagccaattcaccgctcaaacattcggtcagcgattcaacggtgtgtttacaattgaattattaaatgttcgagagtctcgactcgagaaaattcccggcatttaattgcccctcccccttcggtttgtcagattggcaagtgctcctccgccaccggctgctgcgcctcctcgtcgtccctctcctcctcccttcgaccgcccgtccgttgtccgtccgtcagtgcgttgcactccctgaactcgtgctcgtcgttgcccagcgatgcgaccaccgaagcgcgcagcgaattcagcggtaaatgccgcaaaaatgcccattttatcaatcgacaccgtaacacgcttatttgttaagatttctcccttttgaacgccaattgcaacgcgtccgacctcggcagaagcaaggacagtgttgcggcaacgacaatgacgacggatgtgcatgttgccgcttcggaacggcttgcgcgccgtcagcgattgctcgacgagtcgccgcagggcgggtacgttcagcagaggatgatcatttaaatgaattcatttatctaaattttctttgtagtcgcagcagtgtcggctcgtcaagcgccgcaattatgcccggggcacgccaagcgctgcaaccgattacacaggtgggtgacgctgtggacaaaacaaacgggaaaagtgccgtagggacaggggccgggggcgatgtcccgagggtgatcttggtaatttacccaacaaaatatcgcaggttcaattcatccaattctggaaaacattctacgacatggctggcagcatcagtgccatcgctgctgacagtgttgttcatcccggtggtggaggtggcggcattttgccatcgtccacgacatcgtcgtcgtcgatggccaaccatgacgtgtcatcatcatcttttgtaaaacaccagcaggacgatgccggcggccacggcactgtggcggatgtgtgtgagacggcggtgcctgcggaggaggcggacgcgcaactgtttcacgcgctgtcctacgtgggcactctgctgctgcagttgggcgaggcgcaccgaagtcggaggtggacagcaaaaaatgttaaaaaagcattataaagcagccctatttttggcatttttgggggggggggattgtaattgtactccttgccttctaacaatggaaaacaactttcgaagagaggaaatcgagcgacaaattgtcgatgcattgggtgaagaagcgaaggcattgttggatttgacagcagcgaaaacaacggaagaagacgaaattggggaggagcagcagcagacg

SEQ ID NO: 10664 - DNA, 1654 bp, Heterodera glycines
  unsure (1)..(1654): unsure at all n locations
catcattctctgactgtncattcccttgtctcctctcattttcccaccctctctcgccgtctctctttttctatctactcctcgcaccgttaatgggactaatgaaataccttcaaacttttaattgagtcttttgccactttactttattggcattgatggattttgttgaatgcttacaatttcaggtttccaaatgctctcttctgtcccaattttcaatactctgctgatggagatgatgatgatgatgatgctgcttcttttggttgtgatgtgtgttatgccaaaagtgaccacattttgtgtccccgagggaatggaatcaaaacggcgacttcgcaattaccaataatttaatttgttccttcaaccaacaccaaaattccttcttctatttttgtatttcattttgtcggcacatgcaatttttaggaaatatttttaaatgtttgaatttgccttattccaatttatttgtttattttttgtttcgcttgctctctctttctctctccgcactttttgcccatttattttattattattattttttagtaaaacggttttcgtttgttccttttccttaattctctcccctctctctctctctctttctattcctactgtaatgatactgtaatgtgtttgatcaggttgtttttatcgtgccgagactcgatcccttttcattcaaattttaaatttttcctaccgacaaccttcttatacagtatccattacagtagtattcacctttatctgttgctgctgctgatgttaacgcgagtgtatactgtaatttgttctgtgcctttgttctctttctcttctttctctctaatttacaataattgtcagagttcagtctccctattacgcgttgtatacttttaggcacaatttttgcaaatttattttaaaataaaaaaattctcctttttggccccttctgacctaacacacacacacagaaattgacatgccaaaagcatctcccctattgctttaggctggttaattgcgctattattgttatttaaaaccaaaatgtcgcccttaggccaatgtctccaaattgaaataaattgataaaatatatattttttgccaataaagaaaaagtccggaaaacccgcttacgttgaggatgtgaacaaaaattaaaatgtcctttcgaaaatgtagtaaaaaaacggaaatcaccaccgaaataaattaattaaaaacttaaaataattaagtaaatcaataattatttctttttaaattaatttttaatttaaaaaattatttctttttttaacaatgaatattttatgttatgatcgattgaccggcagaagggatgggctaaaggaccgatcaacaagtggatgaatggataatgatcatcccacacaaatctttcccgaaaccaatcatttctatttttaagggatggactcaattactaattgccaaaaaaattattattagttggcattcaactgttaattgaaatttcaaaaccaaataaaactaataaaattttacgattttaaaataaataagctaaaatttaaaactaaaaattataaaaaattcgaaatttatttaaaataaattaagattagtcttttcatttcttccactttccttccatcctcttaag

SEQ ID NO: 10665 - DNA, 1215 bp, Heterodera glycines
ggttattattctatggtttcacaaatttttcgattattttgagtattttaaaattggtttttgaaaaaaataaatgataattgcatttaaaaaatttcacttcacttttttatttttattattataataaatttttatcgaaagaatttatttttatttgaaattaaatgaagaaattaatgataatgtgaggtataattgagaattttcaaacacaactaatcaaacaaatttatgaatgtcatttatgctggattttaatagaagttttggaggaaaatcatttcgggggattccgaatgtcccatggattcctaagaaaaatggtttcctttttacaaaataagcccggtgccgagttatgacgtgccaaattttatagttttttatgtataaaaaaaaatttgcatgtattttatctatttcaaagcttttaaaatgcatttcatatttttaataattttcattgcttttaaaattgaatccggcaaaatccgaccaaattttggcgaaatattcggcaacgcatgggacaataataaaagagaagaaaaagcgatcaaaattgaacaaaatgagcaaaatgataactcagcgacagttgatcaaatgggtgagggaaatggaacgtacccaaatgatcaaaagaaaagtgaaatcattagcaaatttgatgcaattaaacaaaagttaagagaaaaagaaaattttcacgaaaagaacagaaataaaattgctagattattaggcgcaaatcgccataaaatatataaatggaaaaaagaattatatttaaataaaaataaaattttttatgagaagaaaaagagagaattcattgaacgatttgatgaatttaaaagtttatatggccaaggaaaacagaaagaatttgtgaaggaattgggcatttcttatgacacatttcgcaaatggaaaaaagaattggtgccaaaatacaataaaagtaagataatttgtttttctttttttagagaaatttgagtgaatttattattctccaccttgcgcagcgggtttcaaaatttggtcgacttttgcccggattcaatttttaaatcaatgaaaattactaaaattaaaataccacaacattcaatttataattatttttaaatatttttttgaaatgaaaatgagtttgattaatctttgagcttaattaattaaaaataactgaaaaagaaatatttt

SEQ ID NO: 10666 - DNA, 1786 bp, Heterodera glycines
ctaattatccataaatggcataataatgcccttccccaccattttttgttggcgagaatttgaggcggagaatttctcggcttttgctactaggctcttagtaggtttttttgaaatttatcaggtattactttcacagggctcatttttttttgcaaccccatatgaataaaaaaattttagttttaaaaattttcctttttcgaaaacgttataaaatatttaataatcatttaaatgaccaaaattatgttttttggttaagttttacgtgttttgcgccctaaaaatccttaataaaaaatttttaaatgccttttttcatgccttttttgggattttcgtgccttttcatgccttttttcaattttttggtgcctattataagtgcctttttttgcgagctctcattatggcagataatttgcaaatgaaagatttaaaacaataaaaaataataaaatacctaattacgacgttgactcttcgataagacgactcatttcatataaatttttttggaaaattttttgttaaaaatcttagtgaaaaattgattgcattgctcagaattacgcgacaatttaatgttggaaaagatttattatgagaaaataaataataaaataaatattaatatttaaaagcaaataaaacactaaacatattcatttactgcaatatctttaaattttataaatattctaaatactaaacatgaatttgtggcttttgttatttttaataattttcattgcttttggaattgaatccggcaaaattcgaccaaattttgatgaaatattcggcggagaatgggacaaaaatgaaagtgaaaaaatgttgataaaaattgaacaaaatgagccaaatgtgaaatcacaagcagcagttgatcaaatgggtgaagaaattggaagtggtccaaatgatcaaaagaaaagtgaaatcattagcaaatttgatgcaattaaacaaaaattaagagaaaaagaaaattttcacgaaaagaacagaaataaaattgagtggaaaattggaaaattattaggcacaaatcgcgacaaaatatacaaatggaaaaaagataaatttaaataaaaagaatttttatgaggacaaaaagagagaattcattgaacgaattgatgaattcaaaagtttatatggccaaggcaaacagaaaaaatttgcgaaggaattgggcatttctaatgaaacatttataaaatggaaaaaagaattggtgccaaaataccataaaagttagaaaatttttgtattatttttaattttttttttcgttttaagcacaaaataaatattccaatgaggacaaattgagaaagatgcggaaatatcgcaaaattaaagaaaacaatccaaaaattagtgacaaaataattgctgagaaattgggaatttcattttcaacactgaacaaatggaaaacagtttcattttcgaattgaatgattttgaagtgtttagaggatttttgatttgaatggctttcgtctttatattatttttttttcttttccgatatttttatcataaataaaatttcgctgatttccaattttcaagtgcccgtttttttaaattttctgctaattattcaatgttttaataaatttttagattgaatacttttaaaataaatttaacacaacgaaacaagagatcgtgttttagacagggctcgcagatgaaaattttcaaaagcctaaattggcaagaaaacgcctcattttgggttaaaaagcctcatttttataaattt

SEQ ID NO: 10667 - DNA, 2319 bp, Heterodera glycines
  unsure (1)..(2319): unsure at all n locations
cctttattttcttaaaatttgctcaaatccgtaaaatttggccatttttgtggacaaatctgttaacaaatcgtattaaaaatcacaaaatttttcccggcggcgcctatcggcaccgccccggctccccttattccccaaaagtttttttttttttgaaaaagcgccggaaaaaaatcaacttcgggttttcatgcttagaatttcacaaaatgtttacctagttctacaaaaaattgctcaaattgatcatggacaatcaaaaatagaatatttgaacattttaaacgtgttttgaataaatttctaaaaatgaggctttttaacccaaaatgaggcgttttcttgccaatttaggcttttgaaaattttcatctgcgagccctgtctaaaacacgatctcttgtttcgttgtgttaaatttattttaaaagtattcaatctaaaaatttattaaaacattgaataattagcagaaaatttaaaaaaacgggcacttgaaaattggaaatcagcgaaattttatttatgataaaaatatcggaaaagaaaaaaaaataatataaagacgaaagccattaaatcaaaaatcctctaaacacttcaaaatcattcaattcgaaaatgaaactgttttccatttgttcagtgttgcaaatggaattcccaatttctcagcaattattttgtcactaatttttggattgttttctttaattttgcgatatttccgcatctttctcaatttgtcctcattcgaatatttattttgtgcttaaaagataaaataataattataaatttaaaaattctctcacttttataataatttggcaccaattcttttttccattttataaatactctttcagaaatgcccaattccttcgcaaattttttctgtttgccttggccatataaatacttaaattcatcaattcgttcaatgaattctttctttttgtcctcataaaaattctttttatttaaattcaattcttttttccatttgtttattttgttgcgatttgtgcctaataattttccaattttcacatcaattttgtgtcggtctttccgttgatattttcctctttccttaagcttttctttaattgcttcaaattttcgaattatttctcttttttgttgatcatttgggtctgtccccatttcttcacatatttgatcaactgctgcttgtgatttcacatttggctcattttgttcaatttttatcaacattttttcactttcatttttgtcccattctccgccgaatatttcatcaaaatttggtcgaattttgccggattcaattccaaaagcaatgaaaattattaaaaataacaaaagccacaaattcatgtttagtgtttagaatatttataaaatttaaagatattgcagtaaatgaatatgtttagtgttttatttgcttttaaatatcaatatttattttattatttattttctcataataaatcttttccaacattaaattgtcgcgtaattctgagcaatgcaatcaatttttcactaagatttttaacaaaaaattttccaaaaaaatttatatgaaatgagtcgtcttatcgaagagtcaacgtcgtaattaggtattttattattttttattgttttaaatctttcatttgcaaattatctgccataatgagagctcgcaaaaaaaggcacttataataggcaccaaaaaattgaaaaaaggcatgaaaaggcacgaaaatcccaaaaaaggcatgaaaaaaggcatttaaaaattttttattaaggatttttagggcgcaaaacacgtaaaacttaaccaaaaaacttaattttggtcatttaaatgattattaaatattttataacgttttcgaaaaaggaaaatttttaaaactaaaatttttttattcatatggggttgcaaaaaaaaaaatgagccctgtgaaagtaatacctgataaatttcaaaaaaaaacctactaagagcctagtagcaaaagcccgagaaattctccgcctcgaaattctcgccaatcaaaaaatgtgtgggaaagggcattattatgccatttatggataattaggctaaaacttcagaaaaattgaataatttaagaattttattcgagttttgaaaggtcaccaactaattataatttattttagatgacttttagctctttgctanaatttgtgaatttttttttgattttccatattggttnctttccntttacagtttccctctcccaatttttcattaaaataattattcgtaaatcctaaacaatgagaaaatttcgaaaattt

SEQ ID NO: 10668 - DNA, 2864 bp, Heterodera glycines
  unsure (1)..(2864): unsure at all n locations
tgctgctaggcgacgactcaacanttttgagtggccaacgtgatttgtgtatcagcagatgacacactgtgttgcgaagtcataattgactccgctccggcttttgggggtcttccccttcttttacttccaatggaagaagccggtgtgcttaattgcaaagcactaatattgggcgttgtggtgcccgggtgtgatgccaccccattctcatctgcacttccgtcagggacgggtgagcgaccagggctgacagatttctccatctgcctttggtaccgctcttgctccttctttcttttagcgtgttgttttgaaggcatctgaaaacaaaaatgaagcaatgatgtgtacatgcggcaaaatatttggggaaaacaaccaataaaccacattaatcaaatatttatcaaaaacattgaaatgtgaaaaattaaggtccatcttccttgtttgccacagtgatgccgctgcgaatcaaacatgtccaatttcgcacaaaaggtcattgagtgcagaaattgatcgctcacacatcccattaagaatgcagataaaattatgcattttttgtcgaatctttccccagtaggggaaagatcagcatagtgcgaactacaatcctttaagggactggccattgaaccacaatcctcaaaaggcagtccacatttattttgatgaactcagatttcctacgttacttctcaccagtccactggtcttgacaaagtgcgggaccagcttcgcaccggctgttggccagcaacgataaggaattcatggcgccaccattgagcggcccagccacatgcatctcttggcgagagcaagtctgggcttgctttccatatcatggtcgcaaagcagaccgatatgtgtgccatggtcgcgaagcagaccggcactgtgtcatggtcgcaaagcagaccgacacggttggctatggtcgcaaagcagaccagcctcgccatggtcgcaaagcagaccggcgtgagcactacatatcatggtcgctaagcagaccgatatgttgccatggtcgcaaagcggaccggcacgtgcacaaatctcatcatggtcgcaaagcagaccgataagatttgcaaacaaataaaaaatgtaagtctcaaaatgggaataggacaaaaatctttacaattgactcaactgacattttttttaaagtttactttttttaaaagtttacgtacatataaagtttaagtcaactgtaaagacttcttaaattcatagagcttacacgtgccaaagtgtacgaaacttatttcctaactaacctcagatttgggttagtaaaactatttactaagtgtacactttgccataattttgttatatgtgtatctgaaaatattttgttgtattcaactcagtcaaaccgatgaattttatatattttaaccggccaaggaatttccttagaacattttttaatttacaaaaaattagtggaaatggtttcgcccatcaatgcttatttcaaaaaatcacaataattgattttaatagaatgcaaccaaaagcttttcagctaaaaacatttgaccggttaatttgagaaaaattgaaacatgcacaacaatccacctttgccattgaaatgttagtcctcagcgcatcgaaacgttgcaaaagcagtgccaatttgaggcgagttcagcaaggccacagaaggggaaaatgtccatccaaacgtcgttgcgcacgtgctgaaagtcacgaaaatttttataaaattgcaaaaacacaaaacaatgaaaaaagcttaaagtaccaggcacttttaaagaaaatacataaaatgtttgttgaatttttaaaatttttattttcagagccattttgataatttgaggccattataaactcttgacaagctaagtctaaaaatcaaagaattagtttggccgatgccatcagagcactgggacatctgagtcgaagtgaaaatggacatttcagttccaaagaaataatggatggataaaataataattaattttagatttagctcgtcaagagctttcgaatgataccaaatttgagcgtttaaagggtctagagccccccttttccttcaatttttcgagttttaaaccggttcaaaaaccggtttaaatgcatctccgcatctaattttaagcttttctgtcattctcagcacctaagaaaacctataaacatgtttttaggatttttttttgagttggtaccgtattcggcaattttaccaaaatatctgttggattagtaaactttttagtattttcagactcatttgagaccattaaacttttgtgcacaaaatccttcaaaaaaaacaaaaaaattcacttttacaaaaaattggaatttgaaaaaaaaatttctgaaaaatttttgaaaattcgggccgttatgatttttcgggccgtggccaaaaaaacagaaagaaaacccaaaaaaaacttgccgaatttataaaaaaaattcgttggtccatcaaaatgtttgtccaccagcgcatagaattggagcgaaagcagtgccaatttgagccgagttgagcatggtcaaaagatgggagaatgtccatcaaatgtcacatgctgaaaaatttatgaaaaataaaaatcacaaaaaaagattccagaaaaaaaacctaaaaaaccccctgcattttacaaaaaaacgccgaattcggaaaaattttttattatgagccatattgaaaattggagttcagagccatttgataatttgaggccattaaaattttgtgcacaaaaacgttcaaaaaacaaaaaaaatctatttacttttacaaaaaaatgaaattggaaaaaaaatttcagaaattt

SEQ ID NO: 10669 - DNA, 974 bp, Heterodera glycines
aaaaaaacaaaaagaaaacccaaaaaaaacctggcggaatttatacaaaaattcgttggtccatcaaaatgtttgtccgccagcgcatcgaattggggcgaaagcagtgccaatttgagtccgagttgagcatggtcaaaagatgggagaatgtccatccaaatgtcacatgctgaaaaatttatgaaaataaaaatcagaaaaaaacagaaaaagcctaaaaaaacccccggcacactttacaaaaaaacggcgaatttggaaaattttttattatgagccatattgaaaattggagtgtattttttgcacaaaatcctaaaaaaaacatataaaattattcacttttacaaaaaaaataaaaaaaaatttgttggatttgtaattaaaacaaaaagaaaacccaaaaaaacttgccgaatttataaaaaaaattcgttggtccatcaaaattgttgtccgccagcgcatcgaattggggcgaaagcagtgccaatttgagcccgagttgagcatggtcaaaagatgggaaaaggccaccaagtgtcgttgcgcacttgctgaaaaaagtaataaaaattataaaatcgcaaaggctaaaaatgatatgtgcaaaatgcctaaaaatccgctttacaagaaaaaaatgtcgaatttggaaaatttttatttcggtgcaattttttgataagtcggcatttctatgaattaaatttaaccaaaaatttcgatatggattaaacacaaaatttatgttcaaaagcaaaaagaagtgaaaaaatagaggccttcatttgtaagtctcaaaaaaaatgaaaatttttagaaaattttgcaatttttcttatgattatgttttttttaattgaaacttacgtcaattcgttttgccattgaaaatgtttgtccaccagcgcatcgaaacagggcgaaagaagtgccaatttgaggctgagttgagcatggtcaaaaaa

SEQ ID NO: 10670 - DNA, 1515 bp, Heterodera glycines
aaagataaaaagttatggctcattgacagaatcgaggtttttaattatttccacaacaaagggtgggtgggaaagtgtgacaaaaatgactcagagaaattgaataacaaaaaccaatcgatatcttgtcgtacgtaaagaaatatttgatcgaaaaatgtaaaatttgttttttagttaataaagggaataatttattttaaatcttttgttttattttgtttttaaatgaattattattatatgcatccaatttttaaatctagttttgcttaaataaatctaaagaatttcttatttattatttaaactaaaaaaattaatttaaaaaatacatttagatattcattattaataaaacaaaaactattttaaattatttaaaacactgaaaataacacaaaaataaatagaaaaaaatgtacaccgtccggattcgaacttgcccctagcacataaaatagtgatgagaataggtacaaaagtgattagaagacgtacaaaagtgatgagaagagttaaatagtgatgagaagaggtacaaaagtgattagaaaaggtacaaaagtgatgagaagagttaaatagtgatgagaagtggtacaaaaatgatgagaagaggtacaaaagtgattaaaagaggtacaatagtgattaaaagaggaagaacagtgatcagaagaggtacaacagtgattaggagaggtacaacagtgatcagaagaggtacaacagtgattagaagaggtacaacagacagtgattaaaagaggaaaacagtgatgagaagaggtacagcagtgatgagaagaggtacaaaagtgattaaaagaggtacaatagtgattaaaagaggaagaacagtgattagaagaggtacaaaagtctaacttgttatgagatgtacaaaaataatttcataattttaaatataattttatagagttaggtttatttaaaaattaaaaaaaaactaaataataaaaaatgtaaaagtttattttttaattaataaacggaataatttattttactttattttgaaatgaattattatgcatccaaatttttaaatctaattttgcttaaaaataaatctattcatcaaagaaaaattaaatttaattaaaattattttgttattaataataaaacaaaaaataatttctttaatttaaaaaaaataaatttaaataatttaaaacagtgaaaataacccaaaaatgcatagaaaaataatgtacaccgtccgggtccgaacctgcctctcccctcctcataagggtgcctcagaatccccaatcacacagggattctgaggtcttaaccatgtcaaaagtaaagtctgattacgtattcgtgatcagcgtcataaatagacctaatgacatgtttttggaagatttttggtgaaaaaaatttttccactcaaaaatcctggtcaccccccctttggtcccgaatctcaaaatcacttttatttttgtaacatctctcaaaaaagtgataaaaatg

SEQ ID NO: 10671 - DNA, 5595 bp, Heterodera glycines
  unsure (1)..(5595): unsure at all n locations
aacttgagaattcttaggaaattatttaaaggaggtgaattacagtatcatcaaaattttgagcggttcaaaacggtttttacagacccgagaattgaatatatctcattttctcctcagctcggctatgtgttgggttttgaaaatcatcagaatgtaagaaataatgaaattggtaaatatggaagtgatctccgtggtggatttgcaagctttgccgtctacgcaaaaggtctaaccgagaatatgattgttggaaactcgttgagctcacttcttcgtgttgtatcagtgtcaggggccgtaccaggcgaatacacggaaaaaatttacgactctccgctctatgcacgtgttttaccaaaagaagtattagaaattgaaattgaattgcgaactatgactgacggacgactggtaccattttcctatggtacagtgctgatcgtattgatatttaagaaggtgataaatttttgaaatcactcatttttgttaccactataattgataaaatggtgcacattctatacgacacatcggtttcgggctatgatgcattttttgtgcaaaatggatgtggagtcggggatgactcctcctaccaagtttttcgaggcgcgcaaccgtttcagcgagggtggggcactgcacaaacgggtgcaggaataggagatatttttcgtggtctctggcgctttttcctgcctttaattcgcagagctggagatactgtagcagacgaaacaattcagactggaaaacgctttataaatagagtaatcgatgaaaaacccggcttaaaaggaagtatagagacattgacaactgagagtaaacggggagcagacaatgttttagagaagggcggatttcgacgtcaatttggcacaggaggacgaagaaagcgtataaaagctaacaattctcccactctatcacatcagactttaatcggaaaagcaataacgaaaccattaattaaaagcaaaaaaaggcttcgatcagacgcgtttggtctttattaaaaatgacatttcacaaaattgacgtgagtagcatcgattcgattaccaacgccgtggattttttcagtataccccctacaaatgttacagtatcatcgtcaaaggttttcgagattttgccgagtaatcccctcaccgacacaccttaccattttaaaatacactcgagccaaaactacattgacctgtcaaagtgttaccttttgaccgaatttcgaatgcgaaaattgacagcaccaaatggtgaatggggatatttggatgctactgatcaggttgtaccgatacaactgatcggacacacgttcatacgagacatgaaaattgcaataaatggtcgtgaaattttcaactctaattcactgatggcatacaaaacttatctttctcatgagctttcgcaatcacttgaagctaaagtttcgcatttaactgctgctggatatgaccgtgaagatgctaacaatttacaaaacgcaaattccgaagggttcaaaagtagaagacaacggtatttgggaggtcgaacagcacaatacattgcaaaaatcgatgccgatctgttcaatgtgccccaatatttgattaatcattgcgaaattgacataacgatacaaccccatgacggcaattttttgttaattgacacattagaccccccgggtcaaccatatagcattgagcttgttggattgaaactctactgcaaaaaagtcagtcttatggatggcttggctcttaagttggcgaaaaaattggaaatgaaaccagcacggtatgctgtacgaaaaacaatgatggaagcactgttcataagcccagggcgctatgaatttaatgcaaacttgttcatggaccaagttccacgccgcgtaacaatgggtcttgtggcaaactcagattatgtggggaacatcaaaaggagtccattcaactttcagcactttaatgtacatgagttgagtgttgtggccaatggtcgctcctatccccaggccccgatgacattgactgtgaaaattggaaatttgtccgcccctacaatgacacgcaagaggcgcttggttttgccaactctacatatggaaatggaattgattatttttctttttgcacactcattgtatttatgtgtttaacatgactaatagtggagatgatcatggcggtttgttcgacctgatcaaaaagggatgtacatcagtgaacataaaattcaaaaagccagtgcccgatgggggaattacactgatagttatgggagaagcagactccatctactttttagataaaaacagaacgattgcaactgatacaaccatttgatttcaaaaaaaatgtttcatttattctttattgtcttgttttttcaaccaattttttgtttaattgttgaagaaggaataaaagctgaggaaattccccaatataatgagtggaaaagacttttggggtttaaaaattcttcagaaattcaaaaaaatactacaaaagcaacgctcgcctccactttagttaaaaatgtttcaacaacccgaaaaacgacaacccaaaattcaacaataaaaataaaagttactacaacaagtatagaaacaagcagtgccttaaaacaacaacaacaacaacagcatcatgataactttaatttcccctttgtacccctctgcaaagaattaccaaaagaggcaaatgtctatgcgcatattttttgttggtctatgatcatcctttttgccttgtccgtcatcagcctcatcatctatcagcttcgttcaattctttggattaagctaacgttaacggaaaagggcaataaggcaaatggatagcaatcagattaccaaaatattgatgttttcagagaaaacaagccggacgttccttggatgcttcccatgcgaccaattacctgacccaaattcattaagatttccttgctcattgactgttaatttagatgttctcactgggtcgcaatgtttgcatatggattaaagaagaaagtaatttattttgacagtctagcgctaccgataaacggatcaattgttagctcctttctcaattcatttcccggagcggtgtataaccaaaaagcctttcaaactatttcatcaaagtcatgtgctcatttttgcatttgttttgtttactttttatcatcaggttccacatttgatcaatttctaaataaatttaatcatttaaatagtcccgaattgtatgttcaacattttgttcacaattttccaataaaactttaaagaaatgactcttttttttcattgtataattaggtctatctcacaaacgaaaggaatgaaaagtaaagtaaacacaaggtaccgtctagtgtctagcaccactggctgccgaatggacctaaccaatctgcaatgacccattgaacgctgattggttgaatatccattcacccattatttatataaccctttcctcctgcacaaatttaggtgtatgttgtgaaaaggccaggagaaggacaatttactcgtatttccaatgggtgtttactttccacacagctattgcaaatgatgattggtcgtcccttctcatatgtaggtcccgctgaaatctcggcggacattgagaaaggaccggggaaggtcaatatattcgtatttccaatggatgtttaccttccactcgcaaatgatgattggtcgatgggcatttcccttttcatttgtagcttccgcagaaatgttgaacgatgattggatgaaagagtagaatggtcttatgactaatattgttggtcctttctgcataaaattgtgaaacaataattctgtttatatgtcttaatagtttccggtataaaaaagaattgaatatgctatgaattcattttattattggaaataataacaaaaagtattttagcaaaataaataaaataaaatgccaaattctcctcctccgtctaaacgtccccgccgcttttttattgaagagttgctccgtgagccattcaatcagctttcgccaccgcgcaaatcaccaaaagattacgtaaaactgctcaactccgaaactgagcttgtcccaaaatttcaatggctgaaaaataagtcgaactttatcatcgagaatgtgcctgctaatccagaagcccttctaattggaatatttcaagaatgcatggatgaggcaatgaacgcgtgttgcgctttcgaaaactcatcggagaacacactcagggcctcgatccctttttggtgtcttcaacagctgctggtctggctttatcaacgctccgacgttgttttctaccgttcaaccgtttggttcacttctgagggaggatacctccgtggacgacgagcttccgccgaatcccgccgatacatccggttcttcgagcttgaaaaccctggagcccaagtgcagtgcgcggattggtctgtgggagagtccaacattgaagacacaggctatcgtgtggacggcctctggcgacgagagcctccgcatcgtccactggccatcgagtggatgggttgctactatcatggtgttttatcgtcttaattttcaaataaaaatcttaaacgattaaaggatgtcccgactgttttccaaatcgaagacaaaagttggctgctgggagaactgcggaggatttatacgaaaggacgatgcggcgactctttgaactcgaacatacccatggatgtgagcttcacgtcgtatggggttgtgagtggaaagaacggctccgacgcgatttggagctcaagcagcgtttcgaagcagtatttgtcccgtgtccattggatccacgaaacgatgcactccgtggtggtcgtacggagcccttcaaacttcatcatgtgtgctcagacgatgaagagatattgtgcattgatatagttagcctatatccctacgtcatggtgctttttctcaataaatttgaatttaaatttgaatttagaaggtgaatcctttcccagtggggaatccacgtgttctcacgcgtgaggtattgcttcatccacccacggccccacttccctggacatgttcgtcaaataacatgttccggggacttttacttgtacgagtgctcgcaccgcgcctaattcgtgtcccgttgctgggctatcgcaccaaagatggacgattgctttttaaatatgccaaaaaatgtaggcttaacttttttagtgaaaattcgatcactcatattttttgctaattgagcagaagcgtaccaaactttgcagggatactccccggtaaaggactaacttacactgaaatgagcgccgagctagctggctcaaaaaaattttcgaaaatctgagtctttcgtttttatttattttttgcaaaattaattcttaaatattttttcagaaagggttctgaaacgcaccaaattttatttacatgttagtttaggcactctgatgctttttctatcaaaaagggagatgaataaaatttttnaaaatttttaattcctttttaaacaggccaaaaagtttaggcttaacttttttttcagaaactgatcagaagcgcaccaaac

SEQ ID NO: 10672 - DNA, 3213 bp, Heterodera glycines
tcgcctctgctgctgttcatggtgttgatctttatgtaaacaaacgatttttattgatcgttttggaaaatgaaaaatttgtttgccagaataaaagaaaaaaaattcacagttatataaaaaaaaaaatctggcacatcgataaatgttgcgttgttttattttgagcgaaaatcaatggaaaatagtaaaattggtgggtagtgggattcactgacagccttcggcggaccgaatttcgggacgcaatttttttttttttgagggggggcctcgaaaaacccggactgaattccgtctgttttcttgtaaaataaagaaagtattacattggtcacactgagttcaaacgggtggatccaccgggtgtaacattggcgcattgtttggccggcgttgccgcgaaagcccaggcatttggcaatgtgtgcccagcggcgcgagtcattcacgcgctttaggccgccctcctcgtcgaccatctgaaagcgggaaatttcaatttttttccaaattaaatttcatggtaagaagggtaatagacaacatgaaaattaatacggctgaataccgcgtctccatttggattagggcgaaaatggacccaaaatttattcgaatccatgacttaaacacttgttaaatttaatagttagcggattttttcggaaaatttttccatgtttcgtggatattgtgtaccaggagggcaggacattcatggaaatgatagttttttcagaaatctccgtatacagaaatgttgggaagttagaaatctccggatccaggaatcttggtaagaatactcatggcggtgacatcattttatgtgaactttgggtcccggaaatcttggtaaaaccattaatgagtcttcgctcatatataccatggaattgtaaaacattgattgaatttttacggaaaaaaattcttggaaacctgacgaagccggtacaagtcaatgtacttgttgtcaatgtacgggatgcggaactgctggtccttggagtacttccagaaatggaccaatttgttgatgtaaatgatgcgcaagcggaacagcgcgtcaatttcgttgagccgttgcacgcgcggcacaaattcaaacttggccggctcaatgcaaaaggggggccgaaaactctgcaaaatgattaattaattaattgaatccaaattctgtaaaaatagtaaattttgattgaattgaatgccaaactctgcaaaaatgactaatttaattaactgaatccaaattctgtaaaaattgcgagtcccgggacgatccccgtttttatcgataatgcacttgatttcgaaattttttggtggcaaaataaattttcaatactatttttgaaatctaataattatggaaaacaatcagcagccaagcggatttgaaccccagagaaaaaaaattgttttgaaagaatcagataaaatcaatgattttgtaaaacctgagttcgcattgtttgtgatgattagcgcatttttaaccaaaaaaaaataatgcaaaaaaatttttaattttatttttcatcgggccaaaattctctctccaattttaccattttctaatgtcagggggaaaggtaagacctgttttttgtcccaataaaagtccacaaataaaaaaaaaaattttggattggttcaaaacttgtgaatggcatagaaatcgtcgattaatttcgttttcattcattccataaacggacgagacgactcaccggtggaggaatgattttgatgaggccaaattgttgcgcctgtggcttaattttggcaacataactgatcggatcggcaaattctaaaaaaaaaaaaaaattaaaaatgcctaattcaagaattattgcttccccccaccttcatccgtgggatgaaaagtgggcgcgaacggaggccgcttaaaatcgttgtaatatcgctccaaatccttttccatgccgttaaagttgtgccgagaagatttttttgagcaggtgaaggtggtggtggatcagcagtgggccaggaaattgaaatggtcaaaaggtgaaaaatttagaatttgaaaaaaccatgacaacgtaaaataattgaaaattggagattaatctaaaattcgataaatgagaacatatatttagaaaaataggtttttatgtgtttgatattcgggaaataccaaaacattatgtacatacttaacacaaaattagtattacgaatcgcattaaagttgaacccaaatttataatttctgtagatattgattttttgattttttataaatcgcaataaacattacgccaaacaaaggcaaacctaaaaaaagtaaaatcaaagcgacatatttttcctcgctaaatgttagtctccgttttttgccatgttttttaggcgtttggtgttataccatttccaaattggtttttgttttcatcggccgttgccaaattgagtctggataggatcaacttattatgttatcattttcccggcattcctttactgtttgaacctgacattagaaatgccgggctctactaatttctctaatccaattgctataatatctaggtagctagtttacttacttcctttgctttttgattctgacattgaaagggctctactaatctatctctaatccaatggttatgacatccttttaaaaatgccctgctttaatctttctctaatccaatagctatcatttatccttttaagtttagcaaagattgtgaaagaatggctgcgcacaaaacatttatcatcaaacgaaagttggccaaggctgccaaacaaaatcgtccgcttccccactgggctcgaatgaagacgggcaatcgcattcgctacaacgcaaagcgtcgtcactggcgccgaaccaaactgaagttgtgagcgatggaccccgagaaaacatcggaagacgccggacgggcgttgattttcgacttttttgtttgttcatggagttaattttcatacatttttgtgtggactattgttggtaaaattgttgaatttgtgtcttttcccggttttttttaactaaaattttcgggcgcctccacaatttgaggtaatttttgaaaaatcataacttatgactgagttgctcaattaaattgtttaaaagctttagaaatagagaaacatcaggaaaattttatgggaattattttgaatttaaatctctaaaagaaaaaa

SEQ ID NO: 10673 - DNA, 1820 bp, Heterodera glycines
gtttttaaatgcaggtctaggttaaacacgaaaaaaacctggatttcctggacaaaatcttagaatttattatttcaaatgatcgaggagagggggaggagtcgcggatttatcgttcaaaactggggttgctcatcatcaccctaatttggcgatgaataagtggaatgtccatgttaatggcattcaatgaattggcacttgaatttgtttcgcccagcgccatctgagcgatgcccatttgtgcgccaaacatttttaatctaccaatttttgttcctttttattttgtttgtatttattttaaaattatcaaaccaacaatttcatacacaaaaaaaaatggttgacctaagttttttttttctaacaagtgccaaaaattcatttccacataatcagacggcgcccttttcgctgctttgacccgcttttgctgccggtggaaacaaaggcctaaaaattgaaacgcaaaatttttgaattgttttcaaaaattgttgctcctcacccaatgcaatttttgttataaagcaaaaaaacggtgacattgttcaaacgggacaaaaaagggcacaaattttcgtctttcttctgctgctgctgaaccgtcgccgccgtctccccaaaaattgggcaccgtttcaacacccaatgactaattgcaaaaaaggaagcgacttcttttgtgagtgtcagcttctcgttggtccgttcgttcaccaattcaaatggctcaattggcgtttgctcataaatatcgtaatgaatttcatagctggcagcagaagcagtgttggcaccgagaaatttctaaacaaaaatgggggaaacgaaaattgaaattaatccccaattgtgtttttatgagaatgtggaccatctgtgaaaaaaagagaggggttaggaaatttttcaaatgagaatttcaagggaaaaaattttttaaaaaatcgctgaaaaatcttcaagattgtttttcaaaaaattttcgtattttttcttttgaaaaatttgtttgaacacctctttgaaactgtcgacccaaccaaggtagtcaaaaaattggggaaacaatcgcttcggttggccatcgctgctcggcgtttgcaaccatttggacaacatttggccagcagtcgcatttggcccatcattattgtcaccaaacgcatcggcgaacagcagaagaccgagaccgattgaattcaactgattgagatcggtgagaattgtggacgaagtgcggcgacgcaaacagttcaattgatcacgatcaaagcttaaatggcgaatgtttggcgcaaaaatgggccaaattccatcgacaaaaacatcccaaatccgttggacttcagctttgctgcaattgaggagttttaaacatattgtgtgacttttggttccgtaaactgcgcaaatactacttggacgatgaataaatcgacagatgcaaattggtgcctcttctgtcgaagattggctgattggaacgaaaaaatgcgatgacggagtgatcgatgtacctgacagggaatgctttttgaataaatgctttgcaaaatgaatatcaatcacgcacttgagctcaaacaaaaaggcgaaataattttttttttttgtggtaaagttcagcgacctttcaaaaaaattttagacgaaaaatgtgaaattctaaaatttgaatttttgactttttgttcaaaatcgtgttcgggaattgatcgaactgggtgtcaatgcgtacaggctcttgtgcagtttaggccccatatacaaaaatttttacattttagaataaaagaagcaaatctataggt

SEQ ID NO: 10674 - DNA, 3155 bp, Heterodera glycines
actggtttaaaattttttaaatttaacaggcggcgccctattggcactgcctgacaccaaaatccacctaagataaaatcacaaaatttggtttttggacacaatctattaacagtcgcattaaaatcataaagttttctacgccggcacgccccatgttcagcaaaatttctttcaaaaaagcacgccgtaaaaatgtttcgagaagaaaaaaaaagtggttgcatggctttacttaattccaagctaaaatacatagaagaagactatcaaatcgcccatgcccggtcaattgtctaaactcggccccggtacttagctttaccgctttgtacagattcaaacatgccgtatgctataagaacacaaacaattgcaaaaaagcgttgaaagggttccatttagaatttgcctaaatataaaacaaaattaggattaatattagtaaaaataatttttataaaaaactaataaagtgaatgtgtaaagaattgagaaaatccaattatgatgacattttgcataaattacataaatgcaatctttttgtttaaattattctttttgttaacgtaagtcatcatcatcataatggcattgtcaaaatcgcatgtgtttaaagaaatagtcgataaatggccaataaagaaaaaaaattctaaaattgaaaattctaaaattttttgtaaaaaacgtacaaatttaaacatatttagaatatagtgtgtctttaaggaaagattttgaattaatgaaaattaggtcatcttcgctctaacaaaaataggatttaaaaattccaaaatagaacttaattgatacttagctcgaggtccttggtctcgtctaaaaattgttcggcctttttggtttctgtttcgggagccggaaaatgcgacaccgagagaaagttttgcatttcaagaaaatgcgagcggaaaaaatatgatactaaacttagattcaaattggcgaaaactaaatccggcgggcggcgcctattggaatcgtcactcatcactcatccgtaaaatatagacaaattaaaacatgtatttaacatgaaaatgaaatcacataaaaacagaaaaatatatactcattcacattcaattattgaagaaaatcgctaaaatttttaaattctcggtctcgatcttgccttatttttaggaccttaaaaaatgctcaatatttgacttcaaaattaatggtttttctatgattaaccaatttaattttttaaatagaatatagaaaaaaaaacttgttgaaattactaattgcattaacccaggggtccgatttttttaaagaatgttccgatttggaggtacaaatcttacaaaataataatgtcttgttgtaataaattttgaattttttggggtatagattaaattatgttctgtttttgataatttaaaattttatgagaaaaggtaaaggtatttttatagctaaattaatttattcactgtgcagatgattcatctttttgtaaggaagttttgtgaacagttgattttattaaaagaataaatcaatatttgaaaatattttcttttttcatttcatttttaaaattaaataaaaatttacggcaaaaaatacaagttcgattcaggcgtaatttcagggaatccaattaattgtgatgatcatcatttatagttggcattcgttaaaagcgatacagtaatggatttctgtgccgaccgtttgccattcattgcggtcatttattttccgtcatttttgtgcagttcgcttccattctcatcggtgcactcacgtggaacatttttccatgccccggcaccacataatcggccgtgcacaaaatcattcgccggttatgcgactgaacctcgtcattccatgccaatggacgccacatcatcggtcgactcaaatcttcggcctaaaatgtttttttaatccttaccgaatatagaagtaatgaatccgggccctattaatttgaataaaaacatgctgagaagatttaaattttaattaatttatactatttttaaaaaagcatttatttgactgtttggtaaattaagtctaactatttttctctcattaaaaattttaataaaaaaaaatttactgcaatgaaaacatcgccggcaacaactacagtaccgtaacgaagcgtattctgtagaaagtaataaaaaacatttattacaaaaattgttttcttgtaaaattttaattttcgctttaatattaaccgtgacaacaacactgatatcctctgaggtgtgtccgggtgtgctaatcaatgcgacattttctgtcaattggtgtttgacattctgtttaaaaaaattaattaatatgaattaaaacattattttttacttcaaataaattcgagaaattaaatttagtccgataatgtgacataaagccttgaaaatggacggcatcctaaaaattgtaaataaaaaaagaaaagaatttttaattattttttaattactggaaaatcatttgtattccctgcatggtcaggatgtccgtgtgttatcaccacataatccaccgccggaggtgcgatttggttttcactgagttctgtttaattatgtataattgcatattaaaattatgtatattgcaaacgcataattttatcacatttgaaaaaatttgtaaaattcacccaaaagaatttagacacaagaaaaacggtattttaaaatagggttcgagccccgtggggcgggggtggcttttcgcgggggcgggggttggcgggggtcagagtcgcgggggcggtggcgggggcacgataattccgcccccgcgggggcgggggtttgatttgaattagctccaaaaaatctcacaaaaaaaatatcttttatgaatgatttcttaatttagggatttttgagtaattttttaagaaaagatagttttttttggtgggccggcgtgccgataggagcgaattttaaatttatttaacagatattcaccaaaaaattaagattttcccgataaattttcgttttttagctatattaaattatcatgatttactcaaggaaaattggaactcagattttttaaaaatttttttcttgcggcacattttccaaaaaacttgatgaatgtgcgaggggaggaggtcc

SEQ ID NO: 10675 - DNA, 1720 bp, Heterodera glycines
aatttctcaagatggttaaaaaattcaaaattgtataaattttttgcctgatatcccacgaatatgccattcctaggggagtattttcgcccccgcgggggtgaaggtcacgggggcgggggtgaggccaaaaaacctgtcccgcccccgtcgggggcgggggtgacgggggctgggctcgaaccctattttaaaagatacttttcaagttctgttgattatatttgtcaaatgaaaagaattctttatcgaaatttcaattaaacatactcattttgagcaaattaacaaattggcagaaacttgtaaagaacatttgaaaaaagagataataggatattcatggactaagattctttttgtttaaaataatttagtttgggatacaaaactgttaagagaatttaaatttaatggttgtaaaagcaattattatttactatttgttttaccaacttctgatcagatcagtcctcccgttgatgtcagtgcccattcccgtgtcaaccaaaattatttttgcgccatctctgatcaacgttatgctggccacaaacacataatcagcgtccaattgtcgcgcatatccctttatcataattaccttataattttgggtctaattaaaagtaattattttacctcacgcaatatttcaatatttgcactttgtccaattcctccatcattattgccttggacttggtagaaaaatgactgctctttttcatcgtcattaaactcaatttttctaaatgaaaaaatactttcatgtaatatgcatattgctaatcgcatcaatgagcagaattttatggaaatctgaattaaaaaacccggattcggaaccaaaaataacgggattgaccgtgaacgatattaaaaatatttgggaggttcataaccccttcataattttacaattagtgaaaaatattttaaaatataattagtatctaataagattaattattttttttcgaaaaaataaattgcgaatattatataatttaaaattttatagttgattgctattgatataacccatatcataagttacacagataagagacaaaaaagtaatatttttgataattacttttagaattttgattgtttgataacaaatattttgtctttatttgtattttaaagacaatttctgacttgcagatttatgaaatgccaaaaatgcccatgttggcggttttaggaacgcccaaatatctctaaaatgatatctacaaaagataattgcccaccttaattaattaattatacaaataatttaccgatttgtttggtttggtttctgttcttcaataattatccgtccaaataattgcttctgaattgacctatcagctgtgcttgtgctacgatcagcagcagttgctggtgctgaagaagaagaagtactcaacttcaacgtggtcactttctcaacacttccgtcccaacttttggcatcaacagtctaaaaatcacatatatgcttagatttaaaaaatgataaacaaaattatgattatgtacaggatcgtagttagaatttttacatattttttgcaggtaaattttaatggaaaatttacgtgatccccgaggtttttgggtcgctgatcacagatcaaacactctattttggccaatatttgggcaaatcaaaattataatttaaccttaaaaataggatttataaatttagggacaataggaa

SEQ ID NO: 10676 - DNA, 1796 bp, Heterodera glycines
tgagagggggggggggggatgagaaacgcaacataattggaatgggggcaagaaaagtgattatgatgtaatgtatagttagttgggtagcaacgtagcaacagctattttagggattggcacatccggtgggtggcaaagaaaatgccaaaattgtgcagtgggaggccaagaataagtggaggaagggaccaacaaaatttccaaaaaacggaggggattatggcaaagaatttaggggccaatgccaaaaatcggaggaacgggtaaatttccaaaaaattggtgggtcgctggccaaaaatttggagaccatggaaattttcaagaaattgttatgggatcggtggccaagaaattggagatcaatgcctaaaactcggagacattggccaagaattaggggaccatggaaatttccaagaaattatcgggggatcgctggccaggaaattagtgacaatgccgaaaactcggaggaacggattaattttcaaaaatttggggacaaactaaaggcccaaaaattgggggatcacaagaaattggggcccaataaatccccccccccccttttggggggaaatgacattacgccaaaaaaagaccatagaaatttgaacgaacaacaaattcgaacggggggttctgtatttattgcaattgatgtttaggtgatgctgctgggtgacagttgcaccggcaaaacatgccttctgatccgcttcaaggacaagtgagcaatggagaaattttaaggcttcaaattttttaattcggtgggaacagaggtgtgcgaaataaaaaaaacaataattcccataaaatgaaaacgaaaattttaaactcgaaaacgaaaacaaaagttttaatttcagttcgaaacgaaacgaaaacgaaaattttaaatctgaaaacgaaaccatgaaaacgaaaacgaaactaaaaaacgtgccgaatacactaaaacgaaactcaaaaagtgcgaaaatgacgaaaacatgaaaacgaaatttcgcatgcgccaccgtggagggggggggggggggggggagctttataatttctttattgaacttctgtactacttaccacaacagcacgttcatgaacaacaacttcatctccacagttggcatcgacttcagggcaatttctaaaaaaattcaatcccccggcttttttgtgtgtcaaaatttagacaaatttcagaacaaattggtcgaattggatggatgcaaagtgaaactgcaggtgagaagcagaaaaaatgattgatctggtgtggtattattggcggatggcgtaagtggaaaagatcagcctgcggtgggattcgaacccacgtcccttcctttccgtggaatgctctaaccactgagctacacagggcgccctttgcattccttttaatcccaactttagaggaaagaaagctctcttcattcgtttgagagagtcgcatatcacactgggggaaatccttgaaaatttaattagaaagggttcccaatagtgccaatttcggagaattagatttggcaatgtggcaggattcgagataaggacaggtcccaataatgccaatttaggaaaatgagattttggcaatgtgccaggattggtgatcatgtttgtactttttttagtgtggcaaagggtttgaatcactattttaatcactattccggcgttaaaatcccggctattttccggactatggactatggcacattttaaaggtctatgtaattgatttgtcacctcgttaaacactgatcatgaatatgcttttt

SEQ ID NO: 10677 - DNA, 4702 bp, Heterodera glycines
aaaatgcatggtatacaatttttaaccattgtaaggcaaataaaaaatggtcatgcaattttcctaattttcaaacgttacgtcgaacgtcgaaatctaacagcaccggaatccggattttcgcagattttttgatggctaattgatcaacttgcaatttaaaataattatgaaaatctatgaaaaatttaaaagaatttttgattttttgagagcatctgtctgataagattttttaattgaaatattaattaaaaatggaaaaaatttctcgattcgatgttggcttagaattgcatcctaattaggcttcctaatggcaaatttaatttgtcataattcacggcacaggattggctggcccaggtgaaggaatatgccaaggacagtgtacagcttgtgcttgtcggcaacaaaatggacatgtcatcgcagcggaaggttcacgcagacgaaggacgacggctggcaaaggtcattaagtcaattagtgggcaattaaacggaaccatagctaatgaggtatacggtaccacaaaattttgaatggtagatcattacggtatcactggtataattttgtgtgtgtgagtgaaacgattccaaaaaattagtgattatggggcatcacaaaatatttggtgtgagtgatacggtaaccaacatttttgtattatgattttttcagatcataggtgaaattttgttaatttttctatcaaaattattgaaaatttaccaattttttaaatttagaggcatttatctagctggctaaactagaaataagtcaggaacaaatttttagtcttttcttcaaaaattgtctgaaagttttcttcttttttcggttttgtctctgccatggtcccaatttttcattttttttccccacttcaaggcgtacaacatcgatgtaagtgaagcgttttgtgcccaactccatgtgccatttctgtccgccaatccgttgttgttcatcccccgcgtcgtttcccccgccccaaaatttaaaaaaaaagaattttcaagccgagaaattaaaaaaatcttaagaaagttttaataagaaaatttcaaggaaaaattgaaaaatttctcagcatttttggtgttttttgaaaattcatcataaaattttgagaaaatcgctgaaaattctcgaaattttcttatgggaaacgacgggggcgggaaacgacctgctaccccactttttcaaccagttcatggagacgagtgccaaaacggggcacaatgtgcatgacgtgttcgctgaactgagccgacgcctggtgaaggcgtgcgacccgcagcggcggctgcgaccggcgtctgcaaacggaagcggtggtggcggacgcaaaagcgcagcagcagcagaggcggacggtggaatcccattgaaattggctaataatgctaatgacgacgagggcggcatggctgagcagtaccagcaacaacaggcattgtctctatttgggcattggcacttttggcacggggattcccccctctgcgggggtgtagcacatggtatccggactttgtccgaaggcaaaaatattcgggtcgcgattcgggcggcaaccgaattccagggcccataacatgcggatcttgtccgaccattttttagtccacctccgatatattagacagatcacgaaaatccgccgcctatctccgaaaatcctgtcccagaaaggtcctggtcatcggtcaatacggtgacgggacgttagtcaaaaaccatcaaaatgggcgttagtcaaaaaccatcaaaatgggcgttagtcaaaaaaccatcaaaatgggcgttagtcaaaaaaccatcaaaatgggcgttagtcaaaaaaccatcaaaataattttatgcgtagctgatcaaaacgggcgttagtcaaaaaaccatcaaaataattatacactatacgattatgccctatatgcatgcaccactcaattaatgcaaccacttccaaaatatttgccgcactgattattaataaatcccaaactatcatcaccaaaccaaacccaaaatatttacgcactattattactgcttaggttttttataaagttatttaaattttatttaaattcaacaacagataatttttaaatccaacaaagttaaattgtatttaaattttttcaattcaacaaagagaaatcctaaagttgtcttttttgacagcgtagtacataaacatttcgatttggccggtccgcgtgtgcctcttccgagttccttcgtgatctaaaaatttttctgtactaatttagcttttttttaaataacctatgaaacaaatctcatcaagatttggcatattccaaatctccccaatctttttgaagaggtatgcattgttgaaattttgctgatcaatgctgaaatcaaagtccccaatcgacagccgaagcgggaagaaaattttcagttgctctgcgtctggggattagaaattttttagaatttttactttgtcatttctcccaaattttgattttaaaaataaatcccatttttaattatttttatttaactgacatcttccattgtgtccgtgaatattatatgatataatatatcccgtgacaactgaaccaacgacaattggagttaagacgagcgccaggatgctgccaagggccaaggctgtcaggatttctcgacgctttacaggccttggctcagtttgaagacattgaaagagtatgagatagcaataaaaaaatattttatggaacgcatatcacagttcgggatttaattaatttttaattttttttgaatcttggccttgcagacaaatcgtttaaataatcataattgaccgaaggaattctctttttatcagttaattaatatttctataaatttaaattcctcacataattgccaattgaacccaacaaaatgaattgtgcacgttatcagtcattttatcaaccattcttgctaattaatattttttgcagccgtataaccaaagattatcaaatttatttccaaagaattttgcaaaaaattataagaaaattaatattttacataaaaaattcccaaattaattgtttaaaagaattaatcataaaacacataacttaattctcttttctttttcatttcatatatttcagtctgcagttggtattggatttaaaattgcttcaaaatggccacttccatcataataaataaaaactgacttgtattctggatcttggtctactaatacctagagaaggaattatttttgcaaaatattttctttaccgtgtttttttttgaattcggtgtataaacattccatacgaatttaattttgtttttggaattttgtggatttgggctacaaacgataacatttaatttgaacaattttgcagcacataggaagtcaagattagatgcccatttaaaatgttccgatgcatccatagcagggtgtttgtggttattaatgtactgtgttagatttggcaaagaattctcaaacatctgccaccaattgtgcccttcaacatttctattatgtaaatcgatttcggtttccaaaaattccattaagtcaagcctaatttctttagctgtattgtaattatcataccagtcagcaactctgttttgatttgctacaaaataagcagctccaagactttttttgatttttgccatgtagcgctctaatgttggtttactaattttcaccgaagattgagcgttaattagatctaataattcattaattgaatgaatttgtcccttttcatatttaatcagcaaatttttgatcgtttcattatttataaacgaatcaaaatttgaagttctacctcctccagatattatagatggattttgatttcgctttatagagaataaaacgaataaaaaaaataatagttatataaacagattttggaatttccatcctaaaaagaaattatttaattttttattcgttatatttaataaattacatgaataactaaatgagagttttatgcttatttacattattaatgaaaaatcaagaataaaatgtttatattttttggtgatttggagattggttggcattatcgaatattttaataaatttgtgccgtcatcatttgcgtaaatatttggttttgttttgttgatgatagtttggcattaattaataatcagtgcggcaaatatttggaagtggttggcattaattgagtgttgcatgcatataggccataatcgtatagtgtataattattttgatggttttttgactaacgcccgttttgatcagctacgcataaaattattttgatggttttttgactaacgcccattttgatggttttttgctaacgcccaaaaatcgatatttttcttatgatgaaaattattaatgttaaaaggcttaaaaactatctggacatgtaaaaaacaaaaaataattatttgcagggtgggggaattgaactctaaaagaagaaaaaaggaatggaaggcatacacactgggccagagacgctcacattggcttttctttctttgggaatgacattaataaggcaaaaaggaaaagcttcatatctcggccagaagcttcatttagcaaaaataaaaaaattttataatacaaaggggggtaatctacctacactgtaagtttcattcggaagtcccaccgtcacttgg

SEQ ID NO: 10678 - DNA, 3859 bp, Heterodera glycines
  unsure (1)..(3859): unsure at all n locations
tttttaaagaattagtttttcacatgctttcgaacacatttagaatatttcattggttgagaaagaaaaaagttatgccctaaaaattcgtccggtgacgtttcggctggcgacgttttttcctggtccgtcccgctgtaccgttaggtaccaccggggaaaacttagaaaattttcaataaattgagtaaaattaaaaaaaaattacccattgatattttctgaaaaaattagcccaactggttacgggcctgtaatatattgatgtttttgatgcatattttatgcggaaattttgctaaaattttcaacaaaactatatttactaggcgatcggaaaattttatttttgaaaatttgattttttaattctgttacagcaccggaattgcttctgaagacactgtaaactttgaggaccaattgcgtctttcatcgtacaatgcatttaaagaaatattctttcgctacaaatggaaggtaattaattaattagttaattaattaaaatgcaaatccaaattcaacaattaaattcctttttttaaagctggaaaatgaaatgaaaacccaaaaagtgcgcgagtataacgaggaggttgaaatttgcataattaattcattaaatattttttttgccaaaaaatcaaaattaaatcataaacaaacaataaaaaaaacattttttacaattttaatttattaacaaaaaagggtgcatttttgtgaatttaaatttttttcttaaaatttttacttggtattgcctatttttttaaatttcaaataaattatgcaaaaaaaaatcggtcaaaaatttatttttaatgtgaaattttttgcaaaaattttttcacaacagtatgacgcttggaaagtgcagcatggtcgtaacaagataaccaaaagtgtgtgggccatcaaatatgatcagttgaaggatgatcaaattgcggacaaagtgatcaatgcgatggcattggcggctgatcaattagcggaaacaattaaaaaaatgaaaaatccatggaaaaagccaaccgaagaagaattgagaaggggaaaaaagggaaaagcggaaaaacaaacggaaattacacaggccgaaaagcaaacgtcaggaaaacagatggtgtttctgttcggggacagaccgacaccggtaaacagcaaaaaagacaattcctgggaaatgagtgcccattttttgcgccaaaattgtttttcgaattatttttcgatagtcctttgcagggcaggatggcattccgaggccccaaaaattttcggaaatcggaattccgaaggtcaaaaaatttttcggaaatcggaattcccaggcccaaaaattnttttggaagtcgaaaatcggaattccgaccccaaaaacgtttttctgttcgggaacagaccgacacagataaaaaaaaaacaattaggaaaaatcttattttttgactaatttttttaccttgacaaattttgaattgtttcggtagccctaaatgttctcgattagcctataaaattcaacaacaaaaaaaagttatgggcaaatatgttggaaaataaataatttttttttttaattttttggccacaattcttttgaaaacccaatgaaatttttttgaacttttgcaggttaatggagaacattttcgttttggcacttttttaaaatttgttaactgtattgggaatttttcatgactaaaatctaacccttgttgttagcatacactttttattcaaaaaacactaatttaaataaattaatttgaaattggcaggccgacgcctcactgttcgctcaccttgtccaactgtttgagacaccattgaaaattccaaaactggaaaatcacataaaaacggtgaaggaacagtccaaccatgcccagcatgtactgctccaatatgttgaagaaatcaaagagcaaattggatgggaacaaatgaaacacagtagtgaaaaggcggtcgaaaatccattcaattttgaatgggtggaagatgcgaaaaaaatggaaaaatataatggcaagtttttggggaggcgggataaaaataagtacaataagtgcacatatgtagttccatttttaataaaccaaggaggacaacaaattagtgagttttgatggtaaaatgcaacaaaaaaaggggtcaaaaaataaaaaagtgtgggtcaaaaaatcaaagtatagggggtcgaaaaccgaaggattagaaaccaaggatgccaggcattccgaggccctaaaaattttcggaaatagaaaatcgaaattccgaggctcaaaaatttttcggaaaccggaattccgatcccaaaaacgtcggaaatcggaagttgaaagcggaaatttttgaaaaaatataaaataaaaataaatacacagttctcatgatgttcaaaaaaaaaaaaatttatttcaagctgaatttggctctgtgccatcatcactgttcaatttttaaattcagcctattagcgacatttggcgggatttttccatttaaaaattactttttttttaatttggccaaaaagcagcatgtacaaaaattaataaaattattttttacattttaggtccatttgacatcaaattttaaaactaaaatgtgattctaagcctatttgggtcatttttatggcatttagcgcctattatttttccaaaaaaaaagcatttaagaattttatttacatatttgggcgcttttttttagatatatatatatgtacaccagggatggcacggaattccgacttccgagttccgacttccgacatttttggagtcggaattccgacttccgacttccgaaaatttttggggcatcggaattgcgacttccgacttccgaaatttttgatgaaaagtcggaatttttctgagttttttttttcaaaaaattagcaatttttgtacaatttatgttaataaattgcatagaaattttcaattttttttccgacggcacctatcggcaccgccggactcaaaaaaaacttaattttcttgaaaatttgctcaaaatcgctaaattttccattttttggacaaaatttgttaacaatttacattaaaaattacaaaatttttcccggcggcgcatatcggcaccgccggacccttccttccccacagtttctcaaattctctttggataaagcgcgccgcaaaaaaagggtgtaactttcccaaaaaaaaaaaatccaaaataatgtaaaattacttaaaatattttgatctttttaaaaaatatagaaataaactaaaaacagtttgaaattaccttttacatggttaaaaatttaaaaatttagcctattaaatatttttaaaaatttattatatttttttttgaaaaattccgacttccgagttccgacatttttggggttggaattccgacttccgacttccgaaaatttttggggcatcggaattccgacttccgaaaatttttggggcatcggaattccgacttccgacttccgaaaatttttagtgcctcggaactccatccctgcttggtaagagagacactctctagtcgaatgacacaaagcaatggaaataataccaattaaatgcaattaaaaggtatcagcaaacgcgatcattttaagtcccaatatgttttattcagggctggcagatgaaaattttcaaaagcctcatttggcaagaaaaaaagcctcattttgggtcaaaaagccgcatttttacaaattttgttcaaatgttatatttttgattgtccatgatcaatttgagcaatttttttgcaaaaaataagctttttgtgaattctgagcacgaaaatcgaaattaattttttt

SEQ ID NO: 10679 - DNA, 1332 bp, Heterodera glycines
ggatttgcataacaacaaaaaaaagttatcgcccaaaaacttgggctggcgccaaaaagtcggcgccaaaacgatacggaccccatacaaacactcaattttaatatataggattttttaatacataaatacatttatatttagtaattttgatttataactttaaagttaacttatgaaatattttaaaatttctgtaaaatttttcaaaaattccgagttccgaccttttttgggtcggagttccgacttccgaaaatttttggggcctcggaattccgagttccgacttccgaaaatttttggggcctcggaattccgagttccgacttccgaaaatttttggggcctcggaattccgagttccgacttccgaaaatttttagtgcctcggaactccatccctgatgtacacattttgccaattttcttaaataaaattgccagccctaataattacatttttgctaaagggttttccattaaaatttagtatacttttttttttctaatttggcgtttattttgtaggcccattcgacttgaaattcaaggaaatgattgagttcgatggaatgttcatggtatttcctggtgctgaacggatgcatgaacgggaagagtttggtgcggacaatgaagaggagaaggaggaggaggaaaacgaggatgaggaagatgatggaaatatcacggaaattagagaggaaaaagttaagacagagaagtcagagcaatcgataagaatgcgtacaccaaagagggaaaagaaaaaaggagcggcggaaaacactgggaaaaaactgtcggcgggaggggaaaagaagacagagaaaaaaatgctgagaaaagatagtagcggcagtggtagcagcagacgacaagagcgaccagggaatgagcaaaacccggaggggcaagagatgcagactgtttataatgagcaggaactcaagtccttcgcaatgtactttgaagagaaaacatggacaactctcatgaataaacagatgttattcgaggtacagtatatgtacagtatgggattatatgtggtatttggctatagccatgggcttctaggccaatgttattgcatggcttctagctcagctcaaagttatccctatcgtgtcttctcgaccatgttttatgttatacatgtccacctaccgtatttgctctaattatagcccagtctctattaatttcgcagtctccaattatcgccccctttctgaggggtttgaaaaataatcccccagtctctatttatcccccatgggatataaatagaattttaagaaattgtttggcaccaatttttttcaa

SEQ ID NO: 10680 - DNA, 572 bp, Heterodera glycines
tgataaactatgaacaacaaaaaaattatgcgaagggaggagaaaaaagaaattattattttttttgtttgttttttgaggggcaataaatctcagcgactttttgccttaatttttgcactttatgacatcaaaaaaaaggaaaaaagagaaatgttgggaagttttccaattttagtcatttatttaaaaaattttgcaaacctgaaggcggcgccgcaatcgaaggccaatttcgcgctgatccgattccaaaagttcaagccgttcattaaatcgcatccctactaattatatactatctgcaatcggaattaaatgtatgccgatgatattaaatttacatttcgcgtgaaaatgatttgaaaagggatttactctcgttagcgttggctagccaaatggtctaatgacaatggcatagccattgcgcatgagaaatgcgcagtattacatattttatgaaaaaatattctaaaaatgagtataaaattggcaagaaagcaattttaggtgtagattaggtatgtccgtgatctggcggttttagttgaccaaaatctctcatttaa

SEQ ID NO: 10681 - DNA, 3963 bp, Heterodera glycines
gtatgtatcatcttttaaaaatattaaaaacaagaaataaggtaaataccttaatcctagcatataaaagctatataagaccacacctcaaatacgcatctgaagtcgggttaagaacattaacatagagacgagcaccataatgtaaaaattgcgtgcttacacaatttaacattctaaccatttgaatccgcgaccccagaatttttctgtccacgcgccacctatgcttttgactcgaaacccaacaaaacccttcggacccaaaaaaaaaaaattgggtcgggaaaaaagccgtgtttcgagtaccccgaaacattgcacccgacaacggagataatgcaaatttattcagttggtggcgagcccattcagagaaattaaacatatgcaagtgaacattatttatttatttgccgtaatttcccaacgaaatcaaaaaagaacggtgagcagatttactaaggaagcaattggctcttcggtatcattaacagaatgatgtttgtttttcgttttgtcaggaaaatcaaaaataatttccaagtccgtccggcagcacacttccgctcgcatccgttgaccgaacagatcagtagccggaaagctcctccaaagggatggaatgattgtcctcttttcctcatacaatcattattcacctggaaagtcgagtccaactcctccgaaattgctttgtaccgctccttctcgtggaccaattcgtctgcaaaaatcaaacaaatttcaaattgaactcaaaacagcaaaatattgttgcagaatgtcaaggggtggacacacgacaatgacaaaaaccgtcggaaaactaattggcccatcaacgaaataacccaatggtcacaaataaacccaaaaaataacgataatcacgcagttattatcattatttctttttattagtaattgaggatttatatatttttaaatattttcatgaagctttctttgttttgctgagaaatgcaggaattatttttttagcgtaggaaattcttcgctttcacgtcaatatccataatttatataaaaaatatatatatatatttttaggcctttttaaaaaaaacatacttcggcatttttttttagcaatctttggtaaattttccgtatttctcgaaattcagaatttttggaactttaaacaatgaataatttttgattgtgttagcgtacggtttctttttttttgcactgcaacctttttaatttttgttcaatattttcataaatatttttgcgtttttcataaaatttatttaaatattcttggaatttcaaaacataaacctcgccctaattattggttaatcgatacagtgaatctttcaaacttaatgggttagaacaaatcccatcgaaagcaaaggaatacaaatgaattagtgacaaaattaattccacggtggccgttcatcagcagtcgacgaattcatgcattaacaaaatgggggatggatgggtgccaaaaggcttattaatgcccccaatcaaattcatttggcaaattatccttccgttttacgactcaaattggcacccatccgtcaacagaagagggaacccctcaaacggcatgcaattcatgcaccaatcggtccaattcttcttgcacaacgttcccgttggtcactgcctgttcacgttcatctgcaaaattgttaatggggttaaaagcaatggcacggcaattgggacaaagattaattagttaattgccaattaaatacgagagataaagtgttaggaaaaggagaaaaacacccaatttcgcgatagtgtaaattttacgcaaaagaaagcaaaaagctagataagctcataacgaatgatggacaatgaaagtcttaacgaaaatttggacataggacagtcggccaaaaaacggacaaaatgccaaaaagagaacggacgaaaatgacaaatggccacactttgacatcgtcacaaattctgaagaagccaaaacagttcaagagccctgaatctcctgcacagtctgttcaatttctgctgtcaaattgcgcacgcgttccttctccacgagcaattcatctgtcgaacggacggacaaaagttagggaaaagcgacgaaaaatgaacgaacggacgaaacgcaaaagcaaagacaaaaggaaaagacaaaaggaaaagcggaaagcaaaacgccaaatttaaacgaagaagcggaacccattcacaatcagttgatccgttcattttctgctggtcattcccccgcgtaattttgcctctttttgtcccatggcttttccctcccaaagcattgcaaaaaaaggcaaaggaaaaaaaagtaaaaaaaatgggccaaaagagcgcaccctccagtctgtccacttccttctgcagcttttgtaccgaacgttcagcgaattccgcgcgagtctcagcctaaaaaggaaaaggccaaaaattaaaaccaaaaaatatttttaatcccctaatttttcttacaaaaagcataagcgacagcaaacaatcactcaaaatattttaagaaaaccttatccaatatcgaaattgcaaaagcatagcaaaactgcttgtacttcgaaacattcgcattttgtaaattttggtttttaaattttgtttttttgtttcgaatgctatcccctaatgataatccaattagcaattcctcattttgttgattggtcaaagcctttgtttggctttaacagatcgaaagcaacaaataattaagcaaaaggcgccgaattgtcagattgcccgcgggcattgtgccacctccttaagacgggcgctgaggttgcgaatttgctcctcgtaggaatcctcgcgttgcaatgccttctcttcgctgacctccaacgacttcaaattgttaccgacgacgcgcaattcctcctccaattccacaattttgctggaagagaaaaagcgcacttcaaaacaaaattaataataatttatttttagtgaatggcaaatgcaaaaataattaattaaaaaataaattaaaaaaagagacgaaaaagaaaagaaaaaacaaaaaaacaatcggaagaatgttaataaagcaaaggacacgcaaagggaagtcatttcgaatggttagcataatgaaaagcgacggattaaacactcgcgaaaggccaaactttgcaattattcgctttctttccccaaaagttcgggcacacaatgacagacctccttcagacgcacttccatctgacgcacttgctcttcgtacgcttcctcgcgttgcaacgccttttggggggaatttggagagaaaagaggggaaatgagggggtgggggaaagttatgagcatttgtgggagggattagcaccaattgggtatgaaagggacaaaagaaaaaaattagagggcacagtttgaaaaggaaaaaatgccaaggaaaagccaaagtctgaggggggaaaagccaaagtttgatttgtgagggggggggggggaaagaggcggcgtctcccaaaaccttttcttcgctgagctccaacgacttcaagttgttgcccacaacgcgcaattcctcctccaactccacaattttgctgtaagtcggggcaacaaacaaatgaatgggaaaaaagagaaagacggggagaaattggcaagtgatcagaaaaaggaaaagaaaaagttagatgagagaaagaagaaagaaagagtcggtgtttgcgctatccatcgggcgaacaaagcccgggggaaagaattacgaatggtcctttctcatccaaacgaaatgccaaaaaagaaattgtgccaaatcaaaattggatatggtaacacaaaaagacgaagtggaggcgattggagcagaaaagagattttaactcataatgcaaaaacatatttaagcattgccaatggactcacttatcgccggcctctgcgcgctcctcggcacgttccaagtcg

SEQ ID NO: 10682 - DNA, 1842 bp, Heterodera glycines
  unsure (1)..(1842): unsure at all n locations
tagtcaaatgggttaaagtgcaaaaatgagaaaatgttaaagggttacattcattggcataatgaggccataaaagancgaaagaaaggccagtccggcaatgcgtaaaagtgctaaaatggcatttggcagtgttaaagtgcgtctaaaaatgctgccattggcattggcgatatttgccgttggcatttccattggccatattagccattggcattgccattagccatattagccattggcataggcattgtccaagtgcgtctcgtctgtctgtctctccctccaccgtcgcttcccttcgctcacctcttcgtatttgcggtccgcgtcctccgcgatcactttcgcttcctccacttgcacctccaaaatgtttgcgcgttcttcgtccgcctgcgaacgcgtctccatcgatttgcgggcgctgatttggacgacggaaaggaattggacaaaaagcggacaaaaagcaaagcgcaaaagcgaagaaaaaaagcatttgaaaagcgacgggcggaatgccaaggaattaaaaagctatgccaattcaatctaaaatcaacagacaaacaaacacatacacaacacatacacacagcaccacagtaatacgtacagtacgcaaaagtacgaatggacccctccctcctctgtcaaataattaattggcccaattagcggagtgtttgtcccatttggccaggggttctcttctctctgtccgttggctctgtccttccctttcctttgaactgaccgttccgattcgtcgcaattggccgtcgcttcttccattttttcggtggcaagtttaaggcgctcctcaagcttgtccaactcctcttccaacagaaccatgcgacggttcagtgacgccacttcggcttcagccttaagcccacgtcattggggcgacaaagcaaagccaaataaaaagtgaggaggggcggcgggggggggaatgaacccccggggaagaaaccgtagcaaatggaaattgcccacaggggattttgggaggagggactgaccaatccctccggcacattcggccaacttcggcacacaaactctgcagattttcattcaatttcacactcgcagctctctcttcacattggcactcattttaactatttttttggcattttttgcattttttcgcggttttccgctcgcgcgccttctcaccgttccgcttcgtccgctgctttgctcgcctcctccaacttttgagtggcgattttcagtcggtcctccgtgcgttccaagtcctcctccaccaacacaatgcggcggttcagtgcggccacgtccgcctcggccttgacaagttccgtttgatggattgtctgtcattcccattcgtttgatgccctccccccaatttctccggaataaatggcactttttcccatttcctttccattcccatttttcttacgtcctctcgctttttgcgctcctcctccaattgccgcttcacttcgtccgcttcgtccttcgcctgctccgcctcctctcgcgcctggcgcattttcttcttcagcacgtccagcaaggacgtctgctgagaaccgcctttatccatgcgcgacattttaatttttagtgccgaaaaataatcgaaacaaagcgaaaataacggacaaaaaaaggactaaaggacgacaaaagttttgtgttcaaatccttttctgacaatgggaatggacgaacatggcaattgccattcaaatttaagattttctatccaaactgacaaattgagctgatcaaccgaccattcattcattccctcttctttttctgctcaaatttaaggcatttgttgcctca

SEQ ID NO: 10683 - DNA, 990 bp, Heterodera glycines
tcattcagataaagccattgcattttgacaaccaaggcattcttttggccgactttatcgagcatcagtgggccaatttccctttggatggcgttttgggcttagcgtggccctaccacccaatgattttgggccacaagcctccgttgatgaacatgcttgaccagcttgaccagcccgtcttcaccatatggtcggactggtgagcataatttatcattgaaaataataattttatttgttaaaataatttttggcactgaaatgatccatcctcggcaattatctccatcgcacccatacttttagtcactttggcctagcatcgggtgatcaggacccgatcacttttcaagtcaaaatgaaaatggatcaatccattcatttaattcttttttaaaatcacaaaaattgccaaacatttcttaaggcgtcgtcctgctgaactgggcggccccggtggcttcatgacaattggtggcccggacaatgaccactgttctggaccatggcataatgttccacttatatctcgatggaatagctggacatttcgagtggatgggtgagagacaagtttctaggcttttcgaggtcgctgctcacgaatcccggcatctatttcccttatatccgaatcccgggctcaaattttgactcattaaaattcaataaaatcatggatcatttggttttctatttttttttaagggctaggctcaatgcccctctatgcaaaatcatttttattcattttctcatttttccccgatttatgcaaacctgaaattgggcgaccaaaaagcagaaatccggcacatcggatacaatacgaaatggaaacgatgccttccaagaccacggcacgagcgaagaaagctaaaattggaaatttaattttttttttacctttttaaacggccacattttcttttctctcttttatttttcctaaatttcaaaaaaaaaaaattttttttttttctttcg

SEQ ID NO: 10684 - DNA, 2942 bp, Heterodera glycines
  unsure (1)..(2942): unsure at all n locations
agtgggtgggttctgctagcaaacancgataanttcagaatttggaaaattacaaagttaaacggaatgtgaataaatattagggtagtgcagaggtcgtttaatcgaaccgaaaccgaaacccggctttttctgtccaaaaagcgaaaccgaaaaccggcttttttggccaaaaagcgaaaccgaaaaccggcttttttggccaaaaagcgaaaccgaaaaccggcttttttggccaaaaagcgaaaccgaaaaccggcttttttggccaaaaagcgaaaccgaaaaccggtgtccggatcgcaaatgtctgggccgcaatgtcatacaatcttttgtacgacaatacttaatgctacagaattttttttttaaatatttttatcacacgcattttccgggagccctttttagcacaatttaattatctgcgcgtttttaagcagctaaaaatcattcatatccatcatgtaaattgttttggtataaaattcaaattttaatcctttttagttgctgccacaaatgctgattactgcgaggaggacaacctgtacactgttcaatgtgatcaacgacccaaattggcaccaattgtgttgaaagttaatgggaaagacattgtggtgccagcggaggaatatataattgatgtgtgtgtgaaatttgatttaaaaataatcaattttaatgaatgaattaatcaatagttgaatttgccggatggaaaatgtgcccttggattgtttgggcaatatggcgccggattcacgacggtaaaatttttagaaaatttttatgtaaatcggtgattttgggtaaaagaatttttatgcaaattgtgattatgggaattttgaggaaaattcgattcttttttcaggaaaatctcttaacaaaaatgcaataaacattaaaagaaatggtctttcaattttgttacaaaactttttggcacttccactttggcattttcagcccaatctgtgctgattgagctgttgattcattcaattccaggattggggttgatccataaaactttccggcacttttggcatttctacgtaaatctgtgctcattgtgccgttgttaagtcatttattcccaggattgggtttttcccaggattggcttatccctaagactttttggcacttccattttggcatttcactcacaaccaatctatgttcattgagctgttgactcatgctgattcaattccaggattgggtccttggcgctcttttcctgaacgcatattgcacaatgttcgactacgacaagggccaggtgagcttcgcgagctccaaggacacaatcccgtacagggatggcgaggaattcaacgcgtcattgcacgtccattcacgccaaattctcctacatgaacataaggaggaattgtgaagtgttagaaaatcgggggaaattaaattttcaatttcccaggccccaatttcttcaaaatcttgtccccagatttgagcatttttggactccccttaaatctgctgctggtgatctccgaactgtgaggagagcaacaggcttttaattttaagccactttgtttttaatatttaattggatttaatatgcaacaatgtcaaggtgaaccattttaatgagactgaataaaccaattggcaaatgtaaatgtgtcagagtgacgtttaatgcaaagtttcaaatccataccaatttaaatcagcaggttgatcaagcctggtctcgtttaattacatcatttcattaatgggggaagtgagagtaaataattagctgcataactttaaattttatgtaaatgcaagcagtcatactagtcacatacatataattgggctaaatccatgatcaacaattgctggctcatgggacggacaaaaacataaataaaaaaggtcaatgatgatcaaaatgccaaatttggtctcaaaatcatccgtgatcaatgatggtgaatggtgggtcaggtcagctgatcatgggaagaatgtgggatttattacataagtgccaatcaaaatgccaatggtccaaaagtgccgatcattcattcacagtgccatccattattattgttgtttgtgtgttaagctcggttgcacaatccgcgctccaatcggccctgccacagctgctcaatgactgcttcgtccaccagtgttgaagtgtcgcccaagtcggcgccggtgtcgccctcggcaatttttcgcaaaatgcgccgcgtcactttgccggaccgggtcttgggcagtcccggcgctttctgcacaacatctggcacagcaatggcaccaatctgaacaaacgcctcaaattacccaagaaaaaaataatattaaaaaatttttaagagggggtcacaaaaggtccaagctgaaggatttattggctgaaatttaaaaaaagcaaaaattaattttgtaataattcaattaaaaaagtgacacctcgccaaccgagccgatcacttgaagcgatgaacggtcgtgttttgtgaccatttcgtctgaaaatgccatcagcgcacgcacagcggttggcgcagtgtacagcttggtgatctgtatggaaaaaattaaaaaaacaaaaaaaataaaggaaaataaaaatgttaaaatctttttaaataattttcaaaaaataatatggattatgttagatttttatatttttacacattttattttggtagataaacatttttatgagtgaagcatgaaaaacttaaaaaatttctcagaaaaaattttcaaattctagacgatatcacgaaaatttaatttttatttagacttgttttactaaattattgaaaaaattgttatttataaaaattgtcaaaaaatatagcataaaaataaattgttataattcttttgctgaaatggcatttttttgaaggttttttagcaaanggtatataatg

SEQ ID NO: 10685 - DNA, 4189 bp, Heterodera glycines
tcagattttcgttctccatcagcttcagctccttcagccgtttcaattcgtttttgttgaaggacaaactgcgcatttggctgtaccgtttgtacgcgcatttcactccgttggacatcgcttgtttggcggacaaacgcgcgtttgcctttgccgcggagccgaggcttccgcccagggaggacgagtcgtgggacaacgttttgctgtgcagggagcccgacttctgcaagaagcgtaaaagcttactcattaagcggtgttttatttggccgagtcggaaaacgaaagcatttcctaattgattctgatgaccgactaccaaacccttttcaagggctattcgtaccggtcaattcaatccccctccaaccccacccaattaatttgctaaatgagtgccaatgccaaccattcccctctcctccaacagtcgaatctgttcccgtgggatgcgccacgtcatgtcgtataacatgcgctccttcctgaataaatgacaatggaaattattaacccaaatcactctctcccctaagggtcaaccgacaacgaattcggctgataatcccagcaaagtctcgcccaacggactttgttggtgccggattttaccattacctcttttgagggctaattcgattgccctctaattgctggtttattgtgcattaaatgccactttttgtcgtgtcggccgatcccttcggatctccctcccccactcactccttcaaataaagcaaatagccgagcggaatgctcacagctaagaaggccaacactccgattgtgatgtaaatgttggtatagtcgcacagattgccgtcaaagccgcactttggcatgtcgcttggcatatatccgtcgtaggagccccaatagtgactcatcgtctcgtgcgccacctgcgcgagaagagagaaaagcatcgccgtcagttgtgcctctgatttgcccacccttgccattctctgatcagtctcagtcactactactctaactatccaatcatcaattcccaaacattcatttgctgatcagtccccttttccaattgttcccgaattgctcacatgctccgaacagtcgttctccgacagtgcgcatttgtgcttgtcgctgagtcgcgcggtcagttcgaccacaattcgcattgtgccgttcttcacatggtaagtggcatagctgggcactctgatcgccttgttgttcatcagcacttgccccgttacccctgaggagacaaattcaaaacggtggaccaatttggccaatatttggcgaattaacaatcatttggctattgattgaccctttccctgatcattagttgattttgccttctcccgaccaataaattgtcgtgcggtcattttcttccaaatgtatcgcccgtccaaaaagatgttttggttgcgcgactcctccaccgaatcccttacagccaacccgtagagaaacagcgcatcgtacagggacatgtaagacagcgtggcgtactgtaagtgttgcaggaaggaatgggcgatgcacagagagttttgggatatttcactgattttctcgatggtcagccggggacggtcccaggattttggtcatgagggtactgtagtggtgggggggggggggggggaacagaactttagctatcataccctctgggcccgtctctttgtgcctgtttcttctgtctggctttctctctaccccctcttttttttgtttctccctcctcacataactgctgatgattcccgtcactttgttgaagcgatgctcaaactcctcaatgaacttcttgtcgtacccatgagctgtgatcacaattgtgtcgtcaaatgccgtctttgtctcctgcttctcaatgttcgtcgcttcccacgggtaatggtcgtgcatctgtcgagacaatcagccaaattcaaatggacaagcaaattttgatcaaaaattttaataaaaaagaaaatataaataaaggaaaagcatttgccgagactctcgccatttgaactgaatccctttccttctcccacaccgtgtgaatccaagcggaaaagactcacatgggcaagccatgggatcagatagacgtagtcattcgttttcatgtgcgaccgatgggcggcgatcataaaattgcgagacgagtgcaggtccatgcccatctcgacgattataactattgcgggaatgacaattttgcccgtctttaattacccatttccaatcattttaattggttttcccgtgggctaatgagtttatttctttgttgtccatccgcccaattctttgcttttgcctgtgctttctctgtccgcttacttctcgcgcgattccgcaacagtttcaatttgcctgtggcaatgatttcgtccgccgtcatatacgggtccaattcgatttcgacatttacttgaaagatgggttaactaattgggtcattaggaggagggagtatcactttctcccctaattcgctcaaatgaattccctcatttaatcgctcactttcaatttgcgaatccttcaaaaaattcttcagcgaatgcaacgaaaggcgttcaaagttaatgctcgccttcaccaaaccgatctgtcaactcattaattgtctgtttgttttattcttggcattccgtttgtatggcctcgtgctcatttccgagtttattaatagagatcggacattttatatccccgagtttcgttaaacaggttaaaaataaaaaatcgtttcatcttccttttgtttaaatgcgattttttcttttcttttaaaattgattattttaaatgcaaaaatttattgattaaaaatcgaattaattacataattaagtcaatttgagttttaactttaaaatcaaaagcttcaactaaaatttaagttttacaaaatgcctaaagttatgtatctggtaaattctgacaaatgagcatttgtaaatttctgttattttttttaattgcaaaaaaaatatttatggaaaaataaatcaggatttatactcgttaacccgggtttaatactaaatccggagatgagcagcagcaggaaaccttcgctgttcacctgtttccacccgtacaattggagaagagtcagcgcggcacgtgccatttctgtggccgaagtcagcgcgacagagccgagggtatcgaaaactgaggggggggggggggaatttttgaaaaattaattcaaaatttcatgggatcaagtatcttttttttggccaacttgttctgtccgacagggcgtcgtcgccggaaaggtgcgcaatgattggcactacaaaaagcaattatcaaagggattaacggggaatgccttccccaccgttccatcgtgaagccaatcgtccgatcacattcatttctgaatggtttttgggtaaaatttgccctttttccctgccaaaccgttgttgcacccgggcccaaagtacacgctggcattgcgcaaatagtggaggaaggcgccgtgttcgacaccgctcaatcggttgcacgactccattgtgatcacttggaaattgatttcatccggcaaaatgcgacgctctttcatgtcgtggtagcacatttccaacacttggggctgaacagcaattcataaatttgggtggactttggcatttcaatagggcgagagaaatgccaagcaaaggcatgcgatggatgctaacgccaccatcggttcgatagttttaaaaccgtaatcgatggcaccctcaactcaccgtttgcccttcgctacggtatgagtttttcagtactgtattgtcctaatcaacttgtgctggtcgtacctcgttgatgatgttcgggttgttgggctgtaagtgtgcgactttgatcacattgcttttggctccgccagtttcacaggaaatgcgcgacggacagccgaggaaaaagcagaaaaagcggagcaatgcaaatgaaagcgacgaaatgccggcgggggattttccacgggccattggacaaatcgacgacagagaaggggagataaatgaaagcgatcagaaaagtgatctgaaaagtgaccagaaattgatcggaaaagtgattggaagtcaaaacgaatttcaatgtattttaaggggtgcctatcatttgggtgtaatttgtaagagtttctcggttttcagaattttcggtccccacctct

SEQ ID NO: 10686 - DNA, 5476 bp, Heterodera glycines
  unsure (1)..(5476): unsure at all n locations
agctttctccatcgatcgcttcacccacctcatcgtcgttccctcaacagcagtagccgcgacggatggaggggaacccgccggatgacggtggttgagcatcggctgatgagggaccacctgctgctgctggtactgatgcaaatgatggggcacacctccgcgcgttttcccgccagtcaccgctgcgtctgtgtagtcccctggcgcatgacgctgctgaggcgcaatggacggagttgttattagaggagagccgcttagcattgaattaagcgcctgtggactgatcgttgtgttgtctttgaccgatggcttgggtttcgaatctttcgtggtttctattggatgtacaacggaagcgacccgtgtggaagaagtcgtcgaattggaagaaccaacactttccttcttgactccttgtggttgctgctgtagttgttgcgattgctcatgagaagggaacattttgttggacgtgtcttcggcaacttctgcttccataatgggcgattgacaccgatggacgttcccggcaacagcagcggcagcagaagaacctccggtgatgtcaccattcgtattattttgaccaggggcagcagtgccggtaccaccgccactcccttcgttcagtgtcccgctcgtcgtgatgttggtgttgatttgcaaatatggaaaaaattgaattgctatcacagacagcaatttaacgtgtaacaaatctatgatttaatcaattggtaaatgttatcaaagaagtgcagatttacatgagatgcacaaaattaaataatttggttttttttgttagggtcaaagggaaaattaatttttcagcctcaaagaaattatgtttccacagtttcaactgaactttgtgtttttcatatttcggccattttgcggcgggacagtccgtctggtgagagcaccaaagtttagaaaattataactttcgtaagtgcggaccaaaatgataatttttcggaaaatctttaaaactatgtactgtattagccattaaaaatcaaataggtagattgattcaagtggaaatacattaggaactttcttttttaaggtggtcattatcttttttacttaattgcttagcattagcttgatacataaaataaaacttgtttaggcggaactctccaatcgtttagtttttgagatttttgtaaagactatctattaacgaaaatatgagcaaaaattgcggtttgaaacgactttttcgaagacttcacccctttacctaataaagagttaaattaagagaaagaaaactttccccgtccacttcagcccttttttatccgcaaaaccgtaaaatccctaaataaaaaaagtagaagatggatggggtccaataagaaactgagaaacctcaccaatttcagcgcatatcgtgtctttctatcggctggagaatgagaaaagggaatcgatcgacgagcaaacagccggggggggggggggaaggctttctgtggggtgaatgaatgagtgagtggctgacgactgctacacttccaaccccaacgagcgaatgaatccgtccgactgtctttgtctgtctgtctgttctgtttgcttttacatcactttactattactatttccttactctccctccccttttcgttcattttattttaaagagagcaaaaagaagtcagagcgaagagacgaacagagaagtggaaggaaattaagaactgatttagggaattaaacacaaggggcatatgtagcatggcgaaacggagggcggttcctcctttaaatttctatcacttccgtttctgcatttttgagccatccgagactaaattcattcccgacgccatgaaatttatgatgtatttggcgtccaaattcgactttttatttattccagggccagagaactcggatccgacccatatttaggcccatcgaaccccgaacccggattcaaacagaattgaaaataacaattttaaaattagtgcaacaaattcaataaaccgtaaactatagcctaaatttcgttaaactcgccaatcgtcgtctaccccacacacagaatgttacatgtcattgtggaaaaatttgaaaaaatttttaatattcattcgttaaacaaataaacagagacacggttcgagaccaatacctccaaaaaacccgagaattttctctaaccgtggcagatactctcgaataaagcacctaacaaataagggcactagtttttcattgtcccatcttgtattaaaaattgtctgttagagccgcttaattgctcacaaatctcaatcgaaacaatagattttatatccgatcaatcgatctgctgcatttggccgttctgttcgtttcctctccacttgcttcttaccctacacaatttgtttatcggagttcgttactttcggctgcccatccctcgccgctttcctcccacactccgtcggtccatccgccgcgtgtccttcgcacttcccacggattttcgcgccttccccaccaccgtctttttgtgcctccgtttttccgtcccttttgtgcgcccctcctccgtgtttttgtggcccaatacggtcgtttagcgcgaacattcaatgggaaattccgcgtcggggccttcggttcttccacaagcgaagtgccgacggagttcgggtagcaaaggtccttttacggagttaattgtggagacaaaagcccatttgacactgttttcttaccccttctccgcatgcaaatccttccgggcattctccgtttacacatggtccgatggcaccccttgagtttgttcaattattacaacaacagccaacaattaattaattaattgttttgtgacttttggacccaatttccgaaatcattttctcatttaccctgtagtgataccgacggcacagcaaaagtcatttgaattacaaacgtaaccaatcggacaaagcccattaacacaacgtcctgaaaacggattaattacgaaggcaaatccgaagaacggttttatgagagagattctgaaaagattataaaatggagttgattttgggagtgttcccatcgcgttcatttaatgcaaatgacgacactttgtgatttaattaccgatggattttcccaccggacatcgacagcaaaatttcccgcgctggcaaaagtacccttggccacaaagtccgttaagacatgccgcgaccgcctcctcgccatcacacgcagctaatggaaaagcagtgaattggaatggatgaaacaagacggaggataactcactttttaagtcgggttggcttctggaaatgaacattggccggcaacagcagcggaccattggcatcatttggggctgaatgcactggtaggcttggcaatggatcggagtgcacgagaagcagccgggcgggcagtgaaactgcatcggagaataattccattggcgcttgggccgattgaaaatcggttcggaaaaaaggaaagtgcttggggaggagtcggagaagttggagcagttttgggatgatgatgatgataataataatgatgaagacgatgagggggaaggggaggaggaggcgggagaatggcaatgggcaaagagttggagcaggcaaaggaaagtcagaagcagaaaaggggcacaaaaatggaagaagttgccgagtgccatgctgacaatgaaactgaagcaacgaaagggccaacggaatatttggaagaaagggaaggacggaaagggaagcgaagggaagggaaaagaaggcgaactccgtccgaagcagcagcagaagaagaccgaagaagcggacgaagaagcgaatgcaatggccagcgggggctgagtgattagccggtcattatcgagtggagtcatcgccgattagctgcagcggtggccattgtttcagtgcaaacaaaatgggggaggagagatggactgtggcaagaggccgtgccccaagtgccctctctcctgaaactgaccccggcgatgatccaagcggccggggggggggagacggacttcctccttcacccatcgccacttttgtgcccctcccctccacccgcttggcccatttctgtccccttttcgtcctccccccccccctcgtccatttgtccttaatcgctttttccttcgctccccgccgccgtttcaatcggcttttattcctttctttgctttgcttttcatttgccatcggttgcgaattgaccaatgttcggatgtgattcattaactcatcgaagaggaatgaatgaatcatcattctcattgtttcacaaatttatttaaacaaatttgagtttaattgaccgatggaacaaaaagaggttgaaaatgatgaaattgaacaatataattagcaatttgaaagcaattaactgtaatttgatgagataaatgaagaattttgaagggacgaccaacgaaggaataaaataatgaaaaaataataaaacaaacaaaaataaaggtgtggatgaaaataaacaattaaaggggaagaaatttgcacaaatgccggaaatttttgtacaaaaagggaaatgcaaaagaacaccgtttggtttgcaggtgcaaatcgggcggcacaaaagcggccgttgtgccgtcgtcttccgtcccttcttcgctctccgcttcagccgagactgttccccccgctgcccgtcacggggtaacacaaattgccggcaccgcaagcgtagcccacggggcattgctgtgccaaaaaacgaaatcaatcggcaaaaaagcttttgggaaagataagcaaaacacccacttcattaacgcacggaccaagtacagaaccggagccaagggaacagcagaaattgttggtgttgcaagcatagccggggggacaaaggttattcacgcagggacctggggaagtgatcaggagataagcaaactgatcagcaatttagaagccatcgaaatggtggattgacatagaggagagagagacggaaagtgggagagactgagagagaagtgagagaaagtgggggagagagagagagagacaaagagagcgacattaagtaaagggagaaacggaaaataaaacctggcgatgtgccggactggcatcggcagcaaaagttgcgtgcattgcagaagtatccttggccacaaaggccatttagacaggcagcaactgcggggtctccgtcacatgcgcctgaattgccatttcaatagcaaatgattaattaattaattgtctaattggccactgacttgtcagatttgtctgtgccgactgtgcggggcaacaacagcccaacacacaaacggtggccaactgatagcgctgacattgggccgagttcatacctgcacattaagcagccttttggcccgactttacattaacagaaggaacttacacggcgaanagcacgcgcttgggcatccccactgccttttgcttctgagcag

SEQ ID NO: 10687 - DNA, 1397 bp, Heterodera glycines
attgtcaccaaatctgtaattaaatatatatatatttttaaattattacaatttttttaaatttaccggcattttgtgccaaacatttttctcgcgcagccatccatgactgtttgccaatgttgaattggtattttttgctgcggggccccgtgatccatggcacaagatcgttcggcacggaatcgcgcagctgttataagaatggcattttttataattttaattaatttaataaagattttaaaaaatcaaaaaaatttatttgtttcagcttaaaaataagaatatttctattgcattaaaaattataattttgcggatttttttatttaccatttcaggaccctcttcctatttaaggacaaaaatacttctctgattttctgagattatgaaatttttgatttaaaaattataagaaccattgtgtgtacttgaatgtttgtcgcgtcataatgctccacaaagctatgtcgattggctattgatgaacctaaaaaataaaattttaaaaatattttcaacataaattaattattatcttttacccgaaaatacggcaatcgccaaacacgctattactaataaagtcattaaaatatgaatgaacagattttgtgcctgctggaaacaaaatattaaaatgcatgaaataaaaatgaaaaatggaatgtgtgaatttttaaaatttattttaagaaagcttaaacaccaaaaaaaaaaaataattatgtgcaaaaaatttgttaactttttatgatcatataagaaaataaattgacggaaaaaggggtgaacggaccttttgaatgggttgaaaggttgttaaaaaatgattttaaaaagaaataaaaatttacatacgatttatttattttatttttttcatcattgtttattgtcaataaagaaaaagtccacaaaaatggaaagatccgcttacattgaggacaaaactctaattaaatgtaaatagcgaaatattgaaaattacttataaaatcgaaaataaaaaaaatttcgtgctactttttccggacccaatagaaatgatacaaatgtgaacccttggctttgggggggggggggagggctgaagtcaaaaattcgatttttaggggtgtatttttcttttttaagtcgattttttggggtgtatttttggttttttgaaatcccgaattatggggtgtattttacaaaatttttcgccgttttcgccaaaaaattaatatttttgacattttggcctccatttttcaaaaatatggtaaaatggaggtccggcggtgccgataggcgccgccgggaaaatttttgagtattttaatgcaagtttgttaagaaaattgcttacaatttcaaataaaaatttattgaaaattttttccttt

SEQ ID NO: 10688 - DNA, 3867 bp, Heterodera glycines
  unsure (1)..(3867): unsure at all n locations
aaatttaaacaaattttccttttattccgtacatctgttaaaggaatggtgatttggtttgtccttttaagcccctccgctccgctgacggaaaagagaagccgccgcatggcgccgcccgctttacaggagaacaacccgcccgcccgaatgtgtacacacacattttgggtatgcatggctgactctggctgtccggctgctgtaccatttgccgcccgatttaggcgagcggacggtgaaatttaatcgttaaaatttcatcgcccgaggggaagcggcagccgacgccacggcggagctggacagagcggctggcagcagccaacgccatcaataagccactttttacattaggggcatggtgggggagggggtatggcgaggaatgctttttcgcaagattaattgggatcatttgagtcgcgccgctcgccgaatgggtggctggctgactgccgggataatgggtcagccagccagccgctcggctgtcattgctgacagccgccgatggggcggcatgggggcggcacagtgatcggcggaggatcgctgattagtcactgcggtgggtcattaggtgttccaaattaatccttttcgtgcctcccgccatcggcttcatgttggtcattagatcagagctgatcagttaatggttattcgcgctgcgcaatgactgcgacggggttagatgatcaaattaggaacattgcgccgtcggcgatagggctaatgggtggtggcggtgagggaacaaaatgatatgatgatgtgatggtgattaatccgatcaaaactgatgatgcgctttgatcaaacaaacgaattgggataaccggggagcatttgtgatggcatcatttcatcagctggcagaaactaatgaactgtgctgatcagaaagctgaatgtgcgcgatcaatttgtgccacccggtgattgggtgggtggcggcgatggtggaaaaatgccctcgggcgtttcgggaatggaacacagagatttttaaaaatttttgtttgtacaaataaatttttattgcggaatttgacctcgtaaaaatgtgatttaattgacacaaatgtgtaatgaatgcttaaaatgtcttcgacggaccaatttaggacgtttaacggacgaacgcagctgatgtttgtttttctgtgttcacaaattagcctatttttaaatataggtcagtcaaatagagagttgaaaattttgggattttaattttccaaaaaggtgcgaatcaaaaatattttattttatattccattttcttcttttctttattttttcttttcatgaaaattttttttttaattttttttattttcattgaaacgaatttagtttgaaaacgaaaatttaattaacttttaaaaattattttctgttaattataagtttctgttgcataaaaaagatatttttttttgaattttcataggcaaaaaaatctttttatgaaaaaatcctaaaattcataaaatatttattttaaattagtgacatgtgatttgagcaccggtgactcacccactctttttagttttttttctattactgatcagaaaaataatgatttatttatcacatcgattgataattacatggtgattacaattatcagactaggaaaaatagtttactcataggcttcgtcatggattaaaaattgtataaaactgaaaattgcataaataaaatcaattttcttcagtccgtcattacaaaatcgccctcaaccatctgctgatcagaatcgtcaactccgttggaatgatcaaagcaaagtgcgcctccccttacgcaatcgcgcacttgaggctcaattggaattctagaaaaatttttggaaatttaaaaaaaaaatcaaatttggttagctcatttccgtctttggcctgcgcaaaaccaacatgactttggcccacatcaaacaccgtgtagtaacgacctgaaaatttggataaattttggaatttttaaacaaatataaaaaaataaagtttcaatttcaaaaaaggaaaggtatgagccaaatggcaaatgtgaatttttttttaattaagaaaattaaaaaataatgaaaattttgtaagaaagaagaaaactttattagtgaaataaaatattgatttaaataaaggaatttttgtttttgcataataaaaaattattgaaattaatgaatttaaaaaaaaatttcttttaaatccctaaaattatttgataattttttaactgaaataaaaaattaaaataaattctataaaaacgtaaatttataatttaaaaaaataaagaaaaaaaaacgcttttgcaccaataaacacatcgccaagaatccaaagttctccgacacgttccggcaaatcaatgcccataaaaccggaactaaaaaattaatttatttttacaatttcaaatattttgcccatacaggcatatgcttttgcccatgctggtcattttcagcacatagtccttgcccttcaacgtgtacgccttgccaccgatgttgatcgtcacatcgggcagtgtgggaatacgttcacatgatatcatatactgtatgttgaaaataggatcagcatactgtataattttgttgcaataaaaaaaatgaaacaaaaaagggttacgaataattaagcatatgtgtttgtcagattgagtccaattattagaaaaaattggattaatattctctataattccatatactgtattttgaaaataggatcagtatactgtataattgcaattgcaacaaagaatttatggataattaagcatactgttttagtcagattgaaaatccagatccaccagcttcaatatgaaatcccggtccatatttaggtccaggctttttttttaattgagaactctaaatttaaactggaaaaagcctaagtaattttttgcggaatcggttgaattatatggcaaattgtgaacttcagttttgtgccaggatttgcattttatggaagcttgaagctaaaccaagacagatttatcatttttgttccagtaccaagatgccaaaatatgaaaattttcgaaaagtttcacctcgccatggaagagcggaattgctccaatgtgtttctgaatcttttcaatgtcatttttgggcccagcaagcagggaagtgccttcaaattaaaattgctctttaatttatatttgaaaatttaattattttttaccggtgtccgcaatggcttggcacccattttggcacgcaagtttgccattacctccactgatcgaatccatctgtaaaacgagagagaaatggagacagacatttttgaattggcataaaacaaatggccaagaaaaataaataaaatttctttattatacaaaaatactgtaacattagttttcagaaatccaatatgtaaagacaggcatatgacctagtaaaataaaattttctgtcgtgaaattttcaaaaattttaataaggtttccaaaattttcactctctgatgggtttggttttgtataaagctacagtatgatggcaaactaccataccttgaattgccagtaggctttgtgtgtgaccggtgtgtaagtgattggggccacaaatcgtcgctgatcagtgccgccaatggtgatctcaccaccaaattcagaggtcgggtcacttcaaaattttcatggattttatggaattttccaaatttcagagcaattttctagacaaccaagcgtaaattttcatatcgtggcaataataaggaagaggcaattatgaccggcactgagaataggtgccgtanaaatttagtcattcgtaagaattttctttnttaattcaaactgattttt

SEQ ID NO: 10689 - DNA, 1414 bp, Heterodera glycines
tgccaagaatgccatcaaattcgcagccacgaaggtgaggccaggctcacttaaaaaggaaattttgttgaaatttttaggcctagcattagacatgcctggtcgcttcagtgaattcctgtttttgtacacaaatgtttgccatacaaacaatgtctttggaaacaaatctgtacaataatattttaaattaaatttatttaaaattttttatgaaaattataattataattatttgtattttaattgaattttataataaaaaataaaaattgttatttttatttttttagttaaaaataataaaataaatctcttaatttatgcattttttaaattttaaaaatttctccaactagtactttctttttgtaaattttgtcagttttttttttctcatttggttcgcgtactgtctctaccgtaccctttcattgagccagtgccgtactgtattgccacctttcgcccatcgggctgataggaggttgatttggcgccatcatatttgtggtgaaggcctcaaatttcacaaaaaatttatgagggtttaaaaatttaaaaaaaaacatactgcaagcgatgtcataaatgggacattttttggacggcacccataggtttgatgaaccggtgtcgaagatgacggtgaaattttgcgccggtgaaccgatggaaatgtcaccgtaatattgggcctgtatcgaaaaataagaaaattcttgactaattttttgataaatatcgaaaaaatatatcaaaatcttcgataaatattaaatcggtcgttccggtctctaatgtcagctattttgatttttacatttttcaaaaatgaaaatattaaaattcaggatcaattaaaaacaattgggatgccaattagagattttgggaaaaatttaaaaatatcggggtttgggttcggtaaataaaattccaaaggaatggctttcataatcccattttttgtaaagccaagtttcatttcaaatccaaatatatcagtttcaaatgtggcccgactgctcacgtccatgtagttgcgcaacagttcgtcaatttccgtgccaactctggccccgttttgtgccatttccatctgttcctggtccgattccgcgctgctgtactcttcattgttgttgtagttgttgttcattcgctccacggtacggcgcaacgactccgtgcgatgcttgcggaactgttcaagcgatccggtgagcgccagacgggcgcggacggtgtccatgcggcgaagcggaacgctacaaagagtggaaaaataaatcatgttagatcagaaaaacaaaaaaattgaattgctcggtcctgaaatacaccacgactcgggaacgacaccgagtctaaaggaaatacccaagacttttttgactcgagactcaataag

SEQ ID NO: 10690 - DNA, 1477 bp, Heterodera glycines
  unsure (1)..(1477): unsure at all n locations
aaaaaaattagacagaaaaaaatttatttattaacaattttaatgaccctaatgatgaatgataaaatgcacgaaatgttttttaaaacaatttaaataaaaaccaatttcaaaatatttaaaataaaataataattaatttcaaaatattttaaattttgtgaaaaagatgaattggacatataaaaatattcattttatacatttgtagagtaacaacaaacggttgatgattgttcgtcaacattcggcatccttaaagcttggcaaggcgacaatccatgcgacggatgccaaaaacaatggcataataatgccatcatcagcggcacaacaaatgaacaccgcaagcaatgccagacaatacgatgaacagcacaatcaggaacatctgagtattgatgccaagctgcaaaaacaggactcgggcctgaacttgttgccgcctgagctgcaacggaacatgaccgttatgtcggatgaggtggtggtcattataatgattaattaatttatttattgggtaattaattattaatccagggattaataattcttgaaaaagtcaaaaagattattctcaaaactaataaattgttaaataattaacccagaaacaaaaaagtaaaattttataagaaaattttaagaaagaaattttttaaaattttcaacgatttttagaaaatttaaaaaaacagtaaatcatcataagcctttggtaaagttgctaaaaaatcttaaaaaaggatacttttctagaaattttcttaagaatattttcaaaaaaaattttgaaaaatttctatttgaaaatctttttttgggggtgcaagcaatacatatgaatgaggttggggggaggtgaaacaagctgctcccgcaataaaagacaaatttatgaattttgtaagatttttttgagaaaaaattgcaattattagggaaaattacttattcagcccacaccatattagatcatcaccactaatctttgattaaatgccctaataagaagacattgtctttattaaaataatacttaattttttatacaaattattgccgatccaatagtgatttgatcatttttttggcatttttcagtccgttttcgaacgggagaagcgcatggtggtgttgctggtgaacaaccaacaggacaagccgtcccaattggctgtgattgatgtggactttcagagcccaggcttcagcagagtaaagaaaaaagataattagaaaaatgaaattaaatttatcaattaaatgaataaaaaagaattttaaaaaagtggaaaaagtggcacggaatttcatacagggaattaattaaatataatttttatgttttctttatccagggaatattaatgaaccccacaggttgggaaattcattgcaattttaaaatatttaccctaattataattaatttataattttttggctttctggngggagggaggcgcctgct

SEQ ID NO: 10691 - DNA, 2053 bp, Heterodera glycines
tgttttttcaaattaatcaaataattattcgtaaacccccaccgaaaaaattagcgtcctaaatttttttttaatattttctctacgaatcatgttctgttttaaatgttaaattagaatgaacattgacaaatgaaataaattttggaaaataaatttaatatttaaaaatttaatttcaaataaaatttaaatttaaaataaattaggctctgccaccattccaattgcgacccgatttcccaattttgggggtgccatggctgtccacatgcgacatgcgcttgcattcaccacggaatggggtgatttggacaaaattctgtgccaaacgccaaatataaaaccgccaaaaatgggtacaaaaaaattaattaattaataatttaattttaattatttgtcaggttcccaagatttgttgcaaaatgatgatttccttgaaacattcggaaacaaagtgaatgtgtgggacatgcgaaggcgaacattgtttcaaacggtaaaatatttaataattttaataaaataattatttttattgcattcagataaagcttgagcctaaagaggatgggcgctggccaatttgcattcgaatggtttttgagccaaaaaatttttaaatttaattttttgataaaagaaaaatttattttttaggtacaccaagctgaactaacacacgggtaatgtgctttaggaaaaaaattttattaaaattttttttgtaaaatatatttgtaattgtatttttcggaacccgtcagttgggccccgccatgtttgggcccccagcggttttttggctataactttttttctttgccaaccaaatccaatttttggcatcattcgaaagctgtaaatgtcctctattagcctggaaaattttgaaaaattatttaaaggttcaaaaaaaattatggccagaagaacccaaaaaaccagatttcccaacttttttggccataaatttgttcaaaattatcgaattttttttgcaaatttgcaggctaattgagcatctgaagtgctttcgaatgataaccaataattaatcattaaaattaagaatttaaaataatccaatcactgtgagcttttggaaaaaatttattccaatattttatataacatatctgtctaattgtatttttaaaagccttttaaattcatccaattttcaacaatatttaaaaaattaataattcaaaaaataagcaaatgtcagttaatataataaaaacattttaggtttatttgtacagcattgggaagctcaatgtaagggtgaaaaaatacaaaaaaaaaatttttttgtaaatttttatgcctttagatttcatttacataaatctaccgtacgtaaaagagagtattaccataatctatggaattgattatcaatttctcagaaaacgggtcttttttctgctgatcgtgttgtcaaattttcatctgtcactgttggagaatggcctggtaggtgtgcattttttttcattatgtatgtatcagggatgggcttttgcgtttcgctttcgcatttcgctttttttggcactttcgcgtttcgcattttggcgcgaaacgcgacttttacacccctaagattggattaaattccgctaaaatttttttaaattttacccataaattggctaattttcagtgaaacttgtttataaatgatcaaaatttccaattttcccccggcggcgcctatcggcaccgccacgcccccaaaactcctattttttcttagaaaaatggcccaaaatcgcaaaatttggtaattttttggtgaaaatctgttctcagcggcgcctatcggcaccgccgcgccccaaactcttatttttccttagaaaaatgatacaaaaattgcaaaatttgatcatttttagtgaaaatctgtcaacaaattattcaaattttcaaaaattttcccggcgacgcctaccggcgccgcctgccccctcttcccaaaaagttttttggaaaaagcgcgcttcaaaaaagctttttattgatttttaaaatttggaat

SEQ ID NO: 10692 - DNA, 2396 bp, Heterodera glycines
  unsure (1)..(2396): unsure at all n locations
tatgtatantttgggaaatttttgaaatttaaaaacaatcaaattctcaattctttttggcatactgaattatattttttataccaaggcgctgaacttggaaaaatcacaatccaatttaaggtgatgtgcccgatgtgccagcattcctgacagatatggtgaacagtaaaaaaaattagatgaaatataatgaatttaaggagtttttttagatatttttcgatttttagagtaaattatcaatttttttaaattttatattgcaaatattatttaaagtaaaattttaaaaaacaggtaatttcaatggatgatcagcatctgtatgtgtgtgctgctttccatggatttgtggcacagctgaacatttcggacccattccgaccgacactaacccaaaaagcaaaaaaaaaaaaaaaaattttataatttttaaatattactttttaacaggttttccttggtggaattgtgtatcgaaccatgggaatattacacggagacaaaatgccattgggcaaagacagtgccatgcgagtaattatttaaaaattaattaattttttaatttattgaaatatagaaattaaattttataacaaattattgcaattttcgaattccgtcaataaacatttcttacttttaatacatatcatatggaaatctttaatattaaaaaaatattttttaataattattagaaatattatttgatttcttttctcaatattattttatttctaaattttttttttgtaaataaattattgcaatttcaaattttctcttttaataccgtatgcctctttattattaaaaaaaacaaaattttttaattattattttttattttgttgaaaattgtttaattcattaatatttcaatgtattttattttattttggtgtatatacatataaaaattttatttaaaaaatcctaattttttttttcagagttacaacaccgagaggcgttttttcgcgggtcgacccttcgagggtggacctgcccggttgcaattgtcgttggatggtcgacgattattcgtgtccaacggttttctccgaaattgggatgaacacttctttcctcagttgatggagtaaattaaaaaaaattttaaaaaataattatttttattttcttagacgtggttcactgattgttctggtattttatgttttaatgagcagtttatttcttaattatatatttttacatacatatattttaataatatagcaagattcttgtaatttatttaaatatatatttatcataataaaaaaatatatatctttttatattagttgttttttccgaaaaaaaatttctaaaaatctttaaagcaaattttctgaataatttttaattaaataatatatttttttattgttaatagttttgttcggcaaaatactttcttaatgttaatttaattattaaaaataatatctaattaattacaaattttaaaatgaactttctaaatattatttttttaaataattaaccaatttggagtgaagttttttcaaccaaacaggttcacattgacccagtgggcacaaatccgatgaaattggacccaaacattggcatcaattttgagccggacgaacaacagcagcagcagcagcattctgtgaacgatcatcggaaacgaggaggaggaggaggagacaaaaacggaccagcaacacaaccacaacaacagcaacaacatttttatgcaagagaaatgcgctttctgaacggtgattcgacctctgatctgctctgatttgattttttcatgaaaaattgtgttaaattttttcttgttaaaagaatatatacacaaatttcttaaatatattttcggttaaagtttgaaattttgcaattttttaagacaaatgaatgtcctttttcaaggacgccaagaaagttagtgcatgcatgggctttcatgcgacagaaaatggaagttccttttaagggcaaagatttatttccaaattttatgtacaattttaaggtaggtacttgaacttgaaaatgaattctccaatcttgaaatgtacttgaattttttttttgttttatttagaatttttaataaatttctgtctctcatcaccttctgctgtgctcttttcatccatctttggagttgcagcatcaatcacaatgtccggcaatgaaatgtgccgttttccgtggacagccttttcatttttgtgatcacaagtgatcaggatgatgtcatacgccgtgtttattcttgatctcggctttgctccgtgttcgttgaaatcctataaaaatttatttaatattatagtatttgaaaagatgcctttttgtagatactgtattgattacagcactaattagccaattac

SEQ ID NO: 10693 - DNA, 1547 bp, Heterodera glycines
tcgaatgctgaaaattgaaacagaatttacctaaaaactttctaacaattctcgcgtgaaattaaattaggtaaataaaagaagaaaaaattaggcatcccttttggtattgcttaactttgtgtctctcatattttgctatttttaaagcaaaaattgtaattcggaaatttgaattttcaattagggattcgaaagctctcggttttttcttgcaattttcttaaacaaattttagaatttcctggttgaattttcggtgggtaaagatagggagggggaaacgtgctccaccaaatattgcagattattttaaaattctaatttctcaaaaatgccaatgccatcgaatcacctgaagaatggcgcaccgaacagataagcaaaggtatagaagaggatataaactgcgcacgaccttttgagatgggcgaaaagcacgcggaagggcacccggtagatgcggagtttcgtataaaatggcagctaaaaattgtagagaaaaatgaattaactgcaacagacaaatgtgatggcaaaaaaacggcatggaaatattggcatgaagcaaaataaaaagcaaaaaataatgtgaaaaatacaatataaatgtatcggcaaaaaattaaaatttgaattaaaaaggccatttgtgtgcctccaaatttgaaaagcaaaaaaaaaaagcatgggaaaatctctgtcaaatcacaatgtccaattcgggcagttcaaaaatgggctggcgatgcagcggaatcggctccgcttccttgacttgctgtatttggtggtgtttgtgctggtggtggtcaacctcctcatcgggcaccacaggttcacgctttatttcacgcaaattggcatggtgatgaacagctgaaggcacacgaaaatttcattttttaaaaattaagtggcaaaaaaacaataagaacaaattatttagggaaaacgcgtgaaaaataaatgacttttcgaattaaaaaagaattgccgtgccttgcggcattaaatttcttttcaaaaaaaccggaattttgtggcctactgtgaatacctagtcatacaaactgaaacactcacccgctgaactggacgaagtccggcgacgccgagcagttcggccggtcggttgttgttgctgctgaccttttgcggttgatgtggacgcttcggacgagcaaattggctcacactttgttgggcaaatctatgacatttaaaaaaaaattgttttttttagataaattcgattaattttgttgcaattcccatttctttcttgctgacctgtttgtcactttgccgcacaaatttgacgggtttctgattctaaaaaaaaattttttttttaatacatgcaaggtaatataaaaaaattcgttgacctgcaacagcttgaacatgccggtaccaatgcccatcggtgtgccaataatgatgcactcgctgacacccgaaattcggtcctgttggccaaagaaggcggcctcgtaactacaaaaattgtgtgggaattttgcggttgagcctcagcgcccccc

SEQ ID NO: 10694 - DNA, 2354 bp, Heterodera glycines
  unsure (1)..(2354): unsure at all n locations
atcccaaaacagctcaacaatgatcacccccccccctctcacaccttctcgattaacttcacgcacttagcccccctaattacccgtgaaaaattcgcgcactccccccccccccccttaaacaaccccctccactcaattaattatcacccctcccccgaaacctattaattaccagctgcccccccccatgattaattagggcggcaagatcaaagggaacccctcccccgaaaacccattaatcattttcacacgtgacgatgaaacctggagggtaactactaatgcaatagagccgaaacggtatgtatgtaggtgtgtgttggtgctgctcgagagtctcggttttgggccgagaaaagccaatctcacgtgttttaggctccgataaattgtaagtctcgaacagcaccaccaccagtaggtggacgcacaaatcccaacgttcacgtgccggaaatggatgaatatttttcaaatttcgaaaagaaaacagcaaaaagttcactccatgcaattcagtggaccatgccaaaaattcatattcaaaaaatgatgggtgatgaaaaaatgatcggaaaacaatgtgatatttaaatacgtgaattgtgtgtgtatgtgtgatcggacagccaaaaaaagagacatgcagacaatctcccggtaaaaaaagtgattcgcgtttggaatggcattcaaaaaatgataaattttaatttaaaatgtcaatttcaatggtggggtgggtggttacggtttttgaaatttgtttctgtctgactgtctgcatgctccccgggcatcacgggttttaaccgtctctccgcacatctctctctccctctcgccactctgctgtttgcacacaatctctctccccaaaatccatgttctttcttcgttccctttctctcgcttcctctttctctgtcgttgtcgtgtccacagtgtctgccgtccacccaatcaatgccgtgactttttgtccggtggaaaatcgccgcccatcggaggcggcggtggcggaatgcgcccgcccggcggcggcggaccgcccaaaacgccgttgggcccgccatgggacaaaaagccggcgccaaacggattcggcaaaagctgttgctgatgttgttgttgctgctgctgcagcgggacgcggtccaacagagaagccaaagcgggctaacattttttaaatttttccatttgtttcccccataattattgttttttaatttttcaaatgatggcgaatttttgaaaaagtaagggaacaaatgccttcgtaaaaaaacataccggcaacggtccccgaaattggcccatttggttgtgaggcggagcgcggaatccctgcaacagtttgcgcacatcgggcccttgaaaagaaagcaaatttacaaatttaaaatgaaacatttgccagcagtaacttgagtgattaaaaaaatttaaacttttgaaacacaaaattaaaccttaaaaaatatttgaagttttctatttttttacaattagattttttctaggaataaaaaattttttcctgaaggatttctttaaaaaaaaaaactcatttttattatcttcaagaaattttcttagaaatcaattattttacaacaaatcaggattcggatggggcactgttgttgtacagcttaacagtgaggccaaagagaacacacacaccttgcggagacggtccacgcccattttgctgcccaggaccagcattgctgcccggccgaccgccctgttgttgttgttgttcagcatcgtcaccagcaccaccaccaccaccacgatttgccaagcccatgccgctgaccaaggagggcggcggtgctggtgcaccaccaccaacacctccaccgccaagtccaaatccaagaccaagtccgggtggcaaattatgacgcgacaacggagacggcatgacactgttggcgttgctgctgctgccaccgttgttggtggtgttgttgctgctactgtccatcataatcaagggcatgccaattccaccgccaccacccccaccgccgacgccacgaggaagtgggggcaaagggccagcgccgctcccacctgttaaatttagcaaaaatttgcccgttttccttgttggtatcccccgtcatccccttcaagaaatctatcctcacgcaactcaaaaaatttagctaaattctcaaccctaaatgctatttcccaaaaaaaaagttgggaattgacgagtgtccgagaacgacaatttttgtcctagtggtttacgcacttaacacttaattaacggttgggctcgaatgctttccgtgttggttgaattttttttcanatttaattag

SEQ ID NO: 10695 - DNA, 2041 bp, Heterodera glycines
  unsure (1)..(2041): unsure at all n locations
cacagtgcgcatccctcactggtagcaccggatggttctcattttgggaaacgacccatcattgacgacgaagctgagaattgggtaagctggcagaagtttttgggaaatctccctggcctgagggctagaaacaaagacgtgtacacgcaagtaaagaagtctgattttaaaatttgtccgggctagtcgaagactaaagggacttaaacaaagagaaaaagaggtaattgaatgaatttatataattttcaacaaagtttcatttttttaaatttttccagattttattatttcacttcaataatttggtggttttttatacataaacgccctttttgatgggttttatataacaactcagcaccattcatttaataaaaaagatggatataattatttatctataataataattgctatagcgtatcaatcaacaaattataaaacatttgaattttaatttgaacacttatntgttnaagatagtnaaaagatctttcattactcacatgaattctctataaaaaattttcagcaatttcctatttattaccaaatatttatttcattttttcgtcggaggaaatccacgtcttaaaagtggcattcgctgccctttcattgcatatttaaacggagacgatttggcaccccgtattaaataataaaaattttaactaaaatttatttttatttaaaaagatccgtgctgtcctggcaaccaacatgtcgtctcgatgatgaaaaatcataccggcactttctccgcttcgatgccaaagccttcgctttggcagagtgccgaaagagtcgccgctgcagtggaaaaccaactgaaaacaatttcgtgctctggcaatggtgatcaagctgatcaacgagatcaacgcagctcaatcatcatctggtaccaatggacaattaaatccctttaaaatcatctattattttttaattgaaattcaatttctatcaatttggttcctaattagatgagtgtgctcgctctctcggcttcgtccgtgccatgttcgaaattgccgcttcccatgccggtgtcaacgccgatttggctgccgagttccgagaagaagttggcacaatagacaccaactgtgctgagcttggcattcatgttgggcaaatcagcttggacaatcccaagagtaattaaatttttattaaaatatttttattaattttaatgaattattttttcaggacagcatccgcaagtgcttgacccagagagtgtgtttagtaaccctggcatcagcggttctcacaagcgcttttaagtgaatttcgtagattcggataatgtcgtcatttgttcattgatatgctatagaaattattttattaaataaataattattcatttttttattagataaaaatgataaacacaatgttgcctgaattaattctattgaaattatcttttaacttttttaaaaaatgcttattcattactttttaaataaaacaagtaagttttttaattttaaagcgctttccagtacttagtagccataaaatcaaaaaattacattaactgagacacaaaactatgaaaaacctcaaaaactgaattttttcttaattcttcgcttttcgtttaaaaatgacaacaatttaatgaatgtttagacaaagaaacaaaaaatgttactcgggaccgggaattggccggcttttccagtctcggccggaggccaaggaaaaaaatatgcgtttttcttgtttatcccgacgaattaaatgcgaataaaaaataatcatttgcctaaatattgaaccctacctttaacaaagagttaacaaattttcttcaatttttttacagaaataagatgaaataaactaaagtaggctaacagaaaagaaaagattgtttgtcccaaaatttccaagaattgccaccaccattcagtcattcattcatcctacaggcgatccgtaagttttacgccgtcgagtcaattggatggtcccatctccngcaantcgtcgtcattccctaaacgtccctttt

SEQ ID NO: 10696 - DNA, 4054 bp, Heterodera glycines
taattaaatttttattaaaatatttttattaattttaccgcccattttttcaggacagcatccgcaagtgcttgacccagagagtgtgtttagtaaccctgtgcatcagcggttctcacaagcgcttttaagtgaatttcgtagattcggataatgtcgtcatttgttcattgatatgctatagaaattattttattaaataaataattattcatttttttattagataaaaatgataaacacaatgttggctgaattaattctattgaaattatcttttaacttttttaaaaaatgcttattcattactttttaaatagaacaagtaagttttttaattttaaagcgctttccagtacttagtagccagaaaatcaaaaaattacattaactgagacacaaaactatgaaaaacctcaaaaactgaattttttcttaattctttgcttttcgtttaaaaatgacaacaatttaatgaatgtttagacaaagaaacaaaaaatgttactcgggaccgggaattgaccggaaaatgccggcttttccagtctcggcaggaggccaaggaaaaaaatatgcgtttttcttgtttatcccgacgaattaaatgcgaataaaaaataatcatttgcctaaatattgaaccctacctttaacaaagagttaacaaattttcttcaatttttttacagaaataagatgaaataaactaaagtaggctaacagaaaagaaaagatcgtttgtcccaaaatttccaagaattgccaccaccattcagtcattcattcatcctacaggcgatccgtaagtttttacgccgtcgagtcaattggatggtcccatcctccggcaaatccgtcgtcattccctaaaacgtcccttttgccacgccctccccgttgcaactttatcaaaaatggcttcttgttcggcttctctgaaaactttcttaattaaaatgcactctaaaaaggtaattaaatgattttattttggtggataattaattataataaacacttttttgatttcccttcggcggctgtttttcctcgtcctttgcgttgtttccatttgcttccattttttggccgggaaatgaaaacttaaaattgtttaaaaatattaaaatttttaaaaattttcaccaaaagtcccaagggctccaagtttggctgagcaatggctcctttcgcattatgttcatccattttaatgccaattataagcatagccataacgaagacaaaaaggagaaaagacaaattggcgcgcatttttgcaaagttaaatatttaaatacaaatttaaatagtatttatttttaaatgtcagtttaaaatgccaatgatttttatgccgaacattggcattttataccgtttgatttcactacaaatatgcactttagtatcatcatattcatgcacttttgaaggttttgtttggacagcttatgcgtaggcaaagtcaaagaaatccttatttttaaatttttgtctctgttttttaaattttaactatttaaagataatttatgaatttaggcaaagctattccaaatttgacctgaagcttttcattatacccagtgtcatggacgtttcaaatcattatgcgcaataaatgtctcaagttgagcagtgcaatttttttgtccaaggcttctatgtcaaaacacaaaagccggacaaaattcttttaaaaaccggcatttttagccggtttcgcaatgccaaaaaccatagaaaacattcaacaaaacatttatctccctttttaccggtttgtttggtaaagaaagaagcaattcataaaaaaaatctttttccatcaggttgcctgttcttagaaattgaactcggtcacaattctgtcattcataatacatttttgtattttttttcagataacatttaacatgagaggtatactcgcccaattatcgaagtagagtaacttttttattgcaattaggagttcgaaatttgtcagaaaataaatatatttttttataaataaagaaaaaattaaaaaattccttttttgtgtgtttataaacagaagaataatttgaagctaaattaaaacattttggagaaaaattctcaattttacacaaatttttttggtgtgaaatacctaaaaaagataaaaaacaaacattgatgagccgaaactttatgcgaaaatgcattctcctcccgagactttcagcagaatcatgacattccgttataggtacagtcatggtcataagtgttgtcccatcatgctttgaaaaaaataattgcgtataaaattgtcattttccaatttcaacagataagtagcataccattggatagcattttttatgggctttccaatgataccatatttgcatttgtgacataaacatttatttgatttattttaccatattcacaatttgatcaaaatataggtggtcaaaagtgttgtcccatttcatttttaaaatattgcttctctggatcagcattaaaaaaatctaaaaaaattcaggtaagcataattttggatgctgatcaaaaaaggtagcaacaccaagttgatcagatcactccttcatggtgatctgatcagcccattttggctgggaacgagaggtaaatttcaaaaaaaatttctagggggttgagaaaatttttctggaaattttgagtaggcccattttatagagcacaaaatttgctaccgaattgcttttggaatagtgggtctacgatttaggcccgctgagatacgtcgacttatatttcggtgcctataaaaagtactgtatttcttaagaaaatagtgcattttacactacgtcaaaattgaggcagaaagactaaatcgttcgataattgaaatgttacggaaaacgatcaccagtccttgggaatgggacaaacgaattccttatgttgtattttcatataatgcaaccccaaatgagtcaacgggacattccccttttactatttttttcggacgtactattcagtttccaaccacgttaacagcaccaaaaagagttaatcctgcaaatcatttggatgatgtgcctattaaagtgccaattgaacatttggtttcggcaccaattgaaatttccgatgaagttttcctaccaaaccaaaaaaggaaaaaatttctaaacaaaatgccatttttgccggaaaacaaattagaacacagaaaaatccaaatcaatttatttacaaagaaaccatcaattttagacccggaggagacctgtggaatgtgccacaattcgttgtgcagtggaatcgaggagcacagcaattgtgcggcaatcactttggcggatcttcaccctgcttttgccgtgatggacaaacttcgaaatgtcaaaattgagacgctcggggagctgatctcacttatgatcgcaaaggatgtcccaattgcgcaaattcgaaattgggcaacaaacagaaacacacatggacctgattttcttttaaaattcagttcaaatctgtccccatcttcccaggaatttatctcaatcatttctctttggattgaccggtgcgactttgcttttcacaacctccaggcttcagggtgcaaaaaaataaaatttttaatccccaaagaaaataagggctatccattccaaaaagcgattgaaaatgctattgaggatgtgaaagctcgatctgtgttgggtctgtcgaaagtaattcgaagtcctttcattgtgttcagtgattcggttggagaagtaatgaaaaataagttggaggcggaaatatttttggagaggagctacacggcactctcaaacgaaattgtcaccacctattttggtgaagaagttaaagaaattttgattatggccggcaccgatgacattattggaaatgtgccaattgaagaaacgaaaaaggccattaaaaaaatttcatttcatttatccaagttttccatcaaaacttttattattccccacgcctattcatttcaaaaaaatcaagggcacatgaaaaatttcttgatttgttggatgaaattgtg

SEQ ID NO: 10697 - DNA, 2198 bp, Heterodera glycines
tccgcaagtaccgccgaaatcggataaagcccacccgaatgggccttgcccaatgtgacaatgtccggccgaacgccgtcatgttcacagcacaacattctgaagaaggacggcgatgatgggagaggaatttttgatcgaaggactgactgattaagcccgtgatggtaaattgtcagtataaaaatgcgtcagtgtttttgaaaactgagacacgtacggtagcatgacgaattgaagtggttactgtgaattgacaggaataaatttacagtaacccgttttacagtatgttttatcaaggtttgttgaatgtttctaagaacttaattgttgtttccaggattaaattcccatatgatttgaaggttactgtgaattcattttggtgctagtttagcatcatagtacagtatattatttgaaaaaacacagtatcaccgacgcattttgccactaacagggagccattaagccaagaggaaggcattttcactccgtttttcggttttcccgccattattagccaacactcactttcccgttcgaccaagcccggtctgcacttcgtcggcaatgaacaaaacgttgtatttggtgcacagttgccgcacacattgaaggtatccaggagatggcacaattacgcccgcttcgccctgaattggctccaccataaaggcggcacaattggggtcggaaatcgccgcctgttagtggtgaaaaatgagcaaccgcttcagcaaaaaaaaaaaattccggatttcgaaagccgggtttggaacaatcaaccgtccgtcctctatcactaaataaatgtaaggggtcacttaatttccccctccccgcatcgtttcattctgagagaaaatttttcaaaaatttaaccaaaacttcagaatttttcaaaaaaaaaaagaagtatttcaactctaacaaagggaggtggccaagtgtccgtgggatttcaaaatgaaacttggttaggtggatagagcaccaatgggttcttaagaaaaatggttttattttctgccaaatgagcacgagtgccgagttatgacgtgccaaagtttttagttttttataattaaagaaaaggaacaactatttcctttcttcaaagaaattgttagtgtagaggtaattcgttagtcaaaattttttttgggtcaaaagttcgaatcccctatgtgtaaattcattttgtaatttttatttttgctttttgtgagcaattcaattatcaaattttatttctttatcaaaatatttattttaattttattccattaaaaatcaaaaattgcattaaacataaatgtaatacatattctgtcaaattaaaaaatatttttttggcgaatatttttattgaatattttgcgcattaaaaaatttaaaaaaaattaaaaataaaaattttttcataaaataaatttttataattgacttggcgtaaaagacaaaaataaaaaaactaatttatacgtaggggatccgaaccctgggctaaaagatgctgactagcgcactaccgctacaccactggacaccgtgctcttgtgcaaataggtatttcttttatttaatcattaaaaatttggcacgtcttaactcggcactcgtgctcatttggcagaaaataaaaccatttttcttaagaacccattggtgctctatccacctaaccaagtttcattccgaaatcccacggacacttggccacctccctttgtcagcacagtaaaatagccctaaaaaatttttccatgatttttaaagaaaaaaaaaacgggacaagtaaactccatgattgccaaaacaaaaatcacaaaaatgttgggccacacctccttgaaattgttgacccaatcgaagttcgtttgttcgtagtaattatcgcaacgcaatcgcttgggttggccatcttttctcggagagtgcaaccatttggacaatgcttgaccagtagaaattgttgcatttggcacatcaaaatcatcaccaatcgcctcgggcaacaaatcaaatgaatggattgaaaccaattggttgagatcgatgagaattgtcggcgaaatttgacgaagcaaatggtccaaatgatcaccattgtaaaagcccaagtggcgaatgtttgtcgaaaaaaagtgccaaatttcacggggtaaaaatgtcccaaatccgctggccat

SEQ ID NO: 10698 - DNA, 1230 bp, Heterodera glycines
gctttttttgttgttaacctaatccagcagtcttggtatcaatcgaaagcttaacatgtttagaagatatttctaagctattgcttcgcgattagacaattaccaaaaaagttataacatgaaattccaaaaaagtcgaaatttttgagtttttttcttaataacttttttagaagctaaaatttttgtttgttttttgtaaggctaatagagcttctgaagggctttcgaatgataccaagattgttagatttggtcaacaagaaaaaaagttataataaaaaaactgaggctggcgccaaaacgtcggcgccaaaacgacccagtccctgaggaaatatctaacaattactaattaaattaataatgccatgattatttgaaaggaagcttcaaagtgtaagaaaattttaaaaaataccaataagaagtaaaaaattttcaatggaaaatgaactgtaaaatttcaaaaaaatttaaattcattaaatgaaatttactacaaatgggttactgtaagtttgttccattcaattcatgcataaaattaaatcaccatactaccgtacctcattttcaagaaattctaatgaactcgctcatttttcactgtcgctttttcagttttttcgttatctcgcaaagtaccgtaggaatttttaccgtaggaattcatgcaaaaatgtacaatttggcgatttaaaaatacacaatttggcgatttaaaaatacacaatttggcgatttgtttgtcccaccggtgttcatcggcaacacccgttggtagccgaacagcttggtgacatactcctcgtaatggcccagcgcgtctgtgaagaaggcgcgtgaagtgagcgtgagctgttggcactggcgctgcatcgtctcaacgagtcgcggatgacaatggccttggttgagcgcagaataaccgctcaaacagtcgaagtactccttgccgttcacgtcccacacacggcacccttttcaattaagggcattttgttaaatgacgtcagatttcgtgatctcaaatggtgctaggccaacgaatgaatttgaatcagattattaaagtgaaaaaaggaagatttcgagcatttaaagagaaaatttggtctttttttgttaaaaaagtttgttgatcactactcaatcggggtccccggccctcgacattttgccccccccccccaggggtcggggagcaaccctagttttaagaagaat

SEQ ID NO: 10699 - DNA, 1045 bp, Heterodera glycines
atttcaccgcccattaaaaatagacatttgcgcaacctctgaaaatccatttgcaccgttctttccaagatcagaaaattgcaaaataatccaacaatttttttaaataaaatctacaacatatatttattttaatattgactaaatttgcctttgcttctgatgtacgcattgacaaaaaacaaaaattttgatgtctaactttgtgattagttttttttgcatttattttaattaaccttttttgttgttgttgcactgtaatttgagtaaaattcgttgaaaattggtaaaacaaaaatccattaaatattaattattgtaaaaccctgccgatttgtatggagttccttttttatttttattttttgcacatttgtttgggcctaacattacaggcaattacaatagtatttgatcttctgtttgaagcttcgtggatgcgatgcgttttatttgctatttccatatttttccaaatccctgttttatttatatttcggcatttcgataattgtcaaaactttttctcatatttaaatgtcctcgtaaataaattttatttgaaaattattttttctcaatgtggaaaaagttattttctcaattaaaaacatcaaatattgaatttatttatatgtttttcctgaatgaaattgttttttcgctttaataatggttaaattttcccgaaaatgtgaactcagttttttcgaactttgttagtataaattttattagttctctctctattcgctttcaaaatttcaataatttttttatgtttcgaaaaattatttgatatttcgattttttggtcataatttttacaataaaattaaaaattttgcacgctaatagagaaaagcgaattatttacaatatgtacaatataattatattttcatttttttatgctattttcactttttgtgcgcatttttattcggcaattttcattaatttccgtcttccccagcaatttttccatctccaaattttgagaagcagcagcacccacaaatgattgaccatcatgagtttg

SEQ ID NO: 10700 - DNA, 3908 bp, Heterodera glycines
tgaaaggaaggaaggggacaacaattagctgctactgctgctgctaatgatgcggaacaattaataataattaaataaacaaataaaaatgcgcgaataaataccgcaaaatgtttttggagtggaacccccggggaaaagcgtcgttggtcgtcactttcgctttaataaaatatgtgaactatttgcttctgctcattaatttgtgcttctcttctcctccttcggtttggttccgccaacacttccctttgaccgcccattaattaattagttaattaataatttttgggtaataatttaattctgatcatttaggtatttatttttcctcattttgttttttgacattttaatttattccgtaagcattttttggtcgttcgcctcgtggtaaatgtcagtcaattgcttttctgtacattctttcttctccaatgttcttatttatgtacacaacaatctctttttgtaaacattttgcattatttcagtaattttttaattaaaaaatttattcgattttatttattttaaataaaaaatttcacttttgaagaaacaaatattttaaatataaaacaatggagtagcaaaaaccacaatgttttttttagattttcagtttgatgaacttattaatacataaaaaactttaaaatatatttaaatttaattttttttttgtttttgtcaattattcaataaaataaattttgaaaaatttgccaaacaaaattcataaattttattcaaataaattcataaattttattcattttatacgttcgttgttctgatcacgctgcctttcaaacaataagtacgcattttttgtgatcatttgttcggcgtgtcatatgtttgcacaatcagtgccttacatttgatgtgatgaataataataattaacccatccgactcaactaattacccaattaactttttcattttaaagcacccactaatgacgcgcactgcgcgacaaagggaggggggagggagacatgtgagtgtggaaggggtgcatcatcgagtttgtggttggacatgaagagaatgggttcggggatgaccgaccatttccaaactaattggatatttagtgataatcactcggttcattaggaaaatgaataattctataaagaaaatatacacgttgttctggttgttcacagtggcagtttttaataaggaattacgggatcagatattaattctcgagacttgagagaatggcaccgaaaacatcccgacacttgacaccttgaaacgtgccaacgggtttgtggcacaagtctcgggaccagggctgggcgaaacttcggcttcggcttcgaaaacttcgggttttttgagcttcgaacttcgtgcttcggcttcggctattttacccgaagtttcgggaaaaatacacccctaaagattgagttttcaatgtgaaaatgcaccactagtgattgacttgcttttcttctaatttttcaaaaatattcattttttcgacagaaatttaataaaatttaacaattaaaatcgcaaaattttttcatttttggactaaatctgttaacaatgcactaaaaatttcaaaattttcaccggcggcgcctatcggcaccgccggagctccaaaatttcctttatttttgaaatcgactcaaaaaccgtgaatattctaagaagtataaaaatttagaaaatatattgctcaaaaagttaattatatttatttatcgaaaagggttggttggtctctagaagtagttagtccaccagatttccgttgttaagttcaaaccctcttggctgcaaatgatttattggtaattaatttcgtggggggagttttaataaatcctttgttttttagtatttcctaaggatgttggaatagtttccatttaaaataaggtgtaaaaacaatttttaaaatacgtttgaaaatctgggaaaagttttttgagggtgtgagtcaatttttcaaggattgtgtattttttcatatttctaaaaaagaatcaaatagtttgaccctcctaaaatgtaatatcatttttatttttctgtttgaaatcttcaaaatttaaggtccccctcaaatgtcaggtaccaagtatcggttacataaatgttaagtcctcaaatgtctggtccccaaatgtaataaggtcataaactgtgggtattcaaatgttgtatgtcgagggtccgtaaatgtagggtcctcaaatgtctggtccctaaaaaaatgtagggtcccaaagtgtcaagtcttcaaatgtcagatccccaactgtagggttccccaactgttgtcccactgtagggtcgtaaaatgtagagtcctcgtcaactctgcaaatgtaggatccccaaatgctcacaagtgtagggtccccaaatgtcagatccctaatgtcaagtcccaaaaaaagtagggtcccaaaatgtatggtcctcaattgtaggggttacaaatatcaagttttgggtttctaagaacgtgaagctgtttttttgaaatcttacatatttttcatttaccaaattgggagtaaattttcaatttaccttggaaatctgggacagttttcaagggtgtgacatatttttaaccattaaaatttttaatattttattcacattttttataaaattttacaaaaaaaaaaaataataataataatttattctttatttttttcttaatccattaatgttaagaactgttacagtaatgacaaaaggtgttccataaatgttaagactttttcttgctacactttgttctactttgataaattggttgaagactgcgtctgccacatttgagctaataggtgttatcggcacaattatgtctccttgatctaacatttctgaagaaataactactccggctttatccgcgccacccaaagttctcttagcatcttcgatagcttcattaattgacgattttatacattcttctaactccttagtgggattatcacattggtctatattttgaacgacaaattttgattttgaccttaatagttgaaactttttactactagttgtatattcatctatttttttgatacaattttgacttttttcttgttgtttttcttgtcttagcgaatccgaacttcgggattttttattttctctttttgacgcatttctcgtagaccgtttcattttttgttatatatcttcctaagtttttttccttttcaatttctttaaaatactttgctacacccaagtctaagtttcatatctctgagcaaacatatttatattttttcctatatcccgtcctggacaatttttttttttggtcaaaattgtgataaagacaaaatttctaaaaaattttccaaggtggtgcctataggcaacgccggtgctaaaaaaatatggaagaaaattcattttggagaaaaacaactgaattgaataaaaatgttaccctttttattcttttgataactcagtagatacaatcctggttttactttaaaatagaaaaaaaagcttttttgagtgaataagtgcataaatttgtttaataattattttgtacctatttagccctattattataataagtttccaataaatttaatataatttttcctatagaaaccaaaaaaaaatgtcagacaatgtattcgccttgttggatgatttcgacatcgaaaacagtaattaaaaaatcattacatatatatacatttattatatatattatattatttttagtcgacccgagcctaaattttgcaaatgatgactggatggaggaaatcggtgaatccgttacggtaaataattatttaaaatgttttaaataaattaaatataaaaaaaatgttttttggtctaaattttttcagaaggtatttttt

SEQ ID NO: 10701 - DNA, 4389 bp, Heterodera glycines
tcagagtcctagtttttaaaccgagtccaagtcatgaaatcttcaaacaaaaatctttaaaattttttcatgaaaattaaaaaatattttcatgaaatatatttattttagaaacaaactttattatttgtccattttttccacctttttttgcggtgcgttttttaaaacttcggggacagttggggtcgggcggtgccggtaggcgccgccgaaaaaattttgaaaattgtcttcggatttgttaacagattttattcaaaaaatgaccaaaacttgttttttttattttttgtttttaagtcgctttttttgtggcgctgttttttcaaaaaaacttttttggaacattgggtgcggggtccggcggtgccgataggcgccgccggaaaaattctaaaattttgagtgtaatatattaacagaacttgtcaaaaaatgatcaaagttttggttaaatttgcagttttaggctgtttaaaaaaagaaaaaataataatttttaaattgaaaatttcaattgaaaaataatttaaagaaattattaaaaaaaattctgtgccgttggggaattgaacccaagataaaaataatgaaaggcagaaggtttagccagcaggccatttttaattggagctatccaaaaatagagaaaacattaaggaaggaaagaaagagatttaagatttttttttcgcgtaaatttgaaaatttttctggctgctcaaaagttcaatctttaggggtgtattttcaactctcgcctctcgtcccaaaaaacgagaggcgagagtaccaaaaatggcgagagttggcgagagacgagagttgtcccacccctgctgtgcaaccattttgacaacatttggccagcagaaattgtggcatttggcccatcaaaatcatcaacagtcgcatcgggcaacaaatcaccggaatagattgaattcaattggtcgagatcggtgagaattgaaggcgaagtgagacgacgcaatttgtcaaaaaggatgccattgcaaacgcccaagtggcgaatgtttgccgaaaaaattggccaaatttcacgcataataacaccccaaactggctgctcatctgctttgcaaacgcagtcaagcgcaaattggtgactttgttccaaatttgctgattggcgcggagaaatgcaatgacggaatggtcgatgtaactgcaaatggaatgaatgcttttattgccacataatgaatgcttttgaattaccaaatccaaacggatttaaagcaaattttgttgggcagcggacggttgggcaacggaaatggcacagtttttccaggaaggatgcgcacagctaattctggcaccgctgtggcactgtgcttgcgaatgatgatcgttctccaaattgtcaattcccttttgccatcaaaatgcgtgtccaccagcaaattgaaacggggcgaaagaagtgccaatttgaagccgagttgagcatggtcaaaaaacggaaaagtgtccaaccaaacatcgctgcaaacccaactgaattgtggaaacagtttagttgaataaatgaaatcaattttgtaacttaattaaaattccttaccgccggttcatttttgtggcaattagcacaatttgtcgtatttcaaatgatgccacacaaagggcagaattagtgcgttggaaatgtttttttttgtaatgagaggaaaatcgaaaaaacaaacatttttatagtcacaaaaaaagctggaaggactaaaaagcacgaaacatggactaaatagctcaaaaatggccaaatatggaccaaaatgtggattaaaaattgctcaaggttgcagaaaatggcctggatttggatttaggaaaaagccaagctcggaccgaggtccaggtcaatctttaactgatatgtggaaaaaataatcctcttaacaacctaatgtaagtaacaccaacacttaattaaaccattttgacaacatttggccagcagaaattgttgcatttggcccatcaaaatcatcaccaatcgcctcgggcaacaaatcaccggaatggattgaattgagaattgtcggcgaaattagacgacgcaaattgtccaaatcatcaccattatgctttcaattcgtatccaaaaataatgtacggttttgttttgaaatggacagaattatggtacagtaaatcaagaatagttagaattgattggactcataaactctcataaaatgccaatgatgagttataattgcaattgaatcatcgtttttttcagtcttctcgacgccgcttctcccgggccgagtgatcagcagaagaaagatgcatgaattaattaatcaattaattaatcgattattgattgattgatgcgattatgtgaccgaaaatgatgtgattagagctcggcctggacctggatccaggcctggatttttcctggatccaggtccaggtccaggccatttttcggcaacctggatttttcctggacctggattttcctggatttttgtccaggaaatcaaggtccaggtcaaatgtgaaaaaaaatccaggtccaggcaaaacaggaaaaaacctggattttcctggacaaaattttagaatttattatttcaagtgaccgatattttttcaagttttcaaaaaatgattaaatatatttaaaaacaaattattattgtaaattagatatttttagatgttcccaagcaattaattgaatttttcaaatatttttttttcactgattgcagttgcaaatgagggtacatttcttttccaatattttcttagcaaatattgacaatttttaaattaaaaattttgtcaagaaaacaaaatttgggggagaatttttgaaaaaattttccaattcttagtggtgtatttaaaaaaaaaaaaaaaattatttttggtcgattctaggggtgtatagggaaaaattttaatgctgaaatgcgttttttgagctcctttcttcaaatcaatcgagcaaaaaaaaaaagttttttcactagaaatcgcggccctatttatgtttatgttgtaattaattcattaattgtgagtaatcgttgataaaattgctgatgataaaatggagttgatttaactgtgccaacacaataaatgccatggcacaacaattttagccaaaattttgaaaaaatcaagtacttgacgaaaaaacatagacaaatgcaatgattttcaaaattcgagctcgtattctttatcagtgcattttttactagagtgccacgggaccgtgaattttgggcaaacccgggaccgggaccttttcgggttgaaaacccgggaccgggaccttttcgggttgaaaacccgggaccgggaccttttcgggttgaaaacccgggaccgggaccttttcgggttgaaaacccgggaccgggaccttttcgggttgaaaacccgggaaaaaaccaggactagtcccggtcaaaaccgggaccttggtactcagttgtactcagttgtgcgctaccaggtcccggtcccgtggcactctatttttgaccatagaaaaagtgattttgtaagaaattttttttaatttattttttcgggcggaacacccaattccgaaagattaccaacaaaaagatacaaaaacttcatcaattccttttaatgactataaaaatgtttgttttttcgcttttcctcgcatttgaaaaaaaataaattttctaacgcaataattctgcaattattcttccctctgtgacgacgacatcattcggactcggccaaaattgtgttaattgccaaaaaatgaaccgacggtaaaagaattttaacagtcacacaaattcatcatttatttaactaaactgttttccataatttcagttggatttgcaacgacgtttggatggacattttcccatcctttgaccgtccccaactcggcctcaaattggcacttctttcgccacgtttcaatgcgttggtggacaaacatttcaatggcaaaagcgaattgacaatttggagaactatcgaaattcgtcgcaaggacaaaggaccagaaccgaaatgaaatttggccaattttttcgacaaacattcgctgtttgggctttaccggtcgtgatcatttggacaatttgcgtcgtcgcacttcgccgacaattctcactgatctcaaccaattggtttcaatcgattcatttggtctgttgcccgctgcgtttggtgatggttttgatgtgccaaatgcaacggctggccaagttctgtccaaatggttgcactctccgcgaaaagatggccaacccaagcgattgcgttgcgaagattacaacgcacaagggaacaccaattgggtcaacaaattcaagaaggtgtggccccacc

SEQ ID NO: 10702 - DNA, 1393 bp, Heterodera glycines
  unsure (1)..(1393): unsure at all n locations
ctttgtacaaatctctccaattcacaaaatttctccagtttttcgcttgaatcacctcctcttttcattcccattcaatttttgcgcgacctccgccaatccgtccatcaacccaaatccgcaaattcacagctcaccaaacgcacacaaataaatgcgcacacacacaacacagcactaactgacatcaatcaaatgattccgcaaatagagatttatttccattttaagtttatgaataaaattcacttttatgcgagtaaaatgtaaaactggcacatttagccatttttgagattttaaattaaataaaaaagcgactgatgaaatttttgaggagttactctttttggaattacttttaagattattaaaaattctttattttatatttaaacagtatttacatattttataaatctcaattcacattcgttcataagccttgaaaatctcatacatttccaatttctgtgtaatgaatgcccaatcattgatcacaacatttaattacgcttttttgttggttgatggcttattgtatttgcgcactattcaataaaaaatgaacaacccaacaaaaaacaaattgtatgaatgaattcatacaaaaattaccggaattttcttcctttttccccaaactcaccggcccctcttgagcacataccacggacgattgacgacgaaatgatttttgggtggagagttttgtttacccctcccggaaaatgcacaaaaaaaagacgggggaatagtggcggaccaacccaaaaacattttcattatgtgtgcactttttgtgcgcgttctcgagatgatcgcatccatcatcttctgcagcagcggggaacgggaaagtcgtcgagggttgggctgatcagcgttttcccgggcaatccgattgatctgtcgtctgatttgggtttgaagacagagtgttgttgtgatcagtcgctccaattatatgagtgaacgatggatgctatgactttatccaaaaaaccatcataataattttttcttatgactttgacccagaagcaacttaataatttaacattcttgagatcgttcgatagaccttaaattctttattaatcataaaaattacagtttttgttttaaaaaattattgagaaaagtgttcaaaaacccagattttttgacttcttctggccaccgactgaatgatgttctgataagtaatctaanatattacatttaaactcgtaggattatcaaactgatatattgaaaaaatcattttttactggggaaatcttgaaaattttaataaattttacatncaaaatggcatttttttattgatttttatcgaaaagaaaaattattatttaatttatgatcaatcaaatcatccttaagctgc

SEQ ID NO: 10703 - DNA, 1994 bp, Heterodera glycines
  unsure (1)..(1994): unsure at all n locations
aagccttgaaaatctcatacatttccaatttctgtgtaatgaatgcccaatcattgatcacaacatttaattacgcttttttgttggttgatggcttattgtatttgcgcactcattcactaaaaaatgaacaacccaacaaaaaacaaatttgtatgaatgaattcatacaaaaattaccggaattttcttcctttttccccaaactcaccggcccctccacataccacggacgattgacgacgaaatgatttttgggtggagagttttgtttacccctcccggaaaatgcacaaaaaaaagacgggggaatagtggcggaccaaccaaaaaacattttcattatgtgtgcactttttgtgcgcgttctcgagatgatcgcatccatcatcttctgcagcagcggggaacgggaaagtcgtcgagggttgggctgatcagcgttttcccgggcaatccgattgatctgtcgtctgatttgggtttgaagacagagtgttgttgtgatcagtcgctccaattatatgagtgaacgatggatgctatgactttatccaaaaaaccatcataataattttttcttatgactttgacccagaagcaacttaataatttaacattcttgagatcgttcgatagaccttaaattctttattaatcataaaaattacagtttttgttttaaaaaattattgagaaaagtgttcaaaaacccagattttttgacttcttctggccaccgactgaatgatgttctgataagtaatctaaaatattacatttaaactcgtaggattatcaactgattatattgaaaaattcattttttactggaaaatcttgaaaattttaataaattttacatcaaaaatggcaatttttattgatttttaatcgaaagaaaaaattattatttaattttatgatcaatcaaatcattcttaagctgcagattagatatactaatcattgatctgatgttttacagaatcagatcagcatacttttcactctttcagggcagatgatcacactttctgatcaaaccaaatatgattttataaacgggcaaataattcagcaagattaagattcaataagtattgaatattttttttctccgattaaaaaataaaattttatgaaactgaaaaggcaaacacagagcgcatcgtatcgcaacttttttttctttttttttaatatttattttctaacccataattacgcattgttctcataaatatttcaatttcacagatcataattaaaaattctttttaatatcaaaataattactcgcgcatatgtttgtcatatgatcattatggtattcattaacgaaacgaaataaaaatctttttgaattttaaccgatcacaaacaatcacaatctcagagcacaatttcgggcatttcgctcactctaaccctaattggtcccattagttcctatcccctaattttttggtccccttcccccaagcacatattcgtcgaattctcgagaaggagaaattctcgagattaaccccactctttccacctgttaacggttcctcccccctcttgaaatttcgccgctcgacgaggccgtccaattaattaaattattttcgttgctcggccgttgatcgatcacctgttgcgctgctggtcggcgccacttttgatcaaatcattcccatgtttttgctgtttgtccttcgccttcccgcgcttcatttttcgaaatggaccactttttctgatcacatactgcaacttttttatcaacagatcaaagtccatatcgtcattttgtttaatgtcatccaactgtaatttcccgttatttctcttttttttgttgtattttttcctttcaattttttgtcctaaaaacaccaaccaatcggacgactgaattttattaatcaaaaatccattaggagcaaaattttctatcgtttaaagatggggccattggacacactgntattgcatgacatttt

SEQ ID NO: 10704 - DNA, 1015 bp, Heterodera glycines
ggggcttttagcaggaacttttagtgagtgagtgctatgtgacaattctccccccgccgggctcttcaaccattccccccccccccactaatggcttcgtcagcctcacagctttctgttcaacaaatgggacaaaggaagtgcaaatgctgcaaaaagctacttatgcaatttgtatgtacttataaactatttataatattcacattgcattacattataatgtgttgcaaaaatattttagaaaaaatttttagcggctttttatcgtaaaattcactgacaataatttttattttgaaccaattccaacaaatgaaaaactttaaaaacttttaaatgcacaaattgaaattgaaaaaaaaactattgagctttctgcattaattaaattcaaaacttcaaaatccaaaaaaatttcattattccatggtttcttttttaacacatttcttttttaatttctcttatgtcccaacaaattggcctttagaaataaacctttttcagaagtatgtttttgaaaaattttaccataaatcatgccattgtaaagtaaatttaacttaaaatgatttcagtaaaagttttatttaaatttatttctcaatccctcttttttaattgctttattttaagtttttcttttttgttttcaatttatttaacgttctccctttgtaaaggcgaattttaaatcttcaaacaaaattgaaatttgcaaaaaataatgttgttgacaaattgtctccaattatttgagcgtcttttcaaccggaaaaacgaaaattttctcccctaataaaccacatgacaattgtcggtgacttttctccaccaaaaagtgctcctccgccccctccccccgaaaatttctgtttgaatttgacccccgaggagaattgctggggggcacttgtgttcatttttaagtatttttcaaggagcgcgaaaacgggggcaacttctgctggggaaagcatttgggcgagaagaggggggggggggggggggg

SEQ ID NO: 10705 - DNA, 1248 bp, Heterodera glycines
  unsure (1)..(1248): unsure at all n locations
actagaattgagcgggaccgggaattttgggcatacccgggaccgggaccttttcgggttgaaaaaccaggaatttttggctgggaaaaccggaaaaacttggaccagtcccggtcccggccaaaaccgggacttcggtactcagttgtactcagttatccgtgtttaggtcccggtcccgctcaactctaatttaatcattcagtttttagtttttgaaaagatgcttgaatttcaagtggattgcttctaaccgagacttgagattttttgaggtaggcttatatatatagagaagaatttttaatcattttttcattttctatcagtgagttcagttcatttctcaggaccttctttcatatagaattcagatccaagcatatgccgtgcttaaaacccctttattttttgtacctgttccccaaacatggctcgcgaccctttacattactgacagacgattcccgaatcatcaattcttgctgatcaaagcagagttgggcaaatgcgatttttctgtaactgtatccatttgctaaaaacccatttaaaagtaattgaaagtttttgcaacaataaattttacggtgccgaactcttcttgcggttagtctctaatccgagtcggtgaaatgtgttcgatttgacctttttcgaacctttgcatccatccctgaccatggatattatttatatttcgtgcccagtctccgccgatatttcttccccaaaaattggtgatcatcagtatttatttattttacagctctttataaaacttctcaggtcctttatgtttcccttacagattagggaattaatataaatcattcaattcgtttttgtctaaacttatcaatcacccattttatctgtcctttcgaactcgaaattgtaactggctgatcaattcgattttttgtcttttaatgacactttttacgtccgcccattccgcttctcctccttctctttgtatccgtctcattttattcacatttattgctttctgcgcaactgagcagagcggagatcaaagggtgactgatgggggggggggggggcttttaggatttggagcggatcggctggcgctggactaagcagcctcagcagagcagagacttgagncggggtcgttttgtcgctgtcgtcgtcgcccggaagcagttcagccaggattagaagagtggctggttcccggggggaggaaattggtggggggggggtgggggaggagaagca

SEQ ID NO: 10706 - DNA, 3885 bp, Heterodera glycines
  unsure (1)..(3885): unsure at all n locations
aaaaatgtctggagtaattaggagtaaaatccccctcctaaacagagttataaaaaaggaaatagagtcggccaaaaccaaattggaggagggcaaattcgaatatgatcagaataacacagacgagtgcctacgggtgttcaataaaacaaaagaaattatacaaaaaattgagccaaactttgaaaaattaaaaactttgcataaaaaatggcaaaatttgatgagaaaaatggacaaagaacagtggaacaccgaatggaaaatccagaaaatttttcgcgaaaaacatgattatttaaagacaattaaggaaacagacgaaatcctcgacactctgaaagacataaaattggaggtaaaaagaagacttaaagtaatcaaagcaaaaccctcttcagacactgaccaagaggatgaatcaaatgatgatgaagaagaaaacgaagacgaagaaattgaagaagaagatgaagaagaaaaagaatacgacagtgaccaggaagacgattcaccggaattgacctcaaatgatcaaacaaaccgtaaacaaacaccttttgtcaattatcgatcgagaataaaacttccaccccaaactctgacacacttctccggaaaattctcccaatggcccagcttttgggacgatttcaaatcctcagtccacaatgacccaaacttagagaacatacaaaaactgaaatacttgcgaggacttttacatgacgaaccataccgaattgtgtccccttaccccctcacaaacaaaaattatcccataatcgtcaaattactcaaatcccgatacggtaatccacaattgatcagagaaaatctgcacagcgaattaagaaatttaagaaaaccaaatgaatccacaagcgaactgagacgatttatcctattcattgaccgaattatcctacaattacaatcccaaggcgaagaaataaaccatccccaaatcaagcaatccattgagactaaactccccttcaatatccgactaaaactgagagaaaaattcaaactttactcgacaaaagaattaatgaattttctcaattcacacactcaagctcgtgaagacatagaacgaatggaagattcaaacagacaaataagaaatttcccccctcaccggccacctcaaaacagaccacaaaggcaatcatatccaaactattcccaaccccagctaaaagcaaaccaccgaaaccatcaaaatctgcctctctcgccctatcccatcacttctgcattaacaaccaaatcaaaacctgtccgtttggcagaatttaaaccaaaaccatcgcaacccaaaccacaaacaaaaataaaattttgtcgattctgtgaaagagacaatcacttgagcaaagaatgcaaaatttattcaaccacggaaaaaagaagtaatcgagcgcgcgaattaaaactttgtctaaactgtctgaaaaaaggacatcatttgagagaatgtaaatcatcattttcatgtttcaattgcaaaagcaaacacaataccctcctatgcacccgaaagcaaaaccaatataatcaaagagaaaaatttacaaaagtaaacgtcacgcaaaaccccgaggaattcgaagaaacccaaacatttatgtcaatggattccgatcaaaatcagaaaattatacaaaatgatgaagaagaattgcttatgaccacggaagcaccagtcttaaaccccgaccaaaacaaaacacaaaacgaagtaattttcttcgataatgggtcgcaaaaaagctatataacagacgaatgtgctgattctcttcaattacccacaatcgaagaaaaattattggccatatccacctttaaccaaaataaacccaaaatcatttcatcaagactagtcaaaattggcatcaaaacactaaacggtgaaatcgaatacgtaacactacagactgtggaaaaaattactgaaaaaatggtcaatagagagactgttgatatattcaaaaataaaataccgataaaccatgcctatccacaaattctaattggtatagaccattcttggcactttatgctgccgaactcacaaattcaaatactcccctccggattttactcaatcgatacaaaattaggaaaaatattatccggaaaaggtacgattgaagacacaaatgtcaatcttgtgaaagaaaaacgaaaaaaggatgagacaaacgaaatccttcaaaaattttgggaattagaaaatatcggaattaccgactctccgcatttgacggacgaagacgcagctctcatacactttgacaaaaatgtcatttttgaagaaaatcgataccatatccgatggccatataaacgagaaacaccgaatttacccacaaattttggattatgtttgggaagattaagaaatgtcgtcaaacaattgatcaaaaataaacagttggaaagttataataaaatactgcaagagcaaatggacactaacgttaatgaaattgccgacttcaaatccaaaaatttaattcactatctcccacatcaccccgttataaaagagagttcaaataccacaaaaattcgaccagtttttgatgcttcagcaaaattaagaggaagcaattcactcaacgacgaaattcaccaaggaccaaaattattacctgatttatgtggaatgattctccgattcagactcaaaaatttcgtcttattaggcgatttagaaaaagcttttctaagagttggattaaatgaaacagacagagatacaacacgctttttatgggtaaatcaatcatatttggacgaaataaaccaaaaatatcgagaaatcgaaatgagagacgtagaattaagacgtttcacccgaatacccttcggagtcaatgcttctccgtttttattaactgctgttgtgaatcttcatttatcaaaaacagatgaaatgtttgaaaagtttaaaacacagcaaatagacaaggagttatgtcttaatggaaaagaaaaacaattcaaagagctatgcacagaactgaaagaaaacgcatatgtcgacaattttgtaatgatgtgtgatgacgaaaatgaaataaaattcaaacattactggagcaaagaaatattcaaattagcatccatgaatttgagagaattcgtgtctaatcacgaacaaagcaacaaagaaattcagaaattggaaggatctgaaataccaaaagtgacaaaaatgttagggataaaatggaatgttgataccgatgaactcgaactccaaataaaaataccgttaatgagtagagagacacgacaaaaaggcaaattttgaccatgatcgcaaaaaatttcgacccaatgggttggctatccccagtaatactcaaatacaaactatttttccaaaaattatggagatcaaacaaagactgggacgacaaattaaatgatgaagaaataagagaatggaacaatatttcaaatatagacgaagtttccataccacgctcaccatttacaagtcaaaatttaaaatgtgcttctttacaccttttctctgacgcttctgaattagcttacgccaccgccgcatatttacacgcaaataataaaactgacttattattcgcaaaaacgagacttactccactcaaaggactaacaatcccaaagcttgaactattgggactattgatagccgcaagagccgttaaattcatcgttaaagaatcaaaattaaaatttgaaacgatatatatctggtgcgattcaaaatgtgtactaagctggttaaatgcaaaaagatttaccaatatttgtanaaaacagagtggaagaaataaaacgaattgtatcagaantccatatcactttctattacgtaaa

SEQ ID NO: 10707 - DNA, 2000 bp, Heterodera glycines
  unsure (1)..(2000): unsure at all n locations
aaagaaaacgcatatgtcgacattttntaatgatgtgtgatgacgaaatgaaataaaattcaaacattactggagcaaagaaatattcaaaatagcatccatgaatttgagagaattcgtgtctaatcacgaacaaagcaacaaagaaattcagaaattggaaggatctgaaataccaaaagtgacaaaaatgttagggataaaatggaatgttgataccgatgaactcgaactccaaataaaaataccgttaatgagtagagacacgacaaaaaggcaaattttgactatgatcgcaaaaaatttcgacccaatgggttggctatccccagtaatactcaaatacaaactatttttccaaaaattatggagatcaaacaaagactgggacgacaaattaaatgatgaagaaataagagaatggaacaatatttcaaatacagacgaaatttccataccacgctcaccatttacaagtcaaaatttaaaatgtgcttcattacaccttttctctgacgcttctgaattagcttacgccaccgccgcatatttacacgcaaataataaaactgacttattattcgcaaaaacgagacttactccactcaaaggactaacaatcccaaagcttgaactattgggactattgatagccgcaagagccgttaaattcatcgtaaaagaatcaaaattaaaatttgaaacgatatgtatctggtgcgattcaaaatgtgtactaagctggttaaaatgcaaaaagaatttaccaatatttgtaaaaaacagagtggaagaaataaaacgaattgtgtcagaatttcatatcactttctattacgtaaaatcagcagacaacccagctgatttggcatcaagaggtacaacaatgaatgaaatgaaatacaacgaattatggtggaagggaccaaaatggcttaaattaggaaaagaaaactggccagcccacagtttctatactcctgagcaaaatgattcactttatgatgataacataatggaaatcgaaaacactcagacaaatttagtcaaaatggactaccaaggatttattgaatggaaaaaatgcaattcatgggataaagtgacaagaatttgtcaaatattattaaaatttgtattttttacattaaaagactctcccgaattcaaaactaaattcaaaatacagaaatttcaaaacgaattgagcttaaaattcatggcacaaaaaatgctaatacgcataattcagaaagaaatggaaccaaataatgaagaagagagacaattaggaatttatagagacaatgacaatattttgaaatgcggaggaagattgaaaaatgcacagataaaagcaacaaatccaatattcttaccaagaacacattttggtactcatttaattattatggaccatcaccaaagaaatttacacgctggaacaatgacaacattagcagaaattcgtaaaacatattggatccccaaaggaagaagaattgttgaccaaataaggaaacagtgtttctattgcaaaagatataacgcaaaaccatatcagcaaccaaaaatgcctcagttgccaaaatcaagagttcaaataacagagccttttcaaaacgttggcctggattacatgggtccacttcaagtaaaaagtttcactgaaaaatgttggataatccttttcacatgttgcaccacgcgtggaatacacctcgaattagtgacatcattatcagtacaacactttctcaatgcatttcgcagatttatttcaagaaaagggacacccaaaaatatttggagtgacaatgcatcacaactgaaacttgcctcaaaagtattacctgaagtcctaaaattaaaggaaatacttaaagacgactcaattaaaacttatttcgaaaaggaaaacataaaatggattttttcaattgaattagccccctggaaaagcggagcaattgaacgtttaaatcaaaatgntaaaatca

SEQ ID NO: 10708 - DNA, 2070 bp, Heterodera glycines
ttttcatgctttttgttggcttttctgtttcgcaggcttttcttttcttagctattaaaattgtttttatttttcatggctttttgttggcttttacttttcgcaggattttcttttcttagctttaaaatttattttttcatggtttttcgtttaagggcctggcttttggtttacttttctttctttttttttttttgcctgcttttcttttcttagcttaaagttttttcatggctttttcgtttcattaattgtctttacgattcgttaaagaaaacggacaagaaatcaatataaaggggagaaatggaatgaaaatgatgggctggtggatgagaaaagagctgcgggaggggagaaacatttgaattgttgaagaaattcagacggggcattgggtcgtctgtgcagcactccctaagctgaatggcgaaagaatttcgcctcaggtatcattttgaacggtacgctcccaacgccccgccccctcgcgaaccccaagacttgcgcagcataactcccgcaccccttgccctattgacttcacatttcgcacgccatcattgcaccaccccctagactgaacggtgaaagaatctcacctctatcgccattttgggcgaaggtatcacgacgacacaccctgtagcaaaaaagaaattgataaaacgaaggcaaagacttgttcattcgaaatagcttaaagatatcgactagagagaagacaggccaatgtcgcgcccagttgtgggtaaaagtgtgttgtcatcatcgtcctccgtcgaattggtcgaccgttccagtaattcgccggtttcctcttgctgcgtagtcatcaagcgctgtttgcgtttcactctttcgaacagtccgttcgttgttaacctgtgaaaagtgccgtaaaataaaacaggaaaaagaaacttacgcaacgccggcctccacatcgcccccctcctccaggtttattctcaaatatgggttacttttccggggcctgaacttagctccaacgaggcaaaagaaaaacaaagacgcaagttcagcagccgcctcggaaacccaacgcttttcgtccggcaaaaaatactaaaaaataaaatgcttgtgagtaatttcttttttttttactttatgtgtataaaaaatgatttggacatttaaaacattccacagtacttcaagagtgaatttggcaccacgagttgtgtaaatgtaagcaatgacatgcaaataaaagcgacggaacagccgaagtctttcaagactaaatgccgccttcccatccgtcgtttttgcggcacactccgtcagaaaggcaatagaccttaatttattacttttcaaatgaatatgttcgccgcttccctatcgtcatttcttccttacttttttctatcgtttttctctcccccctctttcctctgtctctctcatcctctctgtccctcttttctctctccctacccttcttttctcacttatctctctgtccctctttttcttcattttctctgttcctccttttctttttccctccctctctctctcctcttttgtccccaccacaaaatgggcaaaagaatgctcatgcagcagacaatgtccaggaaggtgaacatctccagccagaacagatagcgttggtcgctgaactccgattcttccagaattatcattgcgatgttggccaaaatttgcaggggcaacacgaaaatgaacagtcgcctgtctctgtcactcaaaaattgctgtaaaaacactcaaaataaacgacaaataaaatttgaaaggaaattcactttgaaaaaagtgtaaccggagccaatcagaataattgtgccgaagagaagcgcacctttaagcctaaaattacgaaataagacgaaaaagaaaatgccattctcacaaatgcgtgacgtagtaaatgatggcccaaagctcacgttcgtggccataaacagagacaaagtaaaagttgacgccgtggaaaagcaaagtgagcgatttgaggaagacgagcaccaacatgagacgatgcactttgaaaatgttgttgctgctaaa

SEQ ID NO: 10709 - DNA, 1876 bp, Heterodera glycines
gaaaaataataccaaaacagcaaattttattatcatttaaaattttcggtaggaaattaaggaaaactctcagaatttctgaaagggtcggtcctaattttgtgattaaggagggacattttctcataaaatgcgattgaataaaaaaaacaaacaaactccgatttgcacaataaatttgcccacaaaattgtggccaacgcgaaaagaaaagcgaaataaacgtaaagagacggcttgggaatgtccacaaccgacagaaaagagttgacatttttctcgacaattatcgccttaaacatttaattattttcttttttcccaacggaaatcaccgccaaatcgaccgccacgcggtcgctgtatccatgttcacgataattgaagcaattgtggaagaacaggaagaaaaagcccttctgttgttcgttgaaacggacagcgaactgagagaaaaacagtcaaaaaagaagcgaatggcggaaaataacgaaaatattcaatttttaaaaccaaatccatttcctctcctccttcccttccccgttaatcacctgagtcgaatattggccattatgaagtccgattggcaaatagtcaaagtatggcagcttcaaatcgttgctggaggaagaacccccaaacaaatgggaaagaaagcccccggacgaagccacgacggaagaggtcgaattgcgctgaacagaaattggtaagggagaaaaaagggggggggggggaaagaccgtttcgccatcctccgaataggggcagctgaaaagagcaaatccgtgacaaatattaaattttatgtcctttttttgtccttgccttgacaaattcgtgcacaatttgatgcttttgatgtgtccagaacgaacaacgaccaaccgttgggcggtgaaatcgaaaacgaagaacagcgagtcaatgccctggtcctgctgttgcagttggcacaggtgcgggttggtctgcacgccattggccaattcccggccccggctgagggtgaaaccgatgatgccctaaagcactgccctcggagaaataaaaaaaatgcttcataaatcagtcaccaatttgtcctcgcccccgtctttctgtgtttgtttgagcactgcgtccggaacagtgaaatttgtcagcgaaaaggacaaagtgccgttggagccgaagccaaacttggagagcaaaatgttacgccgcgaatcgtcggttagcgaaagggtgtgaattttggacaaagagaaattgagaaggcaaaagagcggcaacaaatgcagcaaaagtgtcgaaatgtgcatgaaattcatacactcattcagatgaataaactgtgtaaaaaaaattggtcgggaagctgatgatggtcaacctgacccgatgatttttcggccgacccgacccgaattgcgacacgatatttggacccgcggcacccttggttcttaggggtgtatttttcttttttttttgcatttttgggtaataaatttgggcacaacgccaaagtaggttttttcaaatttttcaggccacctgggagcttaggaaaaaattggtcctacacctcaaaattttaaaaaatgtcaacaaatttgtgtttgtttctttggcgcgaggactataaaagacccaagtggacccctgtgaagaaattttgcttcagatgttgcatttaccgtacttgctcgattagacccccctctcgaataaagcccccccccttttgaagggggttgaacaatagggcccccctctcgattagaacccccctatcgattatagcctcccccaaataaaaaaaaatttttttcccaaaaagaattcaaatttcctgcctatttttaagtaagttggtacactatgggtc

SEQ ID NO: 10710 - DNA, 906 bp, Heterodera glycines
  unsure (1)..(906): unsure at all n locations
taaaattttgaatttaaataaaatttcagattttttggncctcggaaatttcggcgaatatttgaaaattcataacttgcttcaatgtggatcaattatagtgcaaaaaaactctaaaaaatatagaaaaatctatagaatttaatgctttttttagaattttctattcaaaaataaaaaagttgttacataaaaattcgatttttcagaaaaaataatacctaacacagttcttaaaaggattttggaaaaaaacatacctaataaaaaatccgcaattcttcctttataagactgacttaattgaattcatattttcatagatttttgaaaatgttacaaaaataaaactgattttggacaaaaggggtgggatgggggagcacatggtttttgagtggaaaaattgttttcaccaaaatttagcaaaaaaaacaactttttattggtaaattataccgtaatcacgaatctaaaatcaattttcagtaaaaacttagtaaaagtctcagaatctattcgtatctgtggattctgagtggatgggcgggggtcaggttcggacccagtctatgtaataatttttatacattttggttatttcttttcgatttcattttgatttaaatttttacgacagttctaattttggcgtactatttctttatctctgttaatagagaaaccccgaatttacttcatgctgtttaaaattttttctacttgttaaatccgcttcaaattttgcataacgatagagaacaaaattacgaacaaataatctaagggtttttaaaagcaaaaaagaagggttagctaaaaagttattcaaaaaacaaaacttcgaggcctcatatctttttcccaatactattatattgcttagaaattgcttagaaaaagctt

SEQ ID NO: 10711 - DNA, 2701 bp, Heterodera glycines
tccaaatttagcaaattctggccaactcatagcaatttcttcccattctttaattgtgctgctggccctaattaggacggacggcctgagtaaattttgtggtgtgtgctgatcagaatgttgtttttttgctcatcacaaatcattatattactaagtgtgttggtggtgtgtgatcaattttctcccgtcggtgcgagaaagcgaaaattaaaccgcctgtcgcgctgtctgcacgcaccgctggggcttcgattgggcagcatttgtgtgatgatgatggaaaatgtgaattcaaaaaagtattccttaatctttttttggtgtttttttgaaatcttttgaatatgatgaatttatgggttttgtatactaaaaaacggttacaatgctataaatttgtttgcctatcgccagacgcccttgtgaaaaagcttgttttttaagaactttagtcaaaattaacgaatataaacaaaaagaaatgattcaacaaaagaatggctcaaaaaaagcgaagaaaattttcacagattttgacagaaaatgttcaattttaaaatgtataataaattagatttattaattttttacttaaaaatgattagcaattgttagaatttggtttttaattttaattttttaaaatcaaattaaaaaaatcattgaataaattttagaattttcagatttatggcattttaaaagtaataaaatttgaatttaaattaccttacaaagcaaataaattcaacgagcagttgggcactgcttcgcggcgccaaccgctctgttttaatttttcaaatgatttacaaatgcttctctctccctttctctctcactctcctgctctctcacatctctctctcctcccctctctttccttgcacttttccccctctctctcacttcccctctgtccctttctttctcacgctctcctcctctctttctccctcagtctatatccccctctctcggtctctctctcgtccttctctctccctcttcccatccttctctcctcccctccctctttctcctcccctctcctcatcctctctctacctttctatctcactctcctgctctctcacatctctctctctccccccctctctttcttttcacttttcaccctctctctcacctcccccctctctccctttctctctccctctgcctcattccatccttctctctcccttttccctctctctccctttctctctcactctcctgctctctcacatctctcttttactccttttcactcttccctacgcactctcgcttcctctcttttccttctttctctctatctctctttctttctttctctcacagtcggtctctttctctatcaatcttccctctctttttctttcggtctctcttcactctctctctctccccacctcactcattctctcgtttactccttttctctcgactacaacactcgcttcctctctttcctttctttctctctctctctcctcatctctctctctctctattttccttcttttctctctcctctactcactctctcgctgcatctctttcctttttcactctcttactctctatctctctcactccatctctttctctctatctctcttccctatttttcttttctttttctctctcttttctctcttcactctctctcccctcctcactccctctctcttttactctctttcaccctctcttccctcctcactctccttatcctttcctttcttctctcatcaacacactctctctttatcattttcttctttcataactctctctctatcttttcctctagcgttccttctctctattccctcccttctctctttctctatttgtgtccctctctatatcaacgttatatctctattgtttttctttctttatattcctttctattcccctttatcttttttcctgtttctctctctttcactctctctatatatatcttttcctcactatatgtctctcttacttcctttctctgtctatctctttcgctctctttatttctctttcattctcttttcctctctctttatcgcctcacgctcatacactctctctctttctagcttcctttctctttccttttactttcgcattaatccttcactttacaccagggatggagttccgaggcactaaaaattttcggaagtcggaagtcggaattccgatgccccaaaaattttcggaagtcggaattccgaccccaagaatgtcggaagtcggaatttttcaaaaaaaaatataataaattttttaaaaaatatttaataggctaaatttttaaatttttaaccatgtaaaaggtaatttcaaactgtttttagtttatttctatattttttaaaaagatcaaaatattttaagtaattttacattattttggattttttttgggaaagttacacactttttttgcggcgcgctttatccaaagagaatttgagaaactgtggggaaggaagggtccggcggtgccgataggtgccgtcggaaaaaaaattgaaaatttctatgcaatttattaacataaattgtacaaaaattgctaattttttgaaaaaaaactcaaaaaaattccgaaaaattccgacttttcatcaaaaatttcggaagtcggaagtcgggattccgaggccccaaaaatgtcggaactcgg

SEQ ID NO: 10712 - DNA, 1233 bp, Heterodera glycines
cctctctctacctttctctctcactctcctgctctctcacatctctctctctcccccccctctctttcttttcacttttcaccctctctctcacctcccccctctctccctttctctctccctctgcctcattccatccttctctctcccttttccctctctctccctttctctctcactctcctgctctctcacatctctcttttactccttttcactcttccctacgcactctcgcttcctctcttttccttctttctctctatctctctttctttctttctctcacagtcggtctctttctctatcaatcttccctctctttggcgcctttctttttttgagtgttttcctttttgctttaattcgtttttcattgcaataaacatttgtacaatttctaatgtttcttcatcagtttttgatttataacatttatttggcttttgattaagccctaattctttaatccattcataaattttgttacgatttgtgcccaattttcttccaatttttctttcaattttattccattctttttttggatattttcttcctttttgcttgatattttctttaattttgtaatatttttgaatgatttcacttttcttttgatgattttccatctctttttcttcccatttttctccaaatatttcgtcaaatgacttttgttgcatttttttcttttctgttccaattttttcggcaattaaaataattaaaaataataaaagacataatttcattttcaattgaacaataaaaactcttttaatttatacaatttgattacggaacaaatttttgttgtataaaatgaagaaattcagaaaattattgccttcggatcgattacaaatatctgtacaaatataaaaaatttggacaggcagaaaatttcattaattacaacaaaataatgaaattgaaatgctttgccccaggacaaacatgaaaaaccaggacacattttgaaaataagaaacgcttttgattggaaaagtcattttttcgcaattaaagcaccgaaaagttttccctaagtttttattttcaattttatcaattagtagttagctttttggaaaaatttggcacaccttaattctagtaaaatgatcaaaaggtgctcaaaaatcatcaggattgctgctcccccaattttaaaggggtaattcagagagaagggatgaacttttttttgagtttctgacctggaatcaa

SEQ ID NO: 10713 - DNA, 2082 bp, Heterodera glycines
  unsure (1)..(2082): unsure at all n locations
taaaaaatcatcattttcaagcttcgtgaattttatttgcctaaaaaggaagcaatagaaaatgagtgccagaaactgattcttcgacctgaaaagcgtataattcaacttttcattgaaaaccttacttttttaatcgagttcaaacttgatttttttcatccctgatagccagggcccggatttttaccaaaagaacaagttttcttaaatttaatgctgtttaagaagtttgaatccgattttggacataggcgcaaatgttggggctctgcgcacactgctggtgctatctcattactcaaaaaccatcaaaatattaaaaaaaaatttgttactgctcaaaagcaaccatatgtattttaattcttgatatcattcgatagccttaaaatgttctctgttacatgccaaagttcaaaaaatttgttaactttccacaaaattatgaccaaaaatgttttaaaaaactatgtttttcctttggccataactagggcatacaattatatgcacatgcatattttttcctgaactgcgggaggcctgaaacgcatgaaaaacatgtttttagcttgattagaagcttctagagtggatttccatatgcatattttgcatatttgtgcatatttcgcgatttatgtgcatatttgggcattttttcaataaatcctctattaaaacggccccctctattaaagcggccatttgggctctaatgactgaaaatttttcaaaaatatcagatttttgggtatattttctgataaaaaaagtaactttttaaaaaattggaactttatgccaaaaatagtcagaaaatagaaaattctccatttttagctcaattttcttcaaaatatataaatattacttttttggttttaaaataatcattcatattatttttagctattttcgggatttttatgcttaaatttaacaaacttgaagaaatttgaaaatttgccctcaatttggaaaaatttatgtacatatttttcactttttatgtgcatattttgcaattttttgcgcataatttgcgattttatgtccatataattgcctgccctagccataaccctttaaaaattaaaatcttttttgaaattttgttggctgagaatatttgttgctcttttaaaattcaaatccggatcaaaaattgcaaaagtatggaatagaagatttccgattatagtggctataaaattttaacaaatcccgatttctccacctaaatacagccgcgcctgcattgtgaagagtctgcagttcagcagccaatgtccggtgtgtgacagtgggctggacgcgaaaagggcacgaatttgtggcacgccggcaccaaattcggcgacggcaccaccaaataataataattgcaacaacaataataataataataataataatggcagtggtagtgccaacaacaacaacaatagcaacacggcactgattgtgaacaacaatgttgtgctgtgtccaaactacacagttgctgaactgtttgaacaccagcaaaaaacagctgatgtgctgaaggcaaaaaacaaataaatgaaaaaagcaagccgattcacgaccgatttggccagccctgaaacccgatcccgggtcggggttctattgcactttatgagtccaaacgcatattttttaagagtccaatttgagtttattagtccaatcaattaaccatactgctggtttaataactttgttcatgttcgaataaaccctaaattcttggtatcattcgaaagtattaagtctgaagaaagtaataatacgagaaaacaagaaataaatgctgagtttttacatattttagcttttttataacgccataggactcataaaagtcgattggattcataaatctgggtgccaaccctattttaattcttggctagtgaaaataataatgttgatgatttaactgttatgtgaacaaacttcaccttatttttcaaaagtttcctggcttactcccggctcaaactagccaaagtgtacttcataaagcaaaaaagggtctttgcaatctcaangttcctccaatttccgtac

SEQ ID NO: 10714 - DNA, 912 bp, Heterodera glycines
aaataaattaatctaaaatcactttcgctgcagtaatttttgtctgaaaattatgtcactattcgtcactatttcggactttttgtcactatttcttcactattttggcatttttactcactattttagttaactattttgggatttttcgtcactaaaattcacagccctagtcatcacatagtcatttcattatgtataaaataataataataatagcagccgactgtaaaaaatataaaactcgtgggtgaggattcaaatcggaaaaaattcttgccgtttctttaaaacctatgaaattttaaaaatctcctggcgattggtgaaatttttcagaaaactaaatcaaatgatttccttagaaagagcacaaaattctctgtaggaaaagagcagaagaggcttaagacttacatgaaatggtacactgattgaactttcattcgttgtaaaatttcccattttattttgccttcaataatttttacacaattttcgaaatatttggtctaaccttccgtttgcaggagagatttgatcatttttgccaaagaatatttactttttaatggacattaattatttctttcaaaaataactacatgtatctgttttttgcttttgtaattttctccaaattacccacacaacggcagcatatttgatgataattaatacttaaatgatcaaattgtcattgtcgatctgttcagaggatgggaaaattaatcgcaatttgttcgctgcaattcaaaacctttccgttcattttcctccaccaaattcgccaatttaataattcgccaattttgtgcggccttttcccgctcgttttacggctgaaagtttcccgcgtcataaacgatttggtcggtccattaatcagccccctccccctcgccccccccc

SEQ ID NO: 10715 - DNA, 2020 bp, Heterodera glycines
aataattcattataatagaattcaagcatataaaatgaacgataagaaataatggcatttcgagcactcgatttgatcaacatttaaaatgaactcgagaaagtcgcattttggcaattaagaactaaattaattgttttgaaatgcatgactcaccggtggattcaaataattctgacaacaacagcagtgttgtccaacggaagctgtacaaagcggacgaaaacccaccatggccgctgacattgcttttcggccttcaggtcagacattgagagggacggacggactaaatgcttaattaaactcaacccatcgattaattcaattttactgagtctcgtaatattcaatgtattttttttaatttttaaataattaccccccccccccctccaatggttttagcaagtgatggtgtccgtctccgtgcttgtctccattccgtttctgatttcggacgaagtctgccctggtcaggaccgtgatcagcttcgggtccgtctgattgccggaacttttgttgtttgtgggcttggcaccattttgcaaactgcgctcggactgaggtaacgaacgtaaataacttttgattatgcaattaattttctaattattttaatcgcaatgacattttggaaaattatatttttaattttaatttaaatataaaaaatatgaataacaaaattattaaagataaagaaaggggacgccatatccctttaatttattctatttaattttaaaattaaaattaaatgtttgttgttgttttcaggttagcgctgctccaaggggttgcattcgcctacattccatcagtgctttttttgaatgtttcgaatttaatcaaattaaaaaaattatttggtattgttaataaataaatacaaattctttttacaataaatattaaataatattttcattttcaggtgagggcgtatatgaatttggaagggaacagatgcaacgcgacaattcacgattttgtgccggccgaagtgtacgaaaataaattggcaattgttcgttttgaaaaataacttttttaataacatttatttaatttttatttaaatttttgaagattcaaggcactttggtggtggtttctgttctcaaagtgctcgttggggccaccggatttatcgggaaaatgaccaaagtaatgtgttcacagagaatgtaaaattggtgcaaggaaaaaccattagcatattacagtacattggcccgatgaccgtatcttcgcttctcatccttttgatggttgagtcggtgacaattactgtgaagcgaatggaacagcattggatctcattaatgtataatatagcaattaattatttttattcaccaaatcattcccctatcattcagaatggcggtcgcacttttcgccaccgtcctttaccttccccgtgtcaatgtgccgtgcccggcctatgtcaacggcaaattcagttttgtcggcttcaatgtttttggccaatttccggtaaaattaatatttttttcaatatatttaaattttattgctaatccatagtatctgactgccattctattctcctggttcctctgctggctgatgaccgtttttgagttaatcccaaaggatagtgtggcacggacggacaaaaacggcacaatgatggccattcaaaacgcaccttgggccagggtgccccttccaggtccatcgaaaataattataatttgaaaattcaaattcatttccaggacagtttggaatgcccaaattcaatgttggtctgttcatggcattcatcgtttccggcctgaccacaatgtttgaagcggttggaaattatcacgcggttgcgcgggtatctgaggcaagtttaattaataaattttgagtttttcaattatattttattttatcttttttaaggagcgtcccccgccttcccatgcaataaatcgcggcattgttgctgaaggattgggctgtttaattgctgcgctaattgggccatgtgttggcatc

SEQ ID NO: 10716 - DNA, 1039 bp, Heterodera glycines
  unsure (1)..(1039): unsure at all n locations
ttccttttttcaggtcggcggtgtgcaaatgnncaatgttcaagaagtgaatttgcgaatcactcgcaaccatcgccatttctcggcttctcactaatgatgggaatggtcagtcaatgttggacacagggacggacncaggatttcggcggggggggggggtaatccnccgggccaggcgaggactttttttttgctttttacaccactttgtttggggtggttttatcaaaaacattctgtggaacacggggtccggccggcggtgccgaaaggcgccgcggggaaaatttttttgttgattttaatgcgattactaacagattttgtccaaaaaatgaccaaattttgtgattttgactcattttttcatcaaaaaattgtggatttttcagaaattttagcgaaattctttgggaattttttctctgtttaatatttttgattttttcactttttataatttgtaattatcaaatggtaatttaaggtcattcccgagtattacaagcgaaacccgaacacggtgaagacgggcgttttggaacttgaccaagtgatcgaagtgtgaggagcttttccttttgtttcccttgccaaattagcaaatgctaattgcccacgccttttcgacaaatttcaattaatttaaattaattaaatatttatttttctaaaaatcagtctgatgactttgccaatgttcgtcggttcgttcgctgcctttgtgcttgacaatacggtgggcggtgccacgcgtcagcagcggggccttcgcgagaggggcgtcgtgtgggaattgtcagccgatggacggggtcggcataaatttaaaaaataaaatttaattttgatacaattttcaacagatgtttacgccttcccgggcccacttcagcgaaccgttgaggccattccgttgctcaaatatatgccatttatgccaaagcagaaaaaggcaaatgccaatttaagaaacggatttggagagaacaaattctgattgtgagcagattatattatattattattgtattga

SEQ ID NO: 10717 - DNA, 1010 bp, Heterodera glycines
ttcattcttaacatttgcaaatcttaaacaaaattggtcaatattattactttacaaaatgtaatttctattttatcttgttaaattatttatggtgtgcatttttaaaaattgtcgataatattttgtaattttgattttttatcttaagaaacaaaacaatattttatttaaaaacaacttgaaattacaaatcgatagaaataacatatagaaaaaatgtttttttttattttaaagataaatagactaaatagtgtacttgaatttaagccaagtatgaatttatgtcttacattttttgatttcctaccccttggaggatttaagaaacgacccatcacgcttgcgatcatgtaaagaaattttaatgctttatataatactaaattagaaaacaactatacatgaatacatcctttcatttaatgtgcaaccttatgcagaaggttgtggaagttgtacgtgatctgaaaaatatttaaaaaatacctatctatcggtacttttccattatgctgttcaccagaaattcaaaaaaaggtagaaaaagcgccaattttggcgagcaacggttatttagaaggcataaaagcagcgaatttgagcaaaataccatcgaatgggtcgtcgtcatactttaaaaggccgcaaaaaattttaggaggcataaagccgcaatttgagcttaaatggcatctaaggtcgtcgtcgtccattacgttcttcgtgcataactttatttgaattgaaagtatttgggttattataaacaattttaaaaaattagactatttttaataattttggctaatcttcgaaattattcttgtagacatggctgtttatgtagaaattctgtgccaaaaatttatttatatatatttatcttttgattcataaaagaattaaggaatctaccttaattaatgattatttttacttttcaaaatagttttagatatatttttaataaacaaatttagactggctaattgtttttagatttt

SEQ ID NO: 10718 - DNA, 2438 bp, Heterodera glycines
aataggtcgcagattctattaaaataatatttattattattttctaataaaaaatttattacaattcatttttctagatttcggataaaaatttcaaaaattattgtatcacatcgaccaatttgattatttaattagatatttttttttattaaaataacacactcttcgaattatatataatggtttttttctaagctttatttatgaagaataataaattaaagaaaactttgaatcttaaaatatcaaacttgtagaattagtagtatttaatgggcttcttcattgcttcttatttttagttaaggtatttgcaaaatttgatatataatttgtttatttatacatcaatttcgttataattggtataaatttgtagaatttaatatataatttattccttttgcataaataccgttatcttttaaaatttttatataagtgtaagaatcgtttttgatctcatttgtttgcagttaattgacaaggcaataatcatgctcaaagtaattttttaaggatttcaggcattttataattgtttatttaattttcaatatttgcatttcgtaagtaaataatatttccaatttccttttaaattcttgcagattgatactatacacctttagagcattgacaataaatcaattgattgttattttaaaaaattattgcatattgcggactcgggtgtgtgcgggtgtgggcgtggtggagtccggcaatagcctgctctcgttggtgcacggaaaattcacaccaaattttatctcaaacttgggtaattaaaccatcgaatggggagcaaagggggaagacatttgagggggacaaattaagccaattgggccaaaaagtaaaaaatgtgaacaatttggccctattagcccatcacaaaaaaatcgtattgaaattggacaaaatgggggaaattgggagagcaaggagttggagcagtacaacaacggaaatgtgaaaagggggcgcaaacagtgcatggaatggcttgggggcgccgtgttggtgattgatcggtgagcgggaccctgataaccattaagttattcataaaattattaataaaatatgtttttttgatttcatatgcaaatcttttaggtgccgatattaaaaagaatataaataattaatgtcatccataattagaattattatagaaaatgcctaattttagaaaaatatttcaaataattacaaaaaataattatttaaaattttatttaagttttgtaaattttagtaaacatataaaataaactgatattataaattatcatctaacaattccaaggtatttatttgatcaatattttcggttcaataaattaaattgaaaaggatataatcttctgacttacttattttatattgttgcatttttaaacttttcttccaatatacataaaaaatccaattatattagtggaattaatattaagcttatttctcgtggttaaattgtatttattgtttttcgtatttaaaataaatttaactattccattgatgatttattgtgtcaggtgataaaaatataggttactagaatataaagttattgcaattttgattttataaatatcttttaagaattgttggattatttcaaattcaggtttttctgccgattatttaaatataagtcaattaaatttcctttataaaccatttaaaatgaaagtaatttaaaaagtatttgtatataaaaataaagactaatttactcaaatttatgatttaattatatataattaaattaaaaagcatttaaaagcatatttttgaaagataaactatttaataagacaaattaataaactaatatatcatttatgtggctaaatttataaagactttcaaattaaaaaaaaaacaatttttgaataaattacgccgacaccatctgccacgattctcgtcttatggcatttaaaaataaattatttatattaagattcatatgagaaaaatattatacatataaattattaaaacgttaaaaattgattactttattgaaaacaaattaaaaaatggttacataaatgggcaaaaataaaaaatcatcttgataatatgactaacattcaattttcattcttcacaaatttaactgtacttatcgcaaataaaataaaggtcttaaatcatctttttaaacgattatatgttttttttgtaactcatagaaaaaaaactaatttttttttttgtattttgcataaataaaaatattttttcaatattaatttaaaatttttttagcatttttatcaataataaataccattaaaatgcaaaatttgcaagtgcatgaaaaacatttagtaaaagattttctttctttttatgaatcagataaaataccatagagggaaaaaaaataaataacggttttcaaatcagaaatt

SEQ ID NO: 10719 - DNA, 1395 bp, Heterodera glycines
ttaaattcacccgctcaaacctcaaaatcattttataaaatgtcatcattatcattatctcccgaaaaaattatgtctcaagctccgtcccctaataaggcaaaagttgaccaacgagctctctggaaaatcttcaagggcaagtacatgctggcaatttatctctgcgacgatgactagcgaaaactgtacgagaataaagagaaagtcagacgactagaggacgacgacgacaatgtgacccttagtttccaaatgtgtgaggattgcgtgcgcgtgaattgcaatccaattgacataatggcaccaccgaagaaacgaaagatcgagaaagcttaagctcgactcattcgccccatcccatctcgtccaattttcgcccaagaacaactcctgccatcaacatggaagctaattcgggatctttgtcggcttcgttgcaagcagcagaagctgaaattggctccctgaaggaaatgatcaagctacagaatgagaaaatgaaggacatgcggcactgttttgtcaacttccgctcctggctagatcagctggaggcctgggctagtgacgtaagctgttaacaccattttttaaattattacagtatattttagaacaaggaaacgaaatttgtgcgtcccgacacacgcaaacgagcgttattggacgattcaccagaaatgccggcaacatcaaatgctgcttccggtaactttttttgattgatacacatttctgactttatcctcactttaggcggacgtcagcaatgctttcaagaagaattttttgaggttaaactcaaaaaattcatgaaagagaagttgtaggaggcgaaggtctgcgcggaattcgcaattgcagcggctgagcgcaaaatgcgcggtgccggcgactggctcttcaaagcttccacgccgcaaaagaaatggtggagaagaaaatgggatgttcaattttggacaacgactaaatttttttttaaaatctacctcccaaaaattgaacgtcatcctactcctcctgcatgtgatggttttgtagttcaaccaactccatacaccgtggggttggcaccacgtcttcggaagatgaatggcgtcggcagtatgggcatgtgccgggaatcaattctccttcgggagtccaactaactgaatttttgagtttattattattgatcttatgaatttttttaacttgtatttgcaagatgcctcctaatacactgaaagtgcgacgctgcgcatctgcacggcaaaaatacagccctatgttgatggttgagcgcttcgccttctacggggtataaagggtatgcgcaaaaacaatcatcttgattcatgacagaaattgaaaaaaaaccaaaaaatttttatgggttccgtcctt

SEQ ID NO: 10720 - DNA, 1909 bp, Heterodera glycines
taactattcagtttttcttgtcatcatcaaaagtcaaatgcaataatgaatgttcatcgttttttaatgtgctcatcaaaaatattaacaaacgaacaaaatagtcaacaaataaaattttttgggagcgaaaaattaacttttattatgttttcatttttatgcatttttgatacggtaaacaacagaactttttagatcgcttgtttttaaaaaattcattttattttaaaatttttgttttttccttagtaatttctttacatggctgaaaatctttgtattttgtaagaccaatagagcatgggaagagcttccgtatcatttttagagataataaaagtgaaatgaataataacatttaacaatgttttaatgcctttttgcgttgtttattttgatcacctaaactcgccttgtccctgattaaaccctataattttattactagagaccgagatttccaaatctgccggaccggactgatattttcaaaaacgaccggattccggatccagtctcaaattccggacaatccagattttcaaattgccggatccggaaccggattggtaaacatttaaattttcaaatattaatttgggaaaaaatccgcaaaatttcctattagatatttgtagacatttggtgcatcagaaaatgtcgccactgaaaagacaatgtcgccaaaataaaataaaatttttaagtttgaaaaatttatttaaagttttttatttttgaaaacctacctatgttttattgaaaaaaaatttgctaaatttcacaaaaaaaaatatatttttcttcattaaacttttttaattaggctaggtaaacgaaaatttgaattttcaactttctggtaagagaatgaaaattttcaaaatcaccatttttctaaaaaaatcatcatttggggtcaaaattcagcatacattttttggcgctactgtaaaagtggtctcttttgaaaatttttttcacttttttttaatatatttttattatttttttttattacaattatccatccttcctttgacttcgttttatcagagccatatagtcccaacaattttggcacaacaatttgttttggataagtccgttgtgtgcctaaaattgtaaaatctcttcagtttttggaaaaatgccatctcaaatttatatcatccaatgttggaaaagcgatgagcggcagattgttggaatcattaatggaatatcttgaaactttaaccatttgctaaaattgcatgagaaaaatcatttataaaaaaaatatatgaaaaaagtgaaaaaaattttcaaaagggaccacttttacagtagcgcccattttttcataaaaattcttatattagtaagattcaaattttttaaaaactttcagcgattttttcgaaattttatgaaaattgtcgttttttagaaaaaaatttccaaaaaaattctatgtgaatgtgaccacacacacaaacacacacctccttgaaactgttgagccaagctatgtttccttcgccgtccaattcttcgcaaaacaatcgcttcggttgcccgtcttttctcggagtgtgcaaccattcggacaacacttggccaggagaagttccattctgtccatcatcagcaatcacaagtatcagctgatcgaaattgattgataccaattgatcaagatcagtgagaattgtgggcgaaatgcgacggcacaaagcgtcaaattgttcgtcatcgaaaaagcccaaatggcgaatgcttggtgcaaaaattggccaaatttcgcgcgccaaaacatcccaaatcggatgttcatcatcatcattatcgcttgaacacagagtcaattccaaattggtgccacttctgtccccaaatgtgcttgttggcatggagaaatgtg

SEQ ID NO: 10721 - DNA, 730 bp, Heterodera glycines
ctctagagtcagacaaaatgaaggttcatgcataatcagagcttagattcatgatcagaatatttttaatccaaaattcaggcaatcattaagaattggtgtcccgacgaaaaaaatgttaaaaatttgtcgggtattttttctaggcttaaaaaatgcgctgatcacgaatctgagctcagattttgaaaatcattgatttttatctaagattttttgtcaactacttgatttttttcaattttttaaattatttttaaaaaaattttagcaatgaatttgggttaaaaaatgcgctgatcacgaatctaagctctgactatgcatgaacattcattttagtctgattttcatcaagtgtcataagaaaaaataaaccgctgccaagcggactctaaccccaggacccccggtctcatacgacccctagggattatgatttagtcgcagaaaatcaaatcaattcaagacttgacttctcattgcgtccgtagatgatacgacccttgccaaacaatcgcacgtaattgtcagttaattctgtaaggtaagtgaatgggcctgaattgggcaattaaacaaaaagaaaagcgcggacggaccatcggcgaaaaagtcgaacatcggaagaaggagggggacaaagtcctagggagaggagtagactgaagggaaacaatccaagtggtgcaaattgccattgctttacgattgttattccgtgaagcag

SEQ ID NO: 10722 - DNA, 1783 bp, Heterodera glycines
tagggattagaaattagtcaaaatacatgtcagattcccgtttagcgacctttaaaaccccggataaaaaattatcatggttttttatcttaaaaaaattttgcaaaacaaaagggtcctccccccttttgtttcaaaaactgtcactttccatatagtgccaaaatttcattaaaacaaaatgatgaatggtgtagatagccaataaaaaacggtacaaaattacaaaataaaactttttggtacttttccgttttggggccaaagtttgaattttttttaaatcaacagcgagacagtagaattgcagatccattcgtagagatattaactcaaattgtgttatttatgcctccaaaataattttggcgcgtagctttagcaattctacgcgcccgctgttgatttaaaaatttttttttcaactttggccccaaaacggaaattaccaacttcttaattcattcattcattgaatctaatataataaagttgagtgtctgtgtgtatgtgtcattgtttggggttcgactcgtttccttaccaccgtttccttaccaaccgtttccttaccaaccgtttccttaccaccgtttccttaccaaggtatttggttcatttccttaccaaaaattttcgaaaaatttccgtaaaaattgatcagttttttcatccctaaaaatcagttccctagtagtaaatattgagattaaaacattcaaataaaaaaacactttttatcagtttcaaatcatggtatcatctcataattgcgagaaattccggacaaaaaagcaatgataaattgatggttaaaaggctgatgaagtggaaaagtattggggtctccgttgttaagtggtaaataattttgaaccatcgtgagaattcggcggtctgcgttgcgatatttctttgccttttgcggtggttcttgtccagttgaacacttcgcgaagtcatcatcggataacttttgatcctttcgcagaaggtcaatgaaacgccaaatcgatggatgtgaacaggcaaatgcgcattgcaggcgtctgttcgcggcttctgaatggttattcgtccggtcatcgctttgcagtgttcgagtgtaaacactccaaatgttcgggtcaaatcgcgggcgtgttcggcttccatcatgcttaagacgacccgtgtagttcatgatgaacctaataaataattaaagaacaataaatagtaaacaatttctgagattgtcaatttaccagtcaaggacgggagtaagttcgtcgggaagagccatgtccagagcaattattccaggggtcaaatctccaattgggagaaacgctagcgatgtgacacatcgtgccatttctgcgaatgtcgggtcattttgatagcgctaaaattttcgaaaattcaatacaaatatttgaggaaacataaaaaattatcacttgttttgtcgcctgtttggttgggagttgcgcaaggactggcgtggccacattctgcagtgccaaagagcgaattgtcgctggtggttccatggtttgttccgccctgcgtttgattccactgatcactcgttgtgcttccattcgagctacacttggttcacactggtggttcccaacttcacgtaaaatgcggttgtcgaggtcagtgtgaaggcgtcctttacaactgatgtcttttgcgtgatgatgttcacacgcccaaaagcgagcttcaccgtcagcactcggcttgtgaaaagtgtatgaatggccattgtgctgaagcttggtagacctgc

SEQ ID NO: 10723 - DNA, 1690 bp, Heterodera glycines
tcagctcactgactagtccaacttaagcaatcagagattttttatggataaatttttgccagtttcagctcatgctctggcaacaatctttgatccgccctctgttgatgggcccgtgtgtggcacctcatttcgcgaccagcttaagaatgctgaccacccaagaagcgattgctgccgggatggcacaagcaatcggcacaacaaggcccaccgagacagaaggcactgatggggccggctgcaaaacgttgaggcccacctgtggggctggccaagtggtaagccagctaacaaatgagtggcattcaagagtcgcacaagtctttacatcagtctcggtaccgtctttaaatcaatctcggatcaagaggtctcgagataaaactcagtctcgagctgggacattttcccgcgttcattcaggttaccatacatgtgatcttggcaaacggtgacactgattttggcaactacgatttggtgccatcacgttggattgcaatgcccaagggctcgtgagcattcccttaatcttaggttttctcaattagactgcaaattttcaaaaagttacggccaaaaaatcatgaaattttgggttaggtgaactttataatgaatatccattcccaattttgacttttttaccaccgatgaatagtccacttgccgtcaatggcacttcaacaccgtggctattgctcgttgaattgcctaattaaggaaattaaaactgctcataggtaaacatttaaattctgcgtccttgaaaaaccaggttcaaatttcaactttggcattcgtaaccttttggcttgctatcaattatatttaattaatatgattctggattcttgaaaacttgtgagtgtccttgaaaaaccgtgttcaattttcaactttggcatttgtcaatgtgtacctcttcttcggtacggtacaaatggccgacgccgacgccaacgcctcgccaatagttgactcgcgatgaattatgcaagaaaaattgaggaaaatttaaatttttaatgtaaaataaaatttatcgtaaatttaaaaaaaattggaatggaaaaaaagagaaaaaaatatttgaatttgaaaaccaaataagaaaaattatagtgcgaaaaatataaaatttttatttgtatgtgcgtattttgcagtgctttctgtaccggaaacaaactgttcattatccatgtccttgtccttagccccaaaatggcacgtgcatttctaatcatgggagaccggggcactcaaattggcacggaactcattgactttgtctggaccttcattttcacactttgctttgggatcatttgcatcacgagtgaaacaactccacatgttgccgtaaaatccatctgacaatatttttgtatttattttttgaaatgtttggataaatactatttttaataggaattaatattaagaattattaaatttaagtttttttttattcgcatgattaaatttttgcaggaaaatacttagcataagctacatgcgactataagatttcaaaccatacgatttttttacatccgtaggttttttaaacttgaaaatttgatgtcgcgttttttgacgtacaattattctagccttaaaacacgtcgaatgtttattttacttccgctataactgcatgaaactcgtatctctatttttc

SEQ ID NO: 10724 - DNA, 1204 bp, Heterodera glycines
ccagttctcgagaaatgtcgtggacctggagccaagaaaaatccagacctggatccaggtctaggttgcattctagtgaaatttaaaaagtctaaaagtgatcaagttgttttttcgtgctttttcatccaaaattcaaaataaacaaccgaaaatcccagccctattaatcacttgtaaattaagcactttcagcggatgaacaaaaaattgctgcacaatgcgtaccttggggacatttgcactgttttttgaatttcaatgtctccgtttccagggcgaccttgcaattcaatactaaatgaaggtgtacggacatttcgccaacttgacatctcgccaactgacacttcgccaactcagccaaaaacattcatttcgcctactaagccaaaatctgacattttgccattaaaaaattagctgttttaatatcaaatacagccctattccagtttacacgtccaatcagtgaccatcatcatttcttatgtcctaacttttttcatatttgttcattccaaccatttttggatcaatcaaagcttaagaattaacgacgacaacggtacgtcatcaaagaacaaaatgtggtgcggatccttgacgaggccgactttgaatcggaagaaggattgacaaacgccttgcacctgctcgggctcgtgatgcagagctttgtggagggacttcacgtccgtggaaattcagagagtggtgaagaaactgaggccgatgaaaattgattttaaacattttcttattattgtttttttattgatattttatatattttatgaagatttcaatgcttgaagcacttttataataaatttaatatcattatatagttaaaattcaattttcgactagttggcgaaattagttggcgaaacgtcatgttggcgagatgtaaagttggtgagatgtcagttggcgaaatgtcatgtagcctatatgaaaagtgaaaaagaatttaaaaatgcattaaatatgaggggagggggggggggaggttttagccaaaaattatccaatgagcttcatttcctttataaaattctcttaacagaattttttgagaaatttttttcatttcttaggagtgtatttttgaaaattttagggtcgatttttaaggggtgtatttttctgaaattttataagtcgattcttaggagggtgttttttaaaaattttaggg

SEQ ID NO: 10725 - DNA, 1523 bp, Heterodera glycines
cgtaccccccatactgcggttttgacgattattttaataaaattttgttatacagtaattaccgtgactaggttgcaattgaaaactactttttttcaaggacaacttaggtattcattcaagaacaatggttaaagcgtctaaatttgcctatttttatggtatataccgtgcccgtgttctagcaaagcgctgatgaggaacagcagaagaacggcaaaaatggacggtaaaagtgagcatttgacgaccatttttggagtttccaaattcattttttgcattactagttacataataattcaattaaataattattcttattttttgcttcaattttttatttactgtttttcgactggataaaggcaaagtgatgggaatggatgaaacaaggattttaagcgaaaagtcggaaaaatgaaaagccaaatcatcgctaaaattagaatgccatttccgttggatgggaatggacggattggtggataattttcgatttaattattccgtcataaattattcatattctaccgatcgtgaaaaaaaattgacaaattgacgaaaagcgatgtaaaccaggaaaagcgaaaaaataggaagtgccaaaacatcgctgaagttcagcttacttaaaccgagaaacctgcacttctgcttcgtgatcaacgaaccccgaaaaaggttcaagtccactccacaactttaattttgttcaattaaattagataaaataaattatatttttaaaattattttttaagcatttcccatccaaatagggcaatctaattagcatcgtttgaaagctctcgatgagaaagaaagaaatggcatttgaatcgaattgaaatttattggatatacatatagtgagatgatcggaattggggataaatggcactttgctaaatgattgggactgggcgataaattggttaatttgaataatcgattgatcggaatagggaggaaatctttaactgatcagcagggattgaaattttcattatttcacttcttcttctcccattgtttcacatcccactcgatgatccttagacaaaaagactttttttacttttttctaatttttgggattttatgactttttagtcgattttttaagtggtttttcatgatttaaaatcacaccctttttaatcaaaaattactctcgtcgtctacctccctccctttttgtgtactaattcgtttctaaaattggttccgaattttttggcatcttgaaattaaattgtaaaaattcgaaacaaaaaactcggtgaagatttttaatttcacctcacaatgcttttaagccccaacgtgaggcgggacagttccaagattttttaccacattttactgtggaatgtccaattgtacaaatttaaataaacgactacagtcgcctttggccccttatggaacagaaaaggtggaatatcagatggggtgcgtcccttcctaaaaagttctcttttcgtctacccctcccatccttgtgcactatttctttt

SEQ ID NO: 10726 - DNA, 4878 bp, Heterodera glycines
ctttttgggcaatcccccttattttggcattattccttgtcatttcagtggtatgaattgggaccgtttctcgtcagaattggacgattcgctgctgaacgattcgactacgctgaaggtgaagaaggcattttggagtgcgaagcagttgctcagggaaaagctaggcaaacgcgaggacgaacacattgtggcggctgacgccgagttggacacgcatttgcagacatttcgccaaattcgcgactcgacccaaaaactgcttaatctgatggagacgcaccagcgtgaggtgatcgatcattcattgtttttttgatgaaaaaaaaaaatatatttttttaatttacttattccttgcattttttttcgaccgatagttgttttttagatcatattacccaacagggtaatcatcgtaaaaatacgatgattcatacagtagtacctaaatatcctattgtattgtatattgtcgattttttttaaacagcttaacgagctggcacaattggagttggacattgcggaattgttgaccgaggaacaaaaggacgaaaaggcgcacctgcgaaaagtgcttcaagtggccggcaacgcggaaacgaactcgtcgaaacagaggccagaagacaaaacaggggaaaataagttcaaaatcatactgtattatggttacagaagaaattaatggtcttaaaggattaaaaacgaattcattgccttttcaggcatattttgcttggctatgtgacacaatttggcaatgttctttatgtaataataatggtaaaaaacattgtgaccataaccaccaccactaaatttaggatttcattgagcgcgctgtatctgactgtgaacaaacggtggacgcggtaaaaacatttctcttttcattgtcattggccatcgtttgtctaattgtcattttgtgtttgaggtgggccgggcacggcttgcttaccgtggctcactgttgtggttgaaaaagtgcagcgaaacattggaccctggcgattcgtcacacatggaagtgagaaaagcaatagcaaaatacaaaacaattttaccgaattatttaaatttaaatttaaataggattttcgtaaagtgcaacatgttgtaaagtgtcaaaagcaccgattggatcagctgaaggaggacatggccatgaaagtgggccttaaatatgatcattttcacactcaacttctgatcaaatgcaaaatattctttcatgtgtctgtgttgcaaagtgcgcgaaaccgcatcttggccgacaatttggaggagtacaaaacggcactgctcacctttcacagcgaaaatgcggctgaattttgtgcttcttcagaacaatttgacggattagaaagctatgaaattgatgtgttgaaagtgatttttaaaatgcaaaaagaaacaaaaataataatatttgaattaaacaaaaaacaaaaatttcattagctgattaaaaattttggtttaattttaattaattaaaattattattatagattcttaacgtttcgatcggatcagcaatggaggatcaacgcagatcacacacaacagacggagtgtcaaagccagacaaattgaacacttcgcgcccgtccagtgccagaagaagacaactttccgctggcagtgacaataccgagtgaataattaattatctaattagaattaatttacccttttaaaagattggtcgagctggaggaggtcgaacttggagtggaggcgtgcgacccgtccatgaaaagagtgcgcgaactgctccgtttcgaggacgatgccatgattggaatggcacaaccggcggaccaagtccgattgaaatgcccagcggctacatcttcggaaagcatcgggttgaacttgctcaagcattcctcatcttctacagcgaatctgcttgatgaccttcaacacggatgggactcaattggctgttcatctgcagcacttaacgatttagagcacaaaaagaaaaatgcagagactaaaagccaattaaattgtaaatggtcaattaattaggcattattgtttttgttcttcagcttgtgacttctttataaatgcgcaaagtgcgaaacactttaaacccgaaaaaagcggtggtgcacttttggaagaaatagaggtagcgagaaacattgctggaaaatgcatcactaatataaatattacggtagtataaagagctgccgaaatttaagcttaaatcgatattaaaagaatatactgtattcccattacggtatatttgtatttcgcgagttctaattggtttacaaatttttcaccagcttaagatacaaattaaccattttttatttcaaaatattatattctgaatatttgacaaatgaatttaggaccttttgttcgaaagctgtccttcaagtccaaatatgcacgaatttgggacgaataacaatgggaatgaacgaaaaagcttgctaaacattgtggacattggcgggggcgctgaaaatatgccgaaattggcaccagctgcaaatgacagcgcaacacacggcaaaaggagaaaaggtgatcggtgatagattattatggtttcggttattaaaatgggcgatgtgcgcgtataattacgaaaaaaacacaaaaaagcttccctcaaaaccaaaaatttaattaatttattgaaaaaaataattaggtaattaagattaatggggcaacgaacgcattgcatcaaatgaaaagaaaaagcgaattatttgatcgacagatgaaattaataaatggtccaattttatggtttattaatcaatgaataaatatatgcaaatatttatcaatcggtcctttctttcattcaaaaattcaggcgaaaatatgcaattgaacattgaagaaaagaatgtcctacaataaccgacgaaatttaattgtttattgttcaggataaacaacaaaaatttagcaaaagcctcatcatttggcgggcaaaaaaaattgtgaacaaatttgaaattactaaattctatccttagttttatttattctatatttagatatttgagagaatttaaagaaatttcttatgaaaaatcctttttatacccataaaaaattttttccaaaagagaccaaaaactaaattttaaaatatttaattcaaagcctaattaggacatttttatggcatttttattgtttttttagggtgggggtcggtttacaagggaacattccgagctgtgactaggaatttagatataaatgaaataccattggataggtgctgggtcgttacttaaaaaccatcataataagaaatcaatattcctttaattaattatatgattacaatttgaaattacatgagttaattacaatttgaaagcaaataattattatttaaattttctgggtaccttaagagctttccttgctttccttttatatgggcaaattcatattctcatagtcatttcgttttataaaaaaaggagtaaaaaatacagattagtattggagtatatttaaacaaattcattcttaatttcaattattatttaaattcaagaaagtatatattatatttttatttaatagggtttgttgaaaattttatagaataagaggaatgaaaattattaaatgaattgccaaatattaaatttacattgcttttatttttattataccatttattaattcatcttttaatgatgtatttccggcactaaatctaatgaattttttaatgacgtattttcggcaattaaatcatgtaattagttgcgcaaatattgattataatggtttttttaagtaacgcccattatgatggtttttaagtaatgaaatagcaccattgggtagaacagggtcgacttctagtgtgaatttttaattttagcggtgcattttgcctgcttcaaaagttatagggcctcaaaaatcgaaattttgtgcatgagggctcattttcaacttttttcacattatatccgtttttctccactttacaatgactgcttacatttattttaggcagagaaataattttaatgcatttttcatatttaaaaatgtattttctaaatttttaatttgctaaaaattaaattaaattaatttatttttacgttggattcgaacccggaccctcaaaattaggaatttaaccaactgagccaccaattttatgtgaaaacacagccaaaatttcaattttcgaggccctgtaacttttgaagcaggcggaatgcaccgctaaaattaaaaattcacaatacaagtcgaccccgctctatccaatggtatatagcttatatgcattttcccactcacagctcggaatgttccccttggttagcctttttcagactttgcattcgttggcctacgcgacgctgtgccgtcgactttgcaagctgttgctcagcgacctgaccagcgcggacaccatggagagagtgctgctggtcaagtgccaggttttgtggcagggaaggtcccaggatttcggcttacaattagacaaaaccaaccccatgggagatgtttttccttagtcgggacaattttacgaaattttttttgcaaattttagaaattacaatattttttttttttgcctaggatgagctgaacgcgtttgtacggcctcggggcgtttgcgttgagcgcgtggcgctcactcgactgaccgtgctcagacgggcggactcgagcggctcggccatgtcagtgctacgcacgttggcacgctcacagttcggccagcagctgttcgaccagttgggcacctcttttctggtacaaaaaaattttggcaaaattgaaaagttaccttactaaaatttccaaaacataggtaattgt

SEQ ID NO: 10727 - DNA, 1247 bp, Heterodera glycines
tgtgcatgtttcactgaacagcgaagggagcggaagaacggcgtgcaaatggccaaggaaaatttcgaaggctttcgattttgagaaggaaactggcgaaactgagaacaaattgctaaattaataaagcaaaagatgaataatgactctaccaaaatgaagcttctgaatatttgttaatctgaaaaaggaattcattaaacgatcattaagcaaaaacgaccgtatccatttcactctttgcccctctatacggtaattaattcattgtccagcaaatggtgccaaaagtgttcttaccgtacgctctgttccatcccatccgagcagatcagccaaaccttaagcaattccgatcattccattccccccccccccccaattttccgacaatgttttgcatttcttcgtctggccattcctgcatggaatggtccaaagagaaggagctgagctcgaccacatcgttgtgctgctgctgtcccccctcgtctttctcctcattttcgctgtcatattcttcgtattcgtcctcatcactttttggtccctcgccgccggcgaaatccgtcggtggaagaaattggggagaaaatgggcgcaatccattggacccattcaaatgattttgtggctggaaaatgccggaagaaacgcccttaaaacgccaacaattctctgctactgtccaattttcattttcatttcttcctccatttttcctttcattttgcccacctttttgctccttcggctgtccttttgctgctcaattttccataaattttgcaccaaatgtttgcattcttctaatgtttcggtacgaaatattctaagggcaggcgaatgttcgaccaattggtccgaaatgcgctgaatttcgtgttggaccatcaaaggactgcgatttttgttgttggggggcgattgagtcggaaattgagacgaactttcgctatcatcgaaaaaatcgaattcggccagaaattttttctttgagtggtacggctgacaattagaaatgttagcggatgaacggcgcctaaacgatttgtggtcgaagagagaatgtctgagcaaagggactgccactgaaaagagaaaatgccaaacgtaccggacaatttcggcatcgatttcgtgcccaattacggcgatcaatcgttgctccacaatgccaaaagggaaggactcgccgactcagtgcgaacaaaatgccctaacaattggcgaaataaattgccatc

SEQ ID NO: 10728 - DNA, 1179 bp, Heterodera glycines
atcgcccaaccatcaattatttttatttgtatttgtaatcaaaattaaatttcttaattttgatttaatttaattagcgtgttttcttctgattgaataaacacaacattcattcgcttcgcttccctttgctgtccttttgcccattgtttctcttttctttccaaccgtcttttttgttttttctgtcaatgatttcggcattttcaaagtcgcttttttgtcgtctcaatgtcaaaacaatgaaattgggccttgacaaaacaattgtaagaaaaaggtgaacggattttgttaaattaagcaatttatcccactctttacactgtaaaaattaattttagctccgtatggttcagcaatgttgagatgggaccgccggatgcggtttttcactccttttttgtttttaaaaacccatatttaagattttgggcattaccgaggcatacaaaagggacactaacccccaaaaagtgaaccttggcgttggtgcctacagagatgaccaggtcggctgcaagtattttatcccgaaaatcatttcaataatttttctttccttagggaaagccttttgtactgccgagcgtaagacaagccgagcaagagataatcgcagcgaaaatggacaaagtcagcttttcaattgcaaattgactctcccccttcctccgtccccaggaatacgccggcatcgccggtttgcccgacttcaccgccagtgccatcgaattggcactcggcaaggacagcgaagtgctgaaggcgaagcgaaacgcgacggtgcaggcggtgtccggcacgggcgcgttgcggacgggcgccgaatttttggtggacattcatttgcagacatttaatgggatggatttaaatgaactgactttaaagtactccagggtcgctgatcacggacatgacctttcattacgaatccaaaaatcaaaaatacgatttttgctttgaattagggctccggtgctcgtaaggtgccaaaaagaaggtcatattcttgattagtaatcccgtagcaaattgttattagtgccattgtttaagtaattgcgtaataattccaatttccctccctccccaaagtccaaatggttcccgcatcgcaaagtcgtctatcagccggcgcccacttggggcaaccacgtgcccgtgttcaagtgc

SEQ ID NO: 10729 - DNA, 1479 bp, Heterodera glycines
  unsure (1)..(1479): unsure at all n locations
gggggggggggaatcccaaaattaaatacttttcgtccaagtctttcaccgccttttaaaatagaactcattcgtgatcatagactcaaaatccagatttatcactctatgcttaacaagtgtccaatcccaatatgttttgaggctgggcgatgtgaagggcatggccgaccgaatcatcacaatgcgctcccaactccgcgatttgttggccaaggctggctccaagcgcaattgggaccacattgtcaaccaaatcggcatgttctgtttcacgggaatcagtccggaacaagtccgacatttctttgtgctattcccaatttccaatgattcaggtcgaccgactcgccaaagaattcagtatttatttgacgagggacggacgaatttcagtggccgggatctcatccaaaaacattgactatttggcaaatgcgctgcacgaagtgacgaaataggcgagcagtttatcaaatatgtcccaaatggccctcggaagtgctttaaagttatgcgatcgaatgtagaatagaacactttctacaggtgataagaacaacccgtgactctgcccccctttcatttctctgtttttacgtttcattttgtaatatgacaggtttatagtaaagaatgcattttaaaaagttttggatattaaaggaaaagcaaaaaaaagcaaacgactaaaaatttatcggattctctgtttgaatgcgaataacacaataaaacagtttaaaattgaggctgaataatttcctagtcagcgtttgtattcaaaacaaaaatgttaaaaaagcacacacagagatcaaaaggattagataaatatcatccacgggacgcgccaatggtcgaaattgttttgggtaaaccccgcccaaaatgaacctttccgacccatcattgtctgtttttcaatcccttgtttattttttagagggagggggggggggaggatcgacgcaccccttggacaataattaacagatatagaatcttaatttgttgtggcaagaaacataaaaacaattataaggggggggggggaagggagaatgttccataaaatgaccgggcattgggagaaaaacgcctctgaatgatgaggatgattggttgaacaaacatctcaaataggatgatgatagattgattacatagctggacacttcgaatcacattgaggattgatcatttaagctgacgccacattgaagccataaggcggcgggggttcagtgggcaccgaaaaactcactaaaaaggggatttataagttaataacagcgcattaaccagcacatttattgttttaacatcactaaaaaatgaaattttacacctttcgacctctaatgacataattaatgcttaatgtgttgttaattaagggctgctgcccgtttccctgttggtncttcgcgcgctagaaggtttacgcgtccctttcgcgctttttgtcgtaaaaat

SEQ ID NO: 10730 - DNA, 4897 bp, Heterodera glycines
gtcaaaatcaaaacatatttctcgggcaactaattactcttttaattgacctatcgtagcggttttaatacacttaaattacggtaaatccatttcaaattcgcagatgttggcccaatgcgaaaacactttgatgagttaagccgagagcttccgcatattttggacgcaaggcattcgctgcaaatgcgactgctgcggttgcgacaggcgcgcgacaaactgcgcgagtgcgaacggaccgccaaagtgcgttaaataacacaacgccaaaaaaccatactattttttgatttttggcggataaatttctcatacattaaataaaaaaacaaaatttaattgctgaattaagtttttatttccaactataaattaaggacggcactcgcgttgccctctgccaccaggcgaaacaggcgctggcgccggtgttgcaactggcgggcggcgcggaagcggaggacaaaacgggcgccgattgggaaagtgtggaaagggcacgcgaaatggtgggttttgttgtggcatgtgccggcccagccaaaattgggtggctgatcattgattaaatcaatcatttgcaattggttgattgatcctgcttagtccgatttgttgcctgagggagtgccgccggcgttccgcgccatcgaacaattggacttggaagcaaagtttgcgccggccaacgagggaatgctgctgctgcagcggggcgttcagcaggtggccgactcgcgcagaagcggtgaatatttgaatttgatcctttttgagcgattcttgttctgatactttgtccccttttctctgatcagtgcaaaatcccgtcagtttcctcattcccttgaaatttttccgttacggcttaaactcttatgattattgatcattccagcttatctcttttttgtcatgctactgatcaatcttcatcagtgagttgccaattttacctccgctggtctgaatttcatctgctgattgttttctctgatcagggaacttttgttatttgtctgatcactatactcttttgtctgtctgatcattgctaattgcttggctttatgcttcccttttacctctgatcagatgccaacgatcgcttgcacgcgttggaccgtacgctgaacgctctgaatgatcagctttcgtccacaattaaaggcattgatttgcgcattttggacgagcaaattgtggacccgataatgcttcaccgagaacacttccgacaagctgttcacatcgggtaagctaaagaactttaaatttaaaaattaataagccttaatttcctataatttagttggatcggcgctctcgtggttggtttttagtttaatatttcttttaaaaattctaccattgttttgatttgccaggtgtccggactgttcgcctttttggcattggcactttttctcggcctttgctacggctgttgcggtcggcagcccaacgaatacgaagatgactgctgcgtccgatccaccggcgcttcctttttttcatggtccgttcactgatcagtaaattgatcaaaattctgagcgatcaattatttacatcgaaaagaacttaattagtccaacccaacaaagcgaatgatcaaaaaaaggaaggcactgatcgatgatcattgatcactctgtcaaaatgcattagaaacttgatgatcagataattatttgttctttctcagctccatttggctttcgttggctttcatcagtgtgtttggactgctcgctgcgcttgccatgcttttcggtgccaatgtctcccatttggtgtgccgtcctttggaggagccgctgcaacggccggactttctttcggtgtgcaatttgcgagttttaaattagttgtgttattaccatacaatcccagctgctcgatcggtttgtccatctgtacggtttggaccgtccttcgtccgtctctccccacaagtcctccccgtccgctgctgatcacttctcgcttgatcagcttttctcggctaaccgtcgccctgctgacctgatcagcgagtgtgcccagaagcacactttgtacacaatgctcgggttggacaagaagttcaagctgatcggacgtgaaggtcttcaggacgactaccaatacttggttaatcgggtgaacaaattgaaagcgtcgatcattcctttttcatgccattttttttgggggggggggaatgaatcgatggcatttccctaatttttgttttttccatcctctacaattgttgattctctgttcagcaacgttccatcatggacaacctttcctctcatcagctgatcgatgaggcactctctcgcggcattgtgccggacgacccgcggctgagcgctcgccaatggcactttttcagtggaccgatgcgcgacgcattgcaacgccttgggcaagtgcggatgccggaatggaacagcagcgacgtggagcaggtaactaattgatcagcagagatttgtttagtttgtatggtgatcattagcagggaattcttccattttgggaccgatcgattacttaaaggctggacgaaattaaattccgtaattatggagttttttcaattattgaaacccgtattaatttggaggatgccaaatcaccgctagtcgcaatttttgcagataaatcaaaaaatgtttcaattgttatttactttttggatttttcaaattttgctttatcgctttctgtgactgtcttttcagttttgtgcccaacccaaacgcttcgctttggagggcgtcgtcgccggccttcgccaattgtcccaacaggcgcaagccgaggccaataatagcggcgtcgacggcgaaaaacccgcgggaactgtcgcgtccaatttctccgagttggacgcggtcatccattttttggaggagttgcggcccgacacggcaagtgaacggaacagtgatttaatggcatttacccgtgacgagagtgatcagactgtgttacggtgctgatcagcccttaaataatcccaaaaaaatcgggagaaattccaaaatcatcgagactcttgagcagcacctttttctgttcaaaaggccaatttccctaattaggtgcaaatgcgtgctcagctcgaaggcgcgtgtactcagttggagcagctgcagagagaagtgaggcgaataaacatttaaaatttctacatttatccattacttagtctaatcaatttgctcctacatgctaattgcccctaattatctcattagcattttcctttgcgcagattttcgcgttgcgcttcaacgcgtcccttcttttggaacatttgcagcgggcggaaactgaactgagcacaaaggaccgactgcgcgcgcaattgcaagcggtggcggcggaggtagcggacgaactgttggagagagtgcgcatctacgaacggcacgtcaaccaatcggcacgtcattcaaaatgctttttgccctattggcactttttcacattctggcattttctgtagatgaccagcgaagtgtccagctgtgccccgttggcctcaattgcgacgaatgttcgcctcgccctttgcgattacgcgttggaccctttggtcgctttttcgctgattttccccactttatcagttcattcgctttctcagaattccctgtgggtggcgatggccgtcggcttggcccttctccttccgatcattttgctggccacaactttgaacccgctttaccagcacatccatccctacctcaaatagtcagtttcaacagtttaatattaaattcgaaagataaaccaaaatttaaaatcggaatttcggcttctttttgttgtcggcttatttcatccacgccaaacgctaattgttttcaaatggatttaaatttaaatgttcattcagtccgctgctgcacaccggcaactcgtcgcccagtcacgacgcgttcgccaccgacatttacgcgatggtcggctcgcagcagcagcaacagtaccatttgctgccaacgcagcagctcaaacacaacgggaacaagcagtacacgacacaacaacaacagcagcaacagttcacctcgccgtacgccacctccaactacggttaccacgagctgacccatccaccggcctacagtatgagcatggtcggcggcggaggcacggggcaacgacgatagacaatggagatgaaccaacaaagaatggaagccagaatgaacaaccatgatcacacagttattttcatgtagatatgaggagttggagcctatctcttgccggaaaattgcaaattcattgtctggagcaaacaattttccagagtgaggaactttgaaaaagcacgggttaggtccgggtttccgagatgaaccggaacagaattccggattgaagtactgttttaacatgatctcctctagtccaaagcgtcttttaaaacatacataactctgagccaggaccctaaaacactaaatctttcggttattttctgacagatattttccgattggagccgaaaacccaataaattgaatttttgatctaaccgtcccaaagaaatttcaacacaatgctttaccgttctccgactttttgggtagggcagtttctggagatttaaaaaatgtccgtcctattccttttaaacgaaatgccatttaaatttctttatgtttttatcattgcttattttccattttgaatgatatgtaaaataaaaaaaaattatgaatccaagcgctgataggtatgtaaattcttataaaatgctgtgaaaaattaataaggatatagaaaactatttttgtccattcggtgccttttttgatttctcatttttatttatgtatgctccgcccattccccaaggcttttttttctccccccc

SEQ ID NO: 10731 - DNA, 2911 bp, Heterodera glycines
cgcattttcagtttcgcaaatttcgcttttcgcatttcgttttttatttttcaatttggcccatccctggtataaacaattaattgatatttgtaaatagtatctttaacatttataaactaacggaagccagttaaacaaattggtgcagcattttgtgaaaatttgattggctttttaatctaaaatattcaaaattaatttatttattttccagtaatatattaactttaattacggtaaattaatattattttatttttttatcaataataaattactttaattacgacaatgtcattcaaaagcagatgtgcttcttcaaccttttgaaatgcatctaaattcgaaaatgttgtgattttggatgatatttaattgcttcaacgccggatttatgttgctgatttgaagcattagcgctcccatatgacacaaagagtttttctgtaaattattaacttttaaaacagagcggcatcaaattttagcacaaatttttgggcaaaaaatttatcttttttgttatttctaatattaaaaatttgcacaaattttaacaataatcaattgtgatctatgaattaaatttttaataaaattttattaagaaaaatgaaattttttatatttgttaatttttatatatttataattaattctcacccatacataccaaaattttcttcatcaacacaatgcaacgctgtcaacacatgccggggcccaatgattgtcgcagtgcaagaaccaacaaaatattaaataaaaattttcttggaatttctatattttcaggaattttttttcttgaattctgagaaaaattatggttattgattgaatggtctttttttccttaatttgctctcttttacatgatattatttgatcctcctactttttaagatatttttaaaaattgtttatttaaagtaaaaaataaataaacctcctccactgaataaaagttgtgccatccactgcaatgatttgtcatccgtaattctttttgttaattatttaatttatttacatttttcacaggattgtgtcgatttccatttttggagcactgggaaattcgggttcaaaatcggaaatgccgcattcagaaaagtatgaaaaatgctcagcagacagcgaaaatgaattgtatccgatggtaagcaaaagaattgtcatgcaaagtttggacataatttctgaaaaataatttataatatccgaaattattgaagaaattaaatgatttaatattaaatgcattacattgtaatttaaaaaataaataaaaataattttaaaaagtttaaataaaaaatgtatttataagcaattccatttaaaaggcaattttaatgaaagaattatttgtctaatacataaatgttttaattaaagaaattagaacaagtgatgaataagcttttttcagctttaacaaccttttacaagcgtaatttcgctaattgcttttctattccacaaaaaagaaaaattaatgttaaaaataaaaataattgttgttaaagaaactgataaaaattttttattgctattttatgaaattagaatcataaaggaatttttttttgtctatgattgaaaacatgtgtaaatcctattattgatttttatctgtttggatattccccattttttcataataaatggaattttaaaattgattttattaaatcgcacgtgccagcacttaaagggtcgtcgcgggtcggatcaagaaaattgccgagtcgtgcgtggtttggtcgagacatttcgtaaaaaatgggtaaggattcgagactcaattcgagcacaactttaatggtcatcaaaactcaacaaatttatggtcaaattgaactagtaaatcaatataattttcttaaatattttaagtgaaattttgcaaaaattttcatttttgttttccaatgttttctttatcttgggatttttataatttaaattgccgaaaagaaaaactcgccatttttttcgcttgttgggcatatactcagcaattgtgcctgaaaaatccatctccaaaaccgcgtgattggtcaatggtcaaccctcattattctgcccaaaaaatttaaatttactcaaaaatttatgagtcctttttgaattcctgtgctcaaattaacttattttgtttagaattaattatatggttttattttttctgctttctttttttagattcaacaaattcaatcggccaaactgagcctccgaatcaaattttatgcccaataaaaaaaagaataattgaacagggcaaaaaaggatatttttgttggttgaccatagaatttccaatcaatttttttcgaatttgaatcgctaatgagtttttgctgatttgtttaattgctggcgaagttccatctaaaattggtcccaacataccaaatgattttttttttcattaaaaataacgtatactcattttcttttttgaacccttattggtgaacacttctcatcttttttaaaattatttcagacgtttcacgctcatatgccgcaaaaatttcatttaaaggtttcatttgattatttggtctttttaatttgttgtgtttgttatatcttttttgtttatgctttcatttccttaaattgtgtaaatcaattaatcttttaaataaaatatattatttttaaaagtaatttttaataattcatcggttttcgacaaattaaaaattgtaaattcttaattatgttataaataaatatatttgaatcttgccttcatgagtataatcgtgtttcttttgttcggaatgtttaaattggtttccaacaaattcgactccatcaattttgggcaaattaatgatcggcgaaagtttacccaaaattcgtcatcaagataatcatcatcaattat

SEQ ID NO: 10732 - DNA, 3250 bp, Heterodera glycines
  unsure (1)..(3250): unsure at all n locations
tttttcgcttgttgggcatatactcagcaattgtgcctgaaaaatccatctccaaaaccgcgtgatgggtcaatggtcacccctcattattctgcccaaaaaatttaaatttactcaaaaatttatgagtcctttttgaattcctgtgctcaaattaacttattttgtntagaattaattatatggttttattttttctgctttctttttttagattcaacaaattcaatcggccaaactgagcctccgagtcaaattttatgcccaataaaaaaaagaataattgaacagggcaaaaaaggatatttttgttggttgaccatagaatttccaatcaatttttttcgaatttgaatcgctaatgagtttttgctgatttgtttaattgctggcgaagttccatctaaaattggtcccaacataccaaatgattaatttttttcattaaaaataacgtatactcattttcttttttgaacccttattggtgaacgaacacttctcatcttttttaaaattatttcagacgtttcacgctcatatgccgctaaaatttcatttaaaggtttcatttgattatttggtctttttaatttgttgtgtttgttatcatcttttttgtttatgctttcatttccttaaattgtgtaaatcaattaatcttttaaataaaatatgttatttttaaaagtaatttttaataattcatcggttttcgacaaattaaaaattgtaaattcttaattatgttataaataaatatatttgaatcttgccttcatgagtataatcgtgtttcttttgttcggtatgtttaaaatggtttccaacaaattcgactccatcaattttgggcaaattaatgatcggcgaaagtttgtcccaaaattcgtcatcaagataatcatcatcaattatgtgcttatcatttttatgttctgtgccagcttctttttgtattgttttttgactgttttcttcattattaccgtatacaaagcataaaagcacaattaatatactgtaacgcaaaacggagcaggccatttctgtaactgaaagaaaagaaccgaaaaagtttttgcttaaaataaaaataatttatttttaatattttccaatttctacgtgttctaatcgtaaaataagcccaagtgaagagcaaacagaagaaagaaagaaaaaaatttgcaaatttttaatgtatgaattgatttaaataaatattaaaataatatatttccatttttgaatatattgatcaatttattgacgatttattatgctcacatttattttatagttttattctttttttaattaaatttgattttttagccaaaattatcgcgaggcatacaaaaaattgttgaagtgcacctcatcatcagcagctgttggaccattattcgcaaattgagaaaagttgaggaagaaaaatgcaatcattttttgattgggaaaaaataaaattgtcttgtgaatttcttttaaatttcttttaattgtattgaatttcgttttaaatgaaatttgaaatgtgcaaatccttgtggttcggcaccgagagaaaaaattaaatttttaatgatttttttttaaataatgaattaaaaaaaaaattaaaaaaaggagacaactaatatttttgcatttacgtaaaatttattatcacgaaaaacttttcaaattaattattaacatggaaatagcaaaaaaaaaaaaacttatcgatgtccaaagtaaaatctgaaccatttgtgagtttttcctacattattgttgcctaacttaaagattttctgaaaaatccttaacaaaaatttaaaaaaaatacacctctaagaatttacccgaaaaaaactgagaaaatacacctcaaagaaatgagtgagaaactatcagaaattcatcccataaaattttattgttcacatgaatttttggtttaaaaattccattatacgaaaaaaacattaaaatataataatttcattttcaatagaaatataaccaacattaatttcatgattaatttttattcaatttgctacctaaattcgttaataaataatttatctagttttttaaaatctattttcgtgtttttatacatgtttattatttttgttttgccatccatcacttccgtaaacaacattattaatataattttgtggcatataatttttgtctattgattttcaataatttatccggaaatatttgtttatcgtccattgaatacgggtggattagaaaaacaatataaaatagtataataatattttagtatgacataattttaatgaaattttattttgttcacaatttctcaggaattttctggaaaattaaaaatctacttcaaaatttgtaaatcataaaatgcatacgtactaatattaattttgctaattgtccataaattatattctaaaaaattttttctgcgtattaggccatccatcgcaaactaaaaaatgctattttcagataattttacaattttattttataaaaagaaaaaatgaatattgaaaacgctcacaaatttttttgattttaattttgtgcattcgtttttcggaaacggcacatcccaaaaatgcatctgctggaaaggagattagttcgtcaagtttaggtgatattaaataattatcgctaaatcaaaaatcaaaaatattcaattaccaaaaattttcctttttgaaaaataatcattaaaattttttcgattattccataattctgtgcaaaaatcgtgctgagtcgtttcctaaaaaccgccaccatgggcgtttcctaaatccgccaccatgggcgtttcctaaaaaccgccacccgaagtgaattaaagacaataaatataaaaaatagttattgttatacaacatatataataaattaatataaatctctgtatttttaaaagtttcttattcagacttttgttaatgaacattcagcactttcatacaaacatttgcaaaagtttttgtcgcaatcgtatcgttttatagatttgtttatatagcataaatcatggtaataacagcaatcatcgactatattattaaaaaatgtataataaatttaaaatactttattaaaccttttttaaagttgcaaaaccatattactggtgctataaagcatgagtcaaaaaatgaagtgccacaataagtgccacaatatttctttgcaactttcaaagggaaattctaattaataaaaaaaaaaaaaa

SEQ ID NO: 10733 - DNA, 1313 bp, Heterodera glycines
ccccttttttgaccatgcccaactcggcctcaaattggcacttctttcgccacgtttcgatgttttggtggacaaacatttcgatggcaaaagcgaattgacaatttggaaacgaatcacaattcgaaaagacactgacacggaaatgccaaaactgtctgtgtttattggccatgccaattcaattgattttccattgcccgaccgtccgctgcccgacaaaattcgctttcatctccttcatattttgtaaattcaaatattctatgtacaaaaaaaacaacaacaatttatttgtcactttcaggtacattgattattttgtgctcgcttttctccgtgccaatcagcaaatttttgacaaaagtggcaccgaattgtatttgttggtttctctttcacctgacattgctgcccagccgatttgggatgtttttgtccgtgaaatttggcccattttcgtgacaaacgttcgccaattggacattcccgacggggaacatttggacaatttgcgtcgccacacttcgccgacaattctcactgatctcaatcagctgacttcaatacaatctggtgatctgttccccgatgggaatgatgatccaaatgcaattccaactgctggccaagcgttgtccaaatggttgcacactccgacaaaagatggccaacccaagcgattgatatatataaattacggatcagaaaacatttacgaatggatcgacagtttcaaagcggtcaacgggactaatcatttttatgatttcaattaaaatatttggattaattggcatttgcttttcgtttcccattgtttaggcatttctccgtgccaccacttctgcctgctacaaaattcgaattgaactttttgatttaatggaatttgagccatttgaattggtgaacgaacggactaaagaaatgctgatactggagaaagaagccgattatgaacaattcatttgtagtgattggctgttgaaacgatgccaaattggggagacggcggcgattcagtgggagtataaaagtcggcacaatttgaactatgtcaacttttggctttttaaggattgcattgggtgagtttgatgagagaaacagtttttgctttaataatcaaatttaaatcacacttcctcaaggccgttatctccaccaaaggcgagtcaacagaatgcaaaaagtgatctgaaaatgattctcgggcccagcgaaagaaaaagtgaatggattagtgggaaatgaaaaatgatcgatcattatgaaagaatagtgatcggataattgcgcctcacatttat

SEQ ID NO: 10734 - DNA, 3145 bp, Heterodera glycines
cggtgcggtgaattcactctgaataaaagactaaaatttcttttaatttttttatgaaaatttaatttaccagcacagttgtttttttaggcaatgataagtttttcagaaaattttcaagaatttttacaatatttgtagctaattaatgcccgataccttccgttcttttattaacgtaattccgttattgttctctttattactaatcacaattacttcttttgacagttgtgggtttaaaagatgattctcaaatgatgggttgccgacttttgagtaggtgcgcatgccggcggggtcgacaggcccaattttaaaaatttagaaaaccctggtattattttcataaaaaaaatttaaaaaacctcaaacaatttccaaaaatttattttaccatttaaatgactacgatacaacacacacactcatgcgctgagataaatacataaaacaacacttatttacagtatgagacaccatgcaaaccgataatacagtacccatacactacagtgcataagaatagggcggaaaaagtttaatatttttgcgaaaaacggctaaaaattttgtaaaatacaccctctaattcgggatttcaaaaaacgaaaaatatacccataaaaatcgaatttttcgttaaaattctgaaaaattttcctcggcggcgcttatcggcactgcccgcccccaaaactcctaattatttttaaatattaactccaaatcttagtcatttttagacaaaatcttatagcaaattgcataaaattttcaaaaatttttccggcggcgccgcctgacaaccccctatcttccccagttttttggaaaaagcacaccgcgaaataagctgttttaaaaatcaaaaaaatgatggtcgtcaatttatatagccgggatgggatcccttcacaaatcattcccaaaatcaatcctcaaaattcaaaaagaatgaatttttacgtcacaaattataatttatttgcctttcggcaccgccaaaccaggacaatctttttaattttgttttaaaatggcttctaaaagggtgagatattgataattaatgaaaaaaattttgaaatttgcgaccacagctctgaatctgccatttttacccctatttttgctatttttctcccggtttaggcccatattttgggatttccactagagaccggacaagagggtaggttggtcggtttcggtataaaaaccgaaaaaaaccgaaaccgaaacaaaccgaaaaactcaaaaaattttcggtcggtcggtttcggtataaaaaccgaaaaaaaccgaaaccgaaaaactcaaaaatttctcggtcggtttttttctcggttaaaaaccggaaccgaaaaccgaaaaataccgaaaaaaaaccgaaaaataccgaaaaaaaaccgaccggtccgatctcatttccacctcaaaaaacatgcagatcttttattctgatcataaataaggatgctaattttatgtaaatacatacttttttcctagattctccatagcctaattagtaggaaaaacactttctttttttgtgtttgcgaacaaaagttgggacttttatttacattttttacatattttggactttttcgtacatatttcgcaatttttcgtacatatttttcatttttttacatattttgaggatttttgagaatttatagaaattttttgtaaaaaatttaaaaatttttttttgaaaatgtatccctaaaaaatcgatttttttcaaaaaatgatatatcaaaattaattttttaaaatactaaaatgtgatgctaagcctattttggtcatttttatggcattttgtgcctatttcactttttacgaagaatttttttccaaaaaataaccattaaaaaattttatttacatattttcgtacatatttgggggttttgtacatatttcataaatattttagctttttttatacatattttatttacatatttcgcaaattttgttacataaaattagcatccctaatcataaattaatcttaaaaatttatatatagattgggtttttaaaaaaaatttttttttttgaaaattacggattacgtattacggattacgccaaattacggtctttttggacctccgtaatgacggattacggatggccgtaactgaaaaaattgccgtaattacggattacggatttccgtaattgaaaatcagttaatccagccctgctccccccccccccccccgaagccaaccaagggtcgggctacgccctctgattcgacttagatttccatccctagtaattaatctgtgaatgctaacttttcttttgaaatggaatttaatctgttagtgctgtccgtctatgaacagtttagccgactcaataagggaagggaaaatgttgaaaggtcaagcttaataaatgcatttaaaattatcagaaattaagtcttcaaaagttaatttaaacaaagacaactgtaaattaaaaatttaatagtttatttttaactaatcattttagtttattttattttttcaatttcataattaaaatttgttaattagctatttgtttagactaaattaaaattatttttcaatggcaccgcccgtcgaaaaaaagaaaaaactttctttcgtcgaccaccgcctcatttcttctgcagcttttggtgaaaatgaacagcaaccgatgggttcactcgtgacatcaagcaaaatgaaaagtcctttaagaaaaatgtgtgcaaaacttttggaaaattcattcgattgggaatttaatattaccatatttcccacactaattagagcccccccccccgccactaaaacaaagcccccctttataagaaggttggaaaaagagccccggggctcttttttaggaaatacggtaactcattgtcaggccaactaccgtagttctccgattattcgactctcctcaagtataaggccccgtttgaggggagttgaagaataaaatactcggctctaataatcgcggagaaacacggcaatagaatttttgaacttttcagttggatttgtagcgatgttttgatggacactctccccttttttgaccatgcaccaactcggcctcaaattggcacttctttcgccacgtt

SEQ ID NO: 10735 - DNA, 2965 bp, Heterodera glycines
ggggacgggacgaaatctcgccgccggaatctcgccaccaaattttttaatttttttcaaatttcaaaattattcaagaaaaaataaaaataaattccaattttgattaacaatttttctaacattgcacaataattaacgggtcaacaaatttaattcatctcgcaataacatcaataaaattcccattctattttgccctttccattcttttttcgacatttgagggtcgtccattgcctttccgcatccccaaaactaatcgtgtggggagctctcaaccaaaacctttgaaccggtttttataagcatttctttgagcggctcgttctgttggaatttttttcgaaggcctcgcatcatcagattttcacagacacctcgccaaatgacaaaattgaagcatttaatccggttatttttcccgagttttaatttctgccggagtttttgccttcataattgaacaagctgcttcaaagtcgcggaaaaacaaagctttttgatgctgataaaattgttcagtcgacgaataaatgatcccatccaattcaaaggcacgttaaggtttaaccatttccaatcgcaggcctcctcgtggccacgtgctggaaactctactatcttttttttacttaaatagagaggctaatcctagtcgaaaagcgactaggaagcgaacaaatggttgttgattaaatttaggcacttgagctgggaagcgaatttgttaaatttattttttcttgaataattttgaaattagaaaaaataaaaaaaaatttggtggcgagatttcggcggggatattttgtctcggcgagatttcggccggcgagattttggggtgcacccatttactttatatattttcgaatcaaatttgtttaaagacttctcccctgcataattttcgaaacattttatataacgaaataaatggcgaataaagaagcctttttttcaattttcatgcgtttcttccatttttctccatgtcaaaagtttagaccctcggaaataaaatcttctaattactgttattaattaatttaacttaggtaatagtttagacagatggtagccccctttttcaaaaaataaaaattttgaatatttttttcgtgaaaagattattttaagggtttagggggtcagaaaaccgaatcaaacatttatttcgacttatgtcgaaccccgaacctggatttgaaagaaaaagtcgaaaattcaaattttcgaatttcgcatttttggtctaaaaatggttcaaatgatcatttattagtagattgttggcttttactttgtttccatatgtataagcaattttaagaccaaaaattcgaaagtttgaattttaaactttttgttcgaattcgggcttcgacataagtcgaaattaatgtcagattcggaatcgccgacccgctaaacccgtctcgaaaaaaaaaattaaaagattttattttttgaaaaaggggggctaccatctaaactattaccttaacttattttcatccctttataaaatgacaatttattgagcggcgaaaagttaaaattttattttatcgaagaccattaaaataggtggtaaaaaatggtgattgtaaaggggcagaggacaaacacaaagaaataatgagcggaaaaagaattaaatgggtatttggattttaaatagagaaagcagcgacaaaagcaaagtgaatcagtccaaataagcataatgataataaaatatcatgaggaaaatggtgatcaattttcattatacagtaatcattcatcatcataacacacatttcttccaccaccgcgcaactgtaactgttgccgaacggacagttcacgctgcaacgagtcgatcatgtccagcgcgtcctgcaggcgttcacgcgcggtttgcagtcgcccgaccaactccgcgtcggagattccgcgcagcgacgaagtggaagcagttgcctgtgtgaaatttgaaattaaatcatgtattttcattggttaaagattcgaaaagtgatgaaataggcaaaattaaaaagaaaagttaaatttggccagcccgccttcaaaatacggggcacaacaaattcttcagactcaaaacaaacaaacacaccaatgccgacgacggcattcgtctggcaccgcggctggtggtgctgttgttgttgttgttggtagtgctgctgccattttgagacgaagcaacacaaccgcggccaccaccgttcatagtgccgctgttgctgccgccgttggttgcggatgatgatgctgctgcaccaccggcagcagcggttgcggcggaggagaacaacaccatttgatgaagacgctcctggctgctcaccggcgaattgaactgctcgccaccactgctacggttgttgtgttgctgacggaattggtgcggctcggtggcgacctcaaattgaacattttttttaaaccgaggatcaaatgcaaccagcacaaaaaactacctgctgctgctgggaagacatttgttgaccgtccatgaactgttgtgcatcacctccaaaagcatcgtcgtcgtgatgctgactgttgttgctgttgttgttgtagtacatcagctgttgctgctgaactccacggtgcggctgctgctggtcgtggtgcgggttatgatggttggtcagcaacagtttcaacgagtcatgcaacgacgtctccaggccgggcgacaactgctacaaaaatgatggggttttactagtaaaaaatgttcgaacaaaaaatatgtgtatatttagttgtcacccgccctcaacaaattgtccaaaaagatttaattcaaaaaacagaaattttcaaaaaaaaaaacaattttttttgttggaatttttaaaactctgcacccaaatcggactttcatcagacttacgggatcgggaatttccgtcttaattgcttgacgagagaggcgcct

SEQ ID NO: 10736 - DNA, 1131 bp, Heterodera glycines
ttatttatttttgtccaaaaatttttaaaaatttttcaaataccgaatttttaaaagctctttggcaaccaaatttttcaataatattggtataactctttagaaaatctagaaaaaaatattttatatttcttaagaaaaaaacttctaacaataagaaatttagaattaaaaaaattcatttcttaaaaaatagggtggggacacccatttctccccccattgtgcgcaattggttgcgtcttgcttgcctcatccgcggatgtcatgttgcgcactcggccacgcttgtgaaggcgcagcgcagtcgcttccgcggaatccgtctcctcccactcctcgcggtacattggtagtggtggcggtggtgccaatgccagcgcggacgcgtcaccgccgctcctcttggcacagcctccgctgctaaccaccacgtgctgtctgccatgttcatcatgcacattttgtgggtggtgatcaaccggtcgcccttgctcctccccctcctcatcaccgtcgttgaacatcacttgttgctgctgctggtggtggtggtgttcgtcgtcattaacatcaatgccctcctcctcctcatcagcggaatagtcgcacttaaattttttttgttgattccctttttgtgaccatttaattgagtcgtaccgaatgataccaactataatttgaattttgtgaatgaatttttgggcaatggttaagaattgaggtccctaatttaacttttttattttggacgcaaatgcagtttctgggtgttttcgagggtgatgattatgaatctgaactcggatgtgcccaaatccgaccccggacccgaattcgaacaaaaagttcaaaaatttttttcaaaaatataagttataaccggtcaaattttggcaaaaattgcgcatttttatccaattaacaattaaagtattgttttacatcaaaaaatagttgctaaatgaattagaagcttttactacaagcaaaaatttaattcttggaaaaaagtttcaactttttgtttgaattagggtccggggttcggaattgggtaaattcgagttaagattcgtaatcagcaccctcgaaaatccattaaagttggtttcgagcccaaaataa

SEQ ID NO: 10737 - DNA, 1448 bp, Heterodera glycines
cctgttttgaagctaagtcggggatctgacggctaatatgaaaataaagtgcagttcgctctttaaacgaacctgattttatgccccctttctataaagcaatggcggtcgctgtatgaccgtaaacccagttttttgtatagaaaagggttgtccaaattgcaaatggatacagtatctgatttatttcacaacgccaacacgccgttgaaaataaaaacacaagttgcatgtgatggcaaaagttgtgaaattcaaacgcattttacggccatgaattgccgggaagtgaggcgatcaaaattcataatgatagagaatgtgtggctttacctgttttgaagctaagtcggggatctgacggctaatatgagaataaagtgcagttctctctttaaacgaactgattttatggccactttctataaaggcgatggcggtcgctgtatgaccgtaaacccagttttttgtatagaaaagggttgtccaaattgcaaatggatacagtatctgatttatttcacaacgccaacacgccgttgaaaataaaaacacaagttgcatgcgatggcaaaagttgtgaaattcaaacgcattttacggccatgaattgccgggaagtgaggcgatcaaaattcataatgatagagaatgtgtggctttacctgttttgaagctaagtcggggatctgacggctaatatgagaataaagtgcagttcgctctttaaacgaactgattttatggccactttctataaaggcgatggcggtcgctgtatgaccgtaaacccagttttttgtatagaaaagggttgtccaaattgcaaatggatacagtatctgatttatttcacaacgccaacacggcgttgaaaataaaaacacaagttgcatgtgatggcaaaagttgtgaaattcaaacgcattttacggccatgaattgccgggaagtgaggcgatcaaaattcataatgatagagaatgtgtggctttacctgttttgaagctaagtcggggatctgacggctaatatgagaataaagtgcagttctctctttaaacgaactgattttatggccactttctataaaggcgatggcggtcgctgtatgaccgtaaacccagttttttgtatagaaaagggttgtccaaattgcaaatggatacagtatctgatttatttcacaacgccaacacgccgttgaaaataaaaacacaagttgcatgtgatggcaaaagttgtgaaattcaaacgcattttacggccatgaattgccggcaagtgaggcgatcaaaattcataatgatagagaatgtgtggctttaactgttttgaagctaagtcgggcatctgacggctaatatgagaataaagtgcagttctctctttaaacgaactgattttatggccactttctataaaggcaatggcggtcgctgtatgac

SEQ ID NO: 10738 - DNA, 1305 bp, Heterodera glycines
cactttaggagtgagcaatttttagataaatccgttttcaattttatggtcttgtaaatttttcaagaccaagaaaatcacaaacacaaagtgattagacattcgtttatcattttcttttcactttagggttgccacgatttgatcaaggcgtacaaagagcagaaggctaagcaaatgtaaataataccttttaactaaaatttaaaattccgacttttcaagccacacttgtgccgagtctgacattgaacgtttcattacgaatgatggtgacgaggaaatcgacattaaggatgaaaatttgaagaagaagcgacgcaaaaagaggaaagaacggtttgcactttcattttttgaaaaatgacagacatatgcgatacacattatcagacagttgcatttctgcgccccagatttattagaaattcactatagatcgaaatttccgaatggccgggctgatacttccaaaaaagacttgttccgagtctggtctcataaaaagcggatttttctaaaaaaaaacattggttcctgtaaaaaaaaccgggcctggcctgtctctatcgctaaaaattcacacacttttttccatcaaaccaaaaaaagctctccagatttatttattgcttctaacggcagtatttttatacattacatcgggcagcaaaagttaacgcacatacctaactaaaaaaagagatttttttggtaatttctaaaaatagggcgtcaattgtttgaatcacaaatatatgggatatggtacattaatgatagccgggtactcattatttaaaattctctttcgttcatctgaaatgcatttcatcgggttccaattttatttaacccatttttcaaaattgccacagttctccatccgcgtcaacatcatcaacggtcggcaaacccaaaaagacgaagaatatgcggtcggcgcgtgacgagaaaagcggcggcggcgatggcaataaacggcgtgccaaagtgttggacgaattaaaggagaggcgacgcgcaaaacgccaacgcgaagcattggtaaaaccgaaggtggagaaggaggagctgcagtcgcccgaagcatccgctgacgaggacaatgccatgtaaacgcttcaaataacaaaaatttcccacacttttcccggtttaataaatgcaagtaaagtgtcactttttgaattactcgcgttttttttcatttttcccactatcaagccaccaaagtttgttcaccagtagagggctgatgtcccaagggttacgtcacaggtgcgcctatgcagggacggcccc

SEQ ID NO: 10739 - DNA, 961 bp, Heterodera glycines
ccccccccccccaagaccccccgggtccaaaaatttttaaggaaaaataatattttggctgaaaattttaggttttccttgctgggctggtacccccccccccccagacctagccacacccaaattttccaagaaatgtcgctaaatttttcaaaaaatccacaaatttttaatgaaaatctgctaaaaatggctcaaaatcacaaaatttggtcattttttggacaaaatctgttaacaaaccgcatttaaaaccgcaaaaattttcccggcggcgcctaccggaccccctgtcccccaaaaaatttttttggaaaaaccgcgccacataaaaaacgggtgtgaaaagcaaaaaaaaaggtcgtcgcccggggggaggtgccccccccccaagccaaaatcctgggaccgtccctgcgcctatgccaaaaatcggtttaaactgaagcgaaaatctgtgcacgcggtcgcaattggcccatatttctgtgccatttggcatagccataccgtatttcctagggtggattggtttaggaaatgcgatattatggatgccttgatgatatactcgccatattttatgtctgtgaacgacatattttctaggggtagggatgcgtgggtcacacccttgaccccccgctcgccccgcccaaagaggggaaccggggggggggggggggaggcggttgaccctcccatatgcaatcgtttgctagagggaacaactgtgttccagtttcatcatcattcccttttcacccgtaaaaatgcagctttatttgggatgatgacataaatgtgtcgggagggcagggggaatggatgggtggtggctgatgaatggtaatgtttttcacacatttggtccagcgaagcaaaaagtttttttttctcctccctttcgcgggcggtgtgattcatcacaccgcatagaaaacatatttttcatggcaaa

SEQ ID NO: 10740 - DNA, 5452 bp, Heterodera glycines
aggtttctaaaattaaaaatgacaaattttagtataatttttacatatgttcttaacaagaaaattcaatcattttataaaataaatccccaaaaaaatcattaaaagatattcctaaaaatattttagaaaatgcataaaaaacataatatcatccggtagttttaagtttaaaaaaatatttttatttatttttgcctttttcgcctcctccctcaaacggacggattctttcaaatcggcggccaaaaattgacttttgatcacttcaacagggacagagacgacatcgaaattgtcgttgtgtgatttttgttgttgtggagtgagtgtgattattgccattttgaagagccaacgacggcacaacagaaatggttggaatatttaaaaatttgaggattacttgatctgtcggttcttgacgggttttgtatttaatatgcaattataaatattaatagttgggcagctgagaatttactcgagagtagagaccgaggaattgatcacgagactcgaggtcgagaatttgttccaatgctcaaaacactgagaattggtctcgagacggaggaatgatccgatgaaaccgatattgattacaatgctcgaaactgagaatcggtcccgaggctcgagaccgagggatttgatctcgagattcgagatagacattggatcccaaagctcgaaacagatatttgatctcgagatttggtcccaatgctcaaaagactgatacccaaaagcctagcaattttcagactcgagagcctctcgagagtctaacgagatcacctattgtcctgaaatttctgttttaatgcgaaaaattttgcttttctgaaagtgtcagattcgtaatccgtgaccaaaaaaccccccggcaacaaattttcattattaataaaccaaaagagtcctcccgtttgttttttttaataaaattcaaaaccaaaatcgtaaaaaactttgataatagcgcgctactgtcaaattagcacatttctgaaccaattattggaatatgttggagcccgcctttgattataaagcattttcttaaccccaaaacattccattcaaactctgatcacatggatagtaaaaaaaacggtgaaaaaactgcattaatccaataaatcattggtagcgaaaataaaacgcgaaatcatttaattgtgaaacagaagagtgtttaaagtagaaaaatgttgatttctaattcttatgcatttatttctctcggggttatggtaaaaaaaacaataataatttccgatcggcagtggtcaaaaaattacacatctatttttagtgccgaggctatgttcttcaaaaggttacaattgatttatttattaatgaagaagaaaaatgccttatttttaatcaaatttgtttaaattttcatttttcccctctcaatggcattgaactttctaaattagaaaattcattacaaaaaaaaaagaatttttttgtgtaaaaaatttttaaaaattcgattaaaattttctaattttctttccacaaagcccctcgtcacctatttcacaaagaatttttaaattgtatgcgtatgccagaaaattggctatctctttttctgagcaattttgtgtccctcaaatgctccctagaatcataaatttcccaaagaaagcttcggtcatctactcgataaattctagtaacaatttgtgaaaatactaaaaaattttccaggcgaagcttttggcgccgctggcatttccggtctgcccgaaatttttttgaaactaatgatgcaaaaaaataaataaaaatttaagcagtgcttatgaatagttaattgataattttttttttttgcttcaatttgtaaataaattaaaatgatttttaaatgaattcaatgcaaaaaaaattgcatgccctttctgccgttttttttaatattctgccattttttgctattattttcaagttcggcactcctattttggacttttaaccgagtcacaaccaacaggatggacataattacgaattacgtattacggaaattacgctttttggactcccggatcacggattaccgtaatggaaaaaatcgccgtaattacggattacggattttcgtaattgaaaatcagtcaaaataggcgaagggatgtgggctaattgctcgaatgcctattttgacattttcgtaattaaaattaaatttattttttgaaattttattttttatcctctcccgtttttattttgccaacagtgtctcccctccgctcacttcccatcccccttctccggaggggcaatttgtgtgcttttcatgtgtacaaacacatggacggacgctctcgccccatttttctcgtatttacaaacaattacttattttttgatctcaaacattaaatttaacaaatcgtttaaaaaaataaacgaattcagtgaacaaataaatggagagaaaaaacaaaaaacaaatgcccaattttttcgtttgattttggcgaattgtcccttgatctttgattaaaataaagtaaaaggatttgttacacttaaatgcgtattcccaaatggtgcagcggcgcatttaaaaattatctgatttttgatcagcaatatggaaaaaaaaacatttctgcgtcgattaacaaacacagcacgggagggaatatggaggcgtaaatagggcatctcgaaaagctattcaaaaacaaatttgacaaacgctaattagggcagtaaaacataaatattggtggaaaatcggaatttaaaggttttcaaaaagtaagtaaatttctcagaaaatttcttcaagttcgttaaaaatttaagcaaaagtctcgaaaatggcttaatattgtgttaaaaatcatttaacgggagaaaaaaaatagaaaataatgtaaatattaatcagttaatagatagattgggcggcggcggccttaaaggcacaatttcccagtggggcctaattttgaaaattggtaattactaattaaaaattggtattttatttgtttggtcatgatatacgacaataaattatccaatcaatatgggcaggggattggggattggtgagatgaaatcgctgaaaaagcaaggacatcggtcgcggaagggatgaaatttgggtcgtatttttgtagggagtgaaaaatgtgtaaatggttgaaaaatatggacgaaaatgggtaaatttcccaacaaatttcttcaaattcgctaaaaacatcaaaatgacttaaattgtgttaaaaaaaataaaaagaaagcaaggtaaaaatgtattaatctgttaattgatgtgccgtgccttaaaggcagaattttcccaacggcgacgaattttgaaaattggtaattacgaattaatattttatttgtttggtcattgatatatgacaataaattattcattatggcaacaggggattggagagatgaaatcgctgacaaagccccgggcagcggaggggatgaaatttgtgtcatatttttgtagggagtgaaaaatgtgtaaaatggttgaaaacatatggacgaaaatgaataaattctcaaaaaaaaaaaaaaaaattaaattgactataaatttatgcaaaaaatctcaaaatgacttttatccaatcaatagggataggggattggattggggagataaaatcgttgacaaagcctggcggacagcggcggaggggatgaaaaattgggtcatatttttggtggggtttggaggagaagggaggagcagagacacacaaaacactgtctgtctgggtggggcgcaacttttaagattattttaatagattttttattcctggggagcattgctttttccttgaaatgcgataaatacgatgttttggtaagttacttttttgatagagaaaaacatttttcgctcgaggggggggccaaatgaataacaaatgattaattaattaattaattaatgagaccctaattgtcaggggcagagcaacaggacgcacccacccaactgctgctgatcatttagtctggtttttttgcgttgtgtactctgggtgggcccaaggtgtaaccaataaataataaatattgtgttgaattttttatttgtcgatggaaaatttcttagagcatttttgtcaatgatttatcaaatcaattatagcccagaaataattatttttttttaatttagccgaatttgaaataagctaaaaatgagggaaaagcctccaaagggctatcagtcagaaaatatggattttgatttgcttttaatatagtttgttttctaatttttgattttaataattttttttaactaaatattactgcatttgcttaaaaaaaatatttgtttttgatgttatattgtttttacgaaataaaagcccccattttagcggaagtttcatcctacataatagcaatgttgttgttgttgttgtttgtcttctgcagcagcagatcagtcacgattcacccatccttttaatgctgtccccccccccccccattagcgggcgaggggcaattagcggcagtcaacaaatttcacaccgctctctcgttgtctgtcctcttattgattgcacactctttcgccgtctctctgcttttcggtccaacccctagaaaaacatgaaaaaagtaaaagatgcaaaaaaaaaatcccgaaaaatttaaaaatatgtacaataactcccaaatatatatcaaaatatgtaaaaaattttaaaatgaatttgtggacaaaaaaaaattcttagaaaagcgtgataagcacagaatgccataaaattgtactttaggaccagaacaatatttaagctatgttcaaaattaatttttgatttcattttttgaaaaaagtggtatgtatatttaaaaaaaaatttttttcctaaaaatttttctaaattctgaaaacctcagaattttctaacgaataaatttgtacgaaaatttgtgaatttttggattttatttcaagcccgaaatatgtaaaaatatgtgaataaaagtcccgtcccaacttttgttaaacaaatacaaaaaaaaaaacaaaaacagtgctttgtcggagaatacaggaaaaaatatttatttatatgaaattagcaattaaacattgacaaaataaatctgcccaatttgcttagtgttcaaaaaatatgttcaagagttaaaagcaaataaacgatgaaaaactcattttccagcacaataaatgtgtgcaaaatgctgctgataagagatggatgcactgttggtgataggcggtgatagcacagatcgggtgaggaaatgttttacgatattttgatttcataaataaaaataatattttcgggagaaagacttttgatttaaaaatattttttgtaaatctacgattaattatggattaaaaattttattgtacattttgatattctta

SEQ ID NO: 10741 - DNA, 942 bp, Heterodera glycines
  unsure (1)..(942): unsure at all n locations
tttttagatgtatgatttgctgcgaaattccaacggagccgatagaaaggncgncncgaaaanagaggctgaatncaatctctttctcccctccccgctgttcaccataaacctaaaaatcaagatcagcgaccccaaaatccaacacgggaatgagctcccgcgtttagcgtccacccaaccatcaccctaaatacctccaaaacagccccctcatccatttccaacgatttgggagtgtcgtcgtccgagacgcgtcggccatcaaacaaaaatcgcaaagaagtcacctaaaaaccgagaaagttactctgctcaaccctatcccaagtctggcgaacctggacgcctgtccactcggcaaacaacttttttgtcatggcacttagaattgaaaggaaattacaaacaaaccataaaaaagaattacctaaaattcttagccggaattttgctggccgcgtatttggcgcaaattaatgcgtttgtgttggccggatttcccaccacgagcacctaaacgtttatttttaggatgaaaaatcatcggtagccaccaaatacacactctgactgttggcttggaaaatttggccaaagcttcgccctgcgatttgaaaattcggacattggccgcgagaaggtcctttcgctccatcccttcttttgacgaaagtatatcttttcttaactatccttaattatttaacaaataaacacagcggcccaattttgggctccaagtacaattatgctggatttttcgtcttagtggtctgtgagttagtcaccaaaaaggggctctcaagttcaattcctccttgtgtttgtgtataaatttcaattttttaaagcaaataaataaaataataataaatacagaacgccaaaagaacaaatacaaacagtaaaaggtacacactatattttacccttgatatg

SEQ ID NO: 10742 - DNA, 2303 bp, Heterodera glycines
agataatacataagtacccttttgttttccctccgatttgtcgaattttttttgttacttattgaattagaaattcatcatacaaaaatgaatatgctaaaaccattttcgcatcttaattccatacaatgcaccaaacatttgctggtcagcaaacggcccatgcacatttggatgccggacgcgcagtttatgcgtcagtatcaggtccttcctttggttttgcttttttattttattgcattaatcaatcacacacaaattttaacaatttcaatcaaattttgaggtggaagacagcggaaaaagacaaaacacagccggagaaacacagtcgagacataacgcagccggaatagatttttttaaatttttcaaatagaaatttttcaagaaaaaagtcttactttgttagaaaattcgatcaaaattttttttttaattttccaacgattttttcaaaattcactgataaattaccaagttttttcaaaaaaatcgctggaaaatttttagaaagttttttctatgaattttctaagaaacattttttctaagatttttctaattgaaaaattttttaaaatttattcccggttgtgttatgtctcggctgtatttcggcggctgtgttttggggtgtaccgggaagacagaataatttttacgtaccttacttaactatgatttcttcagttccaagcgccaatcactcgaaatccgtggcaatggctcaactcaaagacccaaatcgacccggaggataaagtcggactgaggaagcaaatcgctagtatggaaaagatttcgcacatcagctggaacgatttcgcctgcgaatttcgcgaagcccaaatagacagcatggtcagaatttggtgcttccaaatttgaactttcttttctgcttctccaattggacagattctcaactttggccccaatcatcccgcagctcacggagtgctccgtttggtgcttaagttggagcaagaggtcgacaaattgtcaaaaaacattacaaacgaaaatcatttatttattgacagttatccgaattttccctctaaaactccgtcatttttaaggtttgcatcaaagcatcgccgcacatcggactgctccatcgtgggactgaaaagttggtttcgctacttttccgttttgggccaacagctcaaaatttaaaaaaaaaaaagttcacattcaataatttgtgcgcgaaatcgaaaaagtcctttatcgctacgctaatttatgctatgagaaattggaaggtttaaattgtcccttaagcgcgctctttgttcattttttaattttgatgtgaaaagtgtctttttatttctatcaaagcttttgtcatttttatattgtaattccatcagatggttttgagtgccccggctttttcaaatgccattttcacttcatttttcagactgatcgagtacaaaacgtacacccaggcattgccctactttgaccgtctcgactacgtgtccatgatgaacaacgagcaggcatattcattggcggtggaaaagctgctcggcattgacatcccaccacgtgccaaatggattcgaagtgggttcataaaaagggaaggcaaaacattcatttctattgtaagatgggcattaagttgggaactgagtctttctttaccacccgtgccaaatgtgaaattgacctcaccccctaaattttattttttaaatttagtccgtctttttctgttccatgggacattaaaccccctccccccccccttctgtagcattgtttgccgaactgacgcgcatccaaaatcacataatggccatcaccacccacgcgttggacgtcggtgcgatgactccgttcttttggatgttcgaagaccgcgaaaagtgagaaaagcgccggattgaattgaaaagccattctgaacagattaatggagttttatgagcgcgtgtcgggcgcgcgaatgcacgcgaattacgttcggccgggcggtgagtggaaatgtcaaaaacccaaattaacacccatttgattcatgtttatttgaaaggcgtcgcttgggatttgcccatcggtctcatggacgacatttacgattggtgcacccaatttccccaacggattgacgaattggaagacactcttacggagaaccgaatatggaagaaacggctcatcgacgttggggtggggtcagatggtttgagaaggcaacctccccatgttcctgacttaacaccaaatctggggtggagggggggggggggggggggagtcggagagagagagcg

SEQ ID NO: 10743 - DNA, 1524 bp, Heterodera glycines
caaactaaaaacatgaaatttgtaaggccaatagtggatttggtttttttaatcaaatttttgaagcaaatttagtaaattcgagaaaaaataaatttggaaaaatttgaaatcttacgaaactgccggccctcgacccccttttttttttaaaaattttgttttatttcctgaaacactcaaatttggtaggaaatgggcaaagtgattaatttttcttattccaatcgaaaaaatcacatctttagtaattacctcaggatagcatggaatcgttgatccaccacttcaaattcttcacggagggcttccaagtgcccccgggggcggtgtatgtgccaaccgaggcaccaaagggcgaattcggcgtttatttggtggccgatgggaccagcaaaccgtaccgatgttacatccgagcaccaggcgaggcatcacatgagtgtcaattaaattcaaaattgttcaggatttgcacacctttccaaaatccacgacatcagctacatgcatttgatcccgggtaatcgcaacttcccccccccccccattaattttacatgtttaatctttattttctgcagatattgtggccattatcggcactttggatttggtgttcggagaagtggaccgataattgtggaaaaggcgggaattgcacattataaatgtcttgaattaggacaaattattctacccaaaatggggaaagctttgttttcttattttgtataaaaaaatcttacattcatggatagtttagaaccattaatgtttataagtaattttttgccaattagaaatttattaaagctccattatggtacgtaaagctatgcgagtcacagtaaaagataaaataacagaaaagtgcaactatcacggcctaaatttaaaaagaaagaggcgaggaggtacagttactagggctcggattttggtaaattgtcaaaaattaatttttggggttttgagactgaaaatctgagcccagccaatcacagttatgcaattatgtgaaaatggcccagagtcaaaaataattaaattaatccattggtcccgcgtctatgccatcggattcttcttcatcagttcgatgtcgctggccaccatttcctttaccaattcctgttatttaaatattttttaaaagtaaagtcgttgtattttccacctcaatctcgactttcggttcccagcccaattgtttcttcgctttgctcgggtccccaattaaaagttcgacttccgtcgggcggtaaaacttcgggttgacgcggacgcgcaaagtgcccttctctttctcgcggccgacttcgtcgacgccttcgccctcccaactgaaaaaggcaatctcggggaaatgtccgatgttttagtgaattatttaatgctgtacataatcgtttcgccgatctctttaaaggccaattcgacaaaatgtcggactgtgtaattccttccggtggcaatcacaaaatcgtcaggcgaatcctgttgcaaaatcatccacatggc

SEQ ID NO: 10744 - DNA, 1076 bp, Heterodera glycines
ttttctacattaatacttattttgacctgacatgtttcttttgtgcgccgattatatcctgtaaaatataaaattggctcttaaccataaaatggtcattttaggtaaatctgattctgatacttttagtccatataaattcatatttgggaatttttgggaatacatttttctatatgttggcactttttaattcatattatgatccataattgaccatttttgagctttttaatccatcgggcttttttagtccatttttatgtccatatttggcgatttttagtccatataatttacaaccctactgataacaaattcaagctaaaatccccaaaaattgtctcggcggtgtctgtaggcaccgaaggaggcaagtttaggctttataagcccgtgctttaaaaaaatgcttatttaattggaaaattttcgtgccatctcactgttaaataatccgggcaaaatgccatgaaaattacaatttatatgcttacagtgttcgtctccgaaacgcaacgtccgcgctggcaaatgccattgtagcacacttcttcgccgttgttaaagcctctgcaattgccgccctggcgcactttggccgcgcaatgggcttggccatgggaacggtcgcagaacaaataccttttgttcagattttaacgcaagttttattcggttaatattttttaatttattttaaatttttcgaaagtaaaaaatcgataattttttttgcttatttataacctaaatttgccaaattttagcaaaatttttttaattgatattcttgaaatgccaccatagtcattagagatgaatttgtaaattcgttttttcacaaaaatatcacaaatttcagtaattttaccgttcaatgaaccaaaatttgacaaattcaatgcttaaagaatatgaataatatttaaatttgcttatttattgaaataaatgtcagaaataagtgctatgccatgcgcaatttattttatattttttaattaaaaaattttcaaaaataaatcttttgccccgccctgcaaaaaaaaaataaatatttcatcatttattat

SEQ ID NO: 10745 - DNA, 3230 bp, Heterodera glycines
tatgtatgttaaatgaaaattcactgccgattatattcttcttcgtctaaaattcataataatttgccccctccaaaaaaggacaaatattgtagtcctggtttatcactaatattttatttaggaaataattaataattttttagtgctaattaattatttttaaataaaaaagtaattaattttaccgcattatccattggataagtcatttcgcggtcatttcgattctgtctggccactcgccactgttcccaaatctaaaattcaatgaattcttccactcactaattataatctaatgaaatatgcctaaaatacgaaaatttcttacggtttaaaggggagggggggggggggaacggaaaatctcagcgatttttaatttaaaaccgatgaatttcagcaatttttaatttaaaaacgagaatttcaggggtttttatttttttcaattgttttttacgcagtccacgaagctgtggtgcaggaagaacagcgggtcatttgccgaggtcgaagtgtccgacatgtgcccctggggctgggcctcttcaccgccgacaaacagatgcacatttccatgggtgacctgtgggaaaatgggaaaaattcaattcaatttattgtattctttttactttcaaagatttattaaaaaattaatttaaaattacaataaataaattgaaaattaaaatattttttgaggagaaaattaagcaagtgtttgttacctttatatgaatgtttttgtttcactttcttttattgaaaattttcattatcctcaatgttcaataggtttattttattattttagcaaaataattatttcattacattttgagctaaaatattgttgcctttaaatgaatgttttaatttgtttagtcaaaaaatgttattctctaattgtaagaaatatccgataattaaataaaatgtagtttaacttggtgctaggtcgatccaaaaaaaactcagtgattgattggtcattttccggaagcctatcgcaccactttcggggcaccaaaagtgcctgatccggaacccggaccggcccgattaagaacaatttttgttcagtttttcaagtgttatctcccaggccgggtccggttcttgacccgttcgcttggaggccgtcaggggtcggacacctctgccggagggccctcagccttgccccgacccctgtcgatggccaacccaagctaagcgtccggtaccagcggcttttttgtgcagctcgattagctctacaaaacggtatcaatggcgtccggctgtgtctactacaaatggagaaaattggcgagaagtatgtaaaaaattgaaaaattagaaaatgacttgcgtcgcgccgttcattaaggttaagcggacggcaccgtgattttgtgaatcgaataattaaatttatttatttaattttatcactcactgagtttttttttggatcgactcagcacgatttaacttgcctccattaattggtagtcaagttccatttggcacaactaaaaatattaaaagtttaaaaaaattatataaataaaaaccccaggttgaggtgagctgtatccgagcactttgtcaatttgttgctgattcagaaaccattggatccttaaaagccaaattcaatttaattagcgataattaatttacatttattgattggcacttattcattaggatttgcatttaattaattggcctgactcgttagcaaaaattaatttacatattgcactgactcattagcgaaaattaatttgcctttaattaattttcactgaaattagcgataattaatcgcatttaatttcattagcactgactcgttttcggtgaagcctttgcctccttgacccacgtgtctgatcacatttggtgtccccttaattggtttataattaaatattcaattatttgtatttttacagtgagggttcgccaccccgcaaatgggccagtcaccaaattgccctcttcgtccgtgtcgcccatgaacttaattttatgttaaaaatataataaaataaaaaagattttagattagtttcgtaaaaaatttaacgattcttatcataccaatggaaaatttctctataaattaaaaaaaattcaaaaaatttaggactaatttacgtttgtccataacattttggaaagtttaagcaatttaaaaatatttatataattatttagtttaaaatcattgaaataatcaaataaaattaaaatatgcttttgttaaatataattattattttacatctttcgtgaacatgtacgaatcgcccggtgttggcaactgtgcctccaaactcgagtcccaatagggcagcgacaccgatgggtccacttgacggagagcaatttccatcctaaaattttcagtaattttttttgcaacaaacgaaatttttagttttttttcttcttcttcaatttatgtctaagaataagtcgaatggaatacattaatgtaaacaaaaatgaccataaatttttgcaaaaattaataaaaatgtgtccaaattagggcaggcactttaaaaggaaattttcagaaaaattttctgaaattttgattataatccataaaattgagctatttatgtaaaacgaggcctcgtctttatttttaaaaattgccttttcataaattcgcgatgccacggcaaaaaggcgggccccgcgtgggccgcgccggattgaccaaacgcggcatggagtcccgcaattttgtcatattcaccactctttttgatggcattcattgcggcatgctaaaaatgattaattttaattgatttacaaaaattgtttaattattaattttttaattaaatttcatataaaattttaattagtaaaatgtacaaatttgattcgttcttcgtcgctgagcattcggtactctttccgcaccgacttcttcaatggttggttgtccgccagttggcaactgtttgagccttcctggccatttcctgtcaattatcaattaatcccattaatttaactaattggccccttaattactgtaccatttaagtatttgcagagacagcccaagtccatgcattggtacggtgttgcggcgattggcgcaagctcagcggcgagtatgcccgctatcaattagttcattagtgttaattacttttaataaagttttaataatgcttaattaatttgaattaaatttaaca

SEQ ID NO: 10746 - DNA, 1573 bp, Heterodera glycines
aaaaaatttaaatatatatatttaatttagtttggtgaatcaaattgcggtccaatcctgggattgccggcattttcgggatcgcttcttccaccggaggcgcttcctatttaaatttattcatttttatttagaattaaattattttttatttaatgtttacttactcgcgcatttttgtcccatcgatgcaattgtgtacagacaattctcagtgcttttgtcggtgctttagcacaagggtccacgtctgacattgatgcattgtctaattataagtaaattttcgtcaaattaaatactttttaatttttttaattaactaatttttattattaaaaaatattagtatataatttatttggaaagaaaactttaataagaaatttacttcagttaataaaaaagttccatttagagctcagtctggatctgtatccaggcccaggcccaggtcgtttttgggaaaccaggatttttctaggcctaggttttcctgtatttttcctggacctggaatttattctgggcctgcattttcctggacctgaatttttctggattttcactggatcaatttttcctggacctagattttcctggggtttttttgggcctaaatttgcctggctttttcctggaccagatttttcctaggttttcctggaactagatttttgtccaggaaacccaggtccatgtctacaaaatacagttccaggcttttttttcaaaaatgtcaagttgctccatttaatattcgttcaatattaattaaatgaaaatatattatttataaataagtaattattacttttgggcggtggcgttggcccagaagatttatccgtcttaatggccttgtctaaaattttagcataaagtttttttttatttgacatattaatttaatatttattagaaatttttagtttacttttttctgcacttaccatcttcggcactttcatcttcggttggaactttctcttcattttttgccacttttttctctgttttctcagcatggtcattagtggaagaagtggtgccattgttgttgttgctgtttgaaatgccattgtttttgttgttaattgccgatttttcatgcttttcttcacatttcgccacatttaaatatgtgaaacataaaaaaacgaataaaaatgctagtttacaattcattttctaaaggaaagcaatttaaaattaatttttaataatctaataaatatgtaataatgattcttcattattttttaagtgaattgctaaattaataacaacaattctttgaaaaattaatttctataaattcaaattattgtaaaattgaacaaatatatttataaaaaatttcaatttaattagggtgagatctaagttctgtcatagtgactaaaaaaaacattcaaaaattttgaaaaaatagcatttttttgatcataaaaaattcaaataaaaatcttaataacgcttttaaaaagcccaaatttttctccttcgaattgcatatccaaattaataataatttgtttgaacggttttaaaaaatccgtaaacaattcaa

SEQ ID NO: 10747 - DNA, 4381 bp, Heterodera glycines
  unsure (1)..(4381): unsure at all n locations
ctcaaaacccgcgaaaaccaattgcgttttgggattgattatggtccctaattgaatcataatttaaaaaaaaaacaaaaaatttgtaaagaaatacgcaaaaaaattttttttaaccatttttaagcgaacaagaanaattttttgaaaaaagtctcgggtctcgggaaatttttggtctcggacagcactacaaagtatataaaaaagtttgtattaaaatttcaaaattttttagtttttgaaattctagtgtttaatagattatacaaaaggttttaaactccaaaaagaaattaatttcaagtcattaaaatgcaattcaacgattttttagaaaagttcataattttttatttattaatttacgaataaaaattaattttcccaggtttttataatattccaaaaatttttaaaaatatttttcgttgtcaaaatttttcaagaattttcttgaaattaggggggtggcagttttaagaaacgcactagcaccctttcccgctcactttcgggtaaaattttgccgaaaaatccttacccaatgccattctctgccggtccatgtgccaacaataataataataataattcatccgctttatattaccggaattcagtgtaaaagcaaagtaaaaagagcattgtatgagcttcaattttccttagtatgtcaatcgcgggcgggaagccaaggtgatttcgggcagttttcgtattttttacgccaatttcaaattgggtaattatagcaatggcatttatagggtggattcttatcattgaatttatagggcggattcttaccagggatgggccaaatcgaaaaataaaatgcgaaacgccaaatttgcgaatgtaaaaatacgaaatgaaaataaatgcgaaacgcgaaatccaaaaagcgaaattgcgaaacgcgaaatttttttatacaacttttttaataggcaaaatcatgaagcaaaaatcaacatgaaaagttggacctagaagcctagaaccagggctgccaactcaaaattttcaaaatctgcatttggccgacaaaaaatcagcatttgaggccttgtaaaattttattccaaatttaaaaaatcaataaaaagctttttttgcggcgcgcttttcccaaaaaactctttgcgaacggggggctggggggggcgccggaaggcgccgccgaaaaaatttttgaaaatttgagtgaaatttgttaacagattttcaccaaaaattaccaaatataaataggagttttggggttccgcggtgccgatagacgccgccgggggaaaaatagaaatttaaccatttttaaacaggttttcactggaaattgggcaattatagtcatttttgaaaatttttagggaatttaatccctcattcttaggggtgtaatattcgcgtttctcgccaaaatgcgaaacgagaaagcgaaagcccatccctgattcaccatggatttattaaacgaaaaatgggcggagcttctatcggcaccgatggagtcaaaattttccttaatatttttgaaaattacaaaaagtccataaaattgaaaagccgcgatcaaaaacccattttatgattcagaagaattccggcatgtaataagattctcattttgaatgctaattgtaaaattctaagacccaacatggagtttcactggttcaaccgaaattcgatccatttattcgggggaggcgaaagtctatgatttgaaaaaatttgtgttcaatgccgggacaaccgaattgaattatgccatccatcttaatgaggtttgtgagcagggctgggcgaagctcggcttagcactcgaagccgaagccgaaggcgaagcccaatttttattcgaagccgaagtccgaagctcgaagcccaaaaaacccgaagttttcgaagccgaagccgaagttttttcaaaaaatttttttaattccaaaatttttttcatcacaaaatttcggttaaatatcaaatttatcaattgacagaactgctagagaccaaccaacccctttcgataaataaatataatgaactttttgagcaatatattttgtaatttttataattcttagaatattcacggtttttgagtcaatttaaaaaataaagggaaattttttaaatttgagtgtaatttgttaacagaaaacaactgaacaacatgcatgagaaatattaatgaaaagagggatcaattttaaagaataaatcccgcaatgaaatttacgggattatcccgggcgggattgcgggattttgaaatttcaaaaaaattaggaataaattttaaaaaactccatgaaactaaataaaacttgttttctgctcggcgactatccgcggcgccgtctcacttcttagaattattaaagacttattttcttagtgttaaaaaaaatgaaaagcaagccatgacaaaaaacgtataaaagttaaaaagaaagaaataagtgaaaaaatttagaaacattttccaattcatgacaatggaatgacaacaatttcgtcagctccaatgccacatcctaaacaaattgaaaatgaataaataaataatttataattcgagaccggacaggatcaggtgcttatgtcgcgattttccagggatactgacccagatttattgggacttgaatcccggaaaacaacatgtccctgcattattctcaaatcctgatttagtgttcaaaatcccggcgccggtaatatttccctggcccggttccaaaatactggtcacgacttcggttcaaaatctcggcactgttaatcctacctatcccagggaccgattcccaaattctgctctgatctcgaattttgaaaaatttggtctttgttttaatagtaaaagttttgttttcttttcgaaactaactttcttttctcgcatctaatcgttgctgaagttcatgtttgtcgcacacaatatcacaatcacacagcaaagtttcgcttggctttaaatcgtaacaaccaaggccctcattagccaaagacggcacctttaaatgcaatagttactgtaggttacggtgttggaatggacaggccccatcattcacgaattagtaataaaaattgcttaaaattttcttttttgtaaaaaaattttcgaaatttgcaggtttaatgttttttgtaaataaaaatgcgaattttttgaattttatgaacttagggtagtcaaaatttttaggtatcttgaataaaacaaaaaaagagtccctgccttatgatttagccataggcttggcacaaccctggcggtaagtaataaatttgaccattaaaaatttaaaaaaaattcaaaaccctaccgtctcattggaggaggcccttttcatccgtttgcaaccgatcagtgcatccaattttttcaaaagtccttttaccctgtagcaatctttgccatacatatcacacctttcactcttcccttaaaaacaaacgatttagaagccagggcatagccaagggggaggggggaacggggcctaatttgtgggtgtatttccccaaccattagtgctgttcgagaccgaaaatttccagagacttgagactcgagattgagtcttgaccccctgaccaagaccgaaaccccgagaccaaaaaacccgagagttcccgagtcgagactctcgagaacagcactaccacccacccccacccatttttttaaagaaaaatgtctaaactttataaaaaatatttttttacataaatttcttagatcagttttccttggcggtgcctgtttagcattagcgatttccgtctcccttattcatcccaatttttgcaaaaatgaactagtcttaatatttacaaatacggtaactcattttcacatactccacattctcggatcattttcgcttggactaagccaatgatttgacgtgatcagtttcgaaaattcggggtcttcaatttggaaaaacacgggcattttgtgatctgatgatggtggcacaaaatgaagcagttttgccatggtgccattgatcatctgcggtgcgatgtcattanacactgtgccaacgccatcattcttaattnangttacannattaaagggatacacttttggngaaagtannnttacatatcatagggaattanagggtaattgttgcataattatgaaagagactcattagctaggtaggtcagtaatctctcgtcggtttctaacagtctgtatcgcataacttctcaccgctctcccctctctctctctctctttctctctctctctctatacttcctctctctctttctttcgctctctctctctcacacactctatacttcctctctatatctttctctctctctctctctctat

SEQ ID NO: 10748 - DNA, 1564 bp, Heterodera glycines
aaaaattaaattataaatatttttttcttcattttaatcacaatttaattttttccgtttattttcagcactttgcccaaggattctgtgcccgtggaatgggaacatttttccgccaaggaagtcatcgtcgatccgaagtaaattttgggaaattgcccggggcaattcacacaaattgaacatccgaaagttctcctgctttggtcaacggactgcgaagcaaatcgttgcattaaattagctcaatttgttgtagcaattcctccaaaagtgcaattgaaattttcgggggggggggaaagatcaaagaatacaaacaaattgaattttaaaaaattgttttaagaatggcacacacttatgtgactgaattggccggcggcattccgtccgctcgcggcacaaaatattcctacacttatgagtcccgagttgaggaggaggggaacaacgaattgttggaacagagccaacgaaggcgggaggagacggacgaggaggagatgaaacagcaacagccgatcaccgagttgaggagggaagaggaggagcacgagttgggcagggaattgaggagaggggaggacggcacggaaagacactgtacatctacgcaaaaggtaggcagagaagcagagcgatcgacaatcgatttgatcggacaatgccaaatcaaataagccaaccgatccttttttgcttactgaagatcacccgagtgaccaaaatcaccacgacaaggcaagtgaaacaaatcccggtgaatccggccgacgttttcttcgacgcggacggaaatccaattctgaacggatttgatggtgatcagcaacagataaatgctttattgatcagtgttgtggttcagcacagaacatttcggccagcccggacgacgacttcggcgcggcgatggacggctccgtcggcatcgacctgtcccggacgtacatctcggagagcgagcagtacttcagctccccacagaccagcagctccaccgccccgcatggttcccaaagcgtttcaccgcccagcggtgccaatgacaaacatttcttcacgggtttgccttttgattcactgtgccgctcaatcgcatcactttgtgttctttctcagcaacgcctggggcgcccggtttgcccgaagtgaccgaattgaccgactcgacaatcgcattggcatggcttaggcccgattttgacggcacttcaggaccactgatcggataccgagtggaatcaggcggtctgagttagatgaatgggacccggcacacgacgatctgttgggggagacggagtgcaaaagtgaggggggggggcacaggcagcaggagaaaataatcggccattagtaatctcggtaatactgccgaaggatgattgaaataaaaaatttaggcattttgtcccccatgttatttttggccttttcaacccccaatgatgtctttggacgccccaggggtttttctgaatatttctcttcccttcaggggccttattttttcttttcttcctttttccctcccctccctttccgcccttcaattttt

SEQ ID NO: 10749 - DNA, 2343 bp, Heterodera glycines
agaaaataatcggccattagtaatctcggtaatactgcgagggatgatttgaaatagataatttaggcattttgctcacccatgttatttttggtcatttcgaccaccaaatgatgtctttgatcagcccatggttttttctgatcattctcttctcttcagtgccttatttctatctttcttccttcttccctccttccttttccgtccttcaatttttctgattaacaattcgtttccaacccatccatcgttttgccgtgactcatctcatcagcggcagcctttgcctttgcttttggacgccctcagcattttttcctcgctaaaaatcatacgaaaataatatcgaaacaatttaatgccttttcctgacaattatttcctttaatgaaatgcactttttcaatttttcctcatccattttttgtttgtttttttgccaatgtttttttcattttacattttttttggctttgaaacaatggcagcccatcaattgtttatggcgtcagaaagacaaacttttcaaagttactatagaaggaggaaaagttggcagatgacaaacacttttaagagttaagaaagaatgggtcaaccaacgaaaaaagggtaataaaaaaatgatttttcaaataattaagtcaccaatttggatgccgacgaatggtaccaattccgcgtgttgggcgccaacatcgccggctttggcacgccatcgcccgcctgtgccccgattcagctgagaaaaggcaaagaatggggaagaacagactaagctcgaaagacacaaattgatcatttatttggggttcggctccgctcaaagcgaaagtcgggggtttgtctcgggactaattaaagccaactgatttctcgacttttggtcaaattggtttctcgacttcttaggtagttccctccctcttctaccaattcacccacaataaaacattctctctccccccatctccaaaattcatttccatttcaaggcgttatctttagcgcccatcttaacaaacaccgcagcaccaaagcgacgaacgttcaaagaacggaaaaggaaaagcgagaaatgtgggaaaaaggggaaaagagagggggggggggagaagagaagtaatgtcaaggctaaaagaatgaatatggaaatgaaatggagagaaatgaattgggaataatggcacaacagtaagaaagtgccaacaaatgtccgtccattctctacgcaaattggggaccaactaatcaaagaaagtccatcccacgacaatccaatcccaaatctgcggaagatatctaaaatttaaaattgaattgcctgaccctaaccaatgatttcataaaatgggctcctccacctgctgcaggtgcacgagatgacagtctcccgccaccgggacggccccacgtcgtcgcattggactccgaccgggcgaccatcgaatggcagccgtcgcccctggccaatgctgcgcctacagcaattaacggagtcggccaccattcccctgctggggacaaaatggcgatgattaatggcgttaatggcgggtgggggcggacgacggccgacgcggcgatggtgggatacgtggtgaggaaaaaatacggacacctaacctaatcgagagtcgagacaatttaaaagcatgcgaatgatcatttattgccctttcctcaggtggaacgccgcgcggatagcaccagcgaatggacccgggcaaatgatcggccgatcaacgagcacacattcaccgtgagaaatctgcggccaaacggagagtacgaatttcgcgtattggccaccgatgggttgggtcgacacgcgtacagtcagtcgtccggctttgtccgaattcggccctccgtccccttacggcagcaatctctacggcaacagccgccaccgccccctggacaaccaaaggtgggtgttaattcccttaattaccatgcggtggcacttgagactgagttttctttcggaaattatggccttttcccgacgttcgttcggttttgctgttaattatcccccccccccccaattgttgttaattaccccccccccaattgtcagttggtcgagagtgggctcagttgggtgcatctgtgctgggaacagccaacacaactgcagcccatgtctgctggtccttcgaagattgcctttttgatggaattgcgccagctgctgatggatgggagtcggggcgagtgggtgcctctgaggaagcaaagggtggacagagcagcgccggagggggaggagcagcagcaaacggagacggagccgatgttcatcaccacatcgttggcccatttcattggtga

SEQ ID NO: 10750 - DNA, 4693 bp, Heterodera glycines
atcgatcatccttttgacccttcgtgttgtccatttaaacccccctttcccccattccgtgcattctccctcattcatttgttgtttccatttaattgtgacccgctccctcccttcgctatttattatatttatttgtgtggaataaatcaatattattccattgactgttgaacggacacaacacctttcgtctttgcgctcaaaatttccaactttttctcttgtctccaatcgcctgtgcacaattcaagagtggtcaaatctaaaaattatacattaaaaagaaacaaaaaaggaaatcattaaatgaataaaaacatttgtaagtagttttatccacaaccaaaaaataatttcaaaatatctttaacaaaaaatgatgcataataaaaataaaacactaaaaaatgctaatacgacaaaattaactgagattttgattaaaagatttttttatattttaatattgtttaaattttttaaatattttaacagtttgttagataaatttcttaattttgataatatttttgcaacttctttaaattataaaattgtattaaattgtataacacaatattacttgggtattcttataaaaatggacatgaatgtaaattacttaaaataatttatgatataataattaatatatcatttatttcattttatgattctttcacaaataattataattatatttttaataaaagattattaatttgaagaatataataaagtctttttggctttctagttcagtactagaatttaacattcaattaattaaaacgcaaaatatcatctaaaataaaataaagtaacaaataaataaacaaatgaatgtttaaataataatttatctacgagctcacagtgttcacttaaaaaaaattttttaataataaaggcatattaagaaaataatcataaagaacagttctaaaaaattactgttcacattttcattaagagaaaaaaaaataaattctaaaattcaaacaatcagaatagaatattatgaataaaattttcgttaatatcctcaagcatactccttgcagacagtatttgcatttaattatgctaggagatggttaatagttttggaaattaatatgcaaaaatattaatcaagggcgaaagatttcaatatgataataatatccaattaaactttttccattatcaaacaaatacatttgacttttttcataagaatatttttggtaatctactttcaatccacaaaaatcataaaaataacatttaaaaacatatgatattattttttaataaaatcaaattgtgtgggatttcacataatattgaaataaaaattaatgaatataaaaaaaattattaattgatgaagtaattcaaacctacaaacaacgaaatacactatatgttaaatatagctaaaattatcaaaatgtgatgtcctgtctaaagacaatgctgcagttactgacaatgaagctgtgcgacaatttatttgtgaattataaaattcattttaaataaaaatttaaaaaaggaaaaaactgtttaatgataacaatataaaatgcatttactcaattgcgagcaaatttttacaaaattttaaacaataaaatatataaatacatccatttattaaagcagtattacttataaaaaaccatcaaaaaaatcaacaaaagtgcctgtattttttactaggtccatgtcatcaaaagaattcttattataaattcaaaggattaaacgtgtcaaaagtcacagaatgcttatttaaaaaaaatttccaggcggcgcctattggcaccgccggacctcctttgggctcttattcctttacgcccataaattttttttacatttcaaaattaaacaggccaatttataggttccaaaatcccgtaatcccgcgccggatcccgcaaattttaaaggcgggatttgcggtattaatcccgcgggatccggtcccgcaaaaaattaaggattccagtcctgcagctggatccgcaaatttgaaatttcctgtctctacgctatatcaagaaatatgaaaaacaaaatcgttttacatcccgaacattcttggtataaatccgacgcttatagattagggaatttattaatataaaaaagagcaaatatttgcattaaattaatttaaaaatggcacaaataaatctcttcggaatatacttttatcaacaataattaatattatgttaacaaacttctaagagtaactaaatttaaaatatacttaaaattctaaaataaatagaatcattagaatttaaaagatatctgaaataattaaataagaattaaatttatatagaataaagctttcatcaacatactttagtgtgaaaagtacaattttttcaaattcaacgcaagattttataaacaataagagaatttatatattatcattaaaatacattggattatgattcattaaagttatgtattaatgagctataaattttgcaaacggcgcgccaccaaacatcgcatggaaaatgtaaataaaacaaaacaaaaaaacaaattgaccgatgaccccctcccccctcctccctccagactcctcataaatttaggttgtctttacattaatttacaatatttgcgagcgtattccagttcttaaaacaaaaacggggtggaaggagaacaagaggtagtgtgagaagtaaaagatggcccagaatatgcaaatacgaagaagcaaaataaaggttattgacaaatgaaaaattattaattaaataaaaaacatcaaagagaaaacataaaatataaataaaaataaaaattagcatacatttgatttaacaaatcggaaaattctaattttcaccgatctaacaaaaaaaaattccgctgttaaatgagattaaaagaattaaatgtagaaaaaaataatataaaaaataaataaacaatataacttttttcaaatgtaagctaaaatagaacattatataatactcgaaaatttacaaaaataaaaaagcctgaatcgaaaaatatgtaaaaatattaaatgaatcaaagtttaatttctacgatttaatgtttcgaagaaaactgattataaaaacaatagctaaattaagaagatgttgataaaaacaatgagtctctctgcaaaaatgcgggtaagctcgtcaagaattatttcatcggaaagcaaaaatcttaactatataatttaatgggttactattaaaataaaaaataagtagataactaactatattatatgatatatgaacaaatatagataaaaattaattaatgaagaaaaattatggcttagaaagaatgagagaataattctaaacgcatttttaatgtattatagatatttatatataaaactcgaagaattattaaaaaaaatcaatattaatgtaaatttttaacgaaggtgtataaacccaaccttatcaaaaattataaaaaatttatcattattttgaaaattcttcaagcatatttgaaaattacgtaaattttttaaattttcaaagtagaaaatgttggttccaggttcgaaccctcagcatgataattttatgtaagttcagttaataaaagatttttttatggaaaaatttaggtttaggggacaaacacaaaacttacaaaaatacattttgtgaaatcgacgaacatttgagaagatttagatgggagcggggtttagtaaaaccaatttttaaatcaaaagccttaactttgaatggtacatcgttcactcaagccaaaacactggggctgcaaatttagttaaataattgtaagcttttacataaaatttcttaaataattgataacattgtattaaattattttttgagttttttatttattattattttcaaatttttattaaaaatgaaaaaatataattattagttattacaatttttgaaagtttatttttttatcaaaagatggtttccaaattaaaatatttaaggaaatataatgcaaaggtttgttattttttaaaattttctcttcttttcattctttatttaatattgctcatatatatcattaatattttttctattttcaatatttaattgggtgtttaagcatgtgccgtttcattgagtgaatcgaaatttctgttaatatttaaaaactgctttgttacctgtttgatattttgttctagaaataatttaatttaattttgtattacttttattgtatttatatgaacttttataacaaaatattacattggttttttttattcatgaacctatcaaattttatttaaaaaaattattaaaatttcattcaattttaacatttttattcaatttaattttaaatttatttgaatttctaccttactttaaaaatataaatgctttttgttagcttgctatttgttgtttatatatatataatgcgaaagaatttgtggaataggggcaatttttttgattttatattttggctgattgaaacatattaaaatttatcgtcaaaccatgacatttaaaaatttaattttttactaataaatattattaaaaaacccgaaatttctgaattttgataatttttataatattattttcataattttaaattggaatgaatttaaaaaaaatgtagtttattttaaaaaaattttaaaataaaatactta

SEQ ID NO: 10751 - DNA, 594 bp, Heterodera glycines
agggaaaatgtaagcgaaatttgaaaaaggaaggacaaacaattcgccaaataaataaattaaattttcaaattcttataaatagttttttgaaataaatgaatttacatttgggtttgtaaggggtaaagaaagaaattatgatctggaatttgaaataccgatcatttacaggcatagcgataggcagttttggttggggtgaacggtgtgtcagtgttcgcccattagcgaaccaattagaagaggctattagctgaccaaaaactgttaaactatttgttcagctcaaagattgtgcttcaaaacatgtaaagcttcgatttattgaatttattaaatgcattttctttatttaaaaaactcattcaaaagggtaagaaaagaaatgtaaaatattcaatgacataaatttgatcagtcatttcattttctttttcccgtttctcattgttgaagcaccgtcgacacggtgagaaagtgtaagccacggctcatcgacacatttccactgtctaaaccaaaaaaaagtcgtaaatggttggttcctttgaattggacttaacaacagacaatgccatactaatgcctttc

SEQ ID NO: 10752 - DNA, 3199 bp, Heterodera glycines
tagatttgctttcttttaacttttactttttacgattgcatccgccacttctccttcctttggcgccatcatcaaaaggagttcccctaattttaaattttccattttaaattccaatttcatttccaagtccgtcccctcccctctcaccgtttccgcagttggtgctgttttcccctttttcttcctcctcctcgtcccctccttctctttgtcctcctccctccgtttcttccctttcttttcccttcccttcgccgttcgcttccgatgagttctttttcgcttcttctttttcttctgcgccggacgatgtctctgaagagagccgtccgctttcgtccttttcttccccattttcagttgaaaaatgttcgacggataccgtcgaatcggctaaatttctttttttatttgttgtcgaatttcgagaaatttattctcgaatattattgccatttctttcccctttttcccccttcaccttctctcttccttcgtttttctcttttctgtttgtctttttttgtcgaatttttctctccaaaatgtgccgttgtcgttgtgcaattgttcccgcgatttgccttcgaattaattaaactactaattggccaattagcaagctaatgaatggccacaagctctgttcctattcactttttttgtttcgctaaaaggaatggacgacgcactgctgctgttgatgctggtgatatttgatgaccaattaacggctgtttaaatgataaaaaatgcacaaattaattaaaggaattccaattccaattttaattgtgcaaattataaatataaattatatttgttcccattcacttttttcttctccaaaatgttgtcgttgcttttgcttcaacaataacaacactttctgtccctcgtccttcttatcagttgcgtttatcttcttaaaaagtgccgtctcattcgcttcattttgccctttcgaagtcgaattggactctgaaaacggcactttaattgcctttgttaggcgcaccgaccggcatttaaaaggacagtttggtggtggacaatcagagcaataacggcactgaagatcacaaagttggcacaatgcaagaaaatattcagcgaattcataaatttattcgaagagtcggccaacggcggacagagaaacaaatggacgaatcagaaaaaagcgggaaaagaaagaagcaacgaacgaccgacgcaacgacaaaagaaacggcggacgaaatgcgccggggcgaataatggcgattaaaaagggggaattaaaaggatttaaggacggacggatcataggacaaaacgaaccaccgaatgagagaatggatgaatgagaatgggtgataataagcagacaatcaccgacggattatccttccgccgtatgaaagtgctgttattactgtaatcagaaaaaaaaaacttaaaattaaaaaaaaacacaatgactgacggaattgggacaatcggtaaaaggtgaaatgaagccaaaagggggaaaatgcaaaaaaagaagcaaacactaaggcatatcatataataaatacataaaaaagactccaaaaattctcaaaatatgaaaagcaaccaaaattacagtaatctcaaaatgttttctgttggagagaaacacaaagggatacggtaaaaatatttattgcaaaaagaacaaaaaacaatggacaaatatcgaacacaaccaaagaagaaaaagaaaagtcggccgacgtgccaatggaagaataaacccgtgctttttcttcagtttttgccgtgaaaattcggccgacccgtcggccaattgtgctcgtcaaattgtgcacaattccatgccgtccacagatttggcgggcaatgggaggaaaattcggctgaattcgcttccgcctgaggcaaaaggggcgccgaattcggatgaaggcaaatggcgggacgaagacgcagcagaaacagggacagaagcagaagaaaagccgtaattgcatagatcagaagtggaacagcagcacacctaaaaggaggagagattggcaaatgccaaaatgagaaaaaatggggaaagtgaaagtgcaaaatttggtccttggacttgaatttgctgatagctttctttttgagtttgtactggtccaaatccgtttatgaatttggagcgttggacccacagaaatgtgaccaaaaagtgcggtgcctttttcgcctttgtcctccgtccgtccaactgaccgtgttctgtccgtccttcacacatccgtcgcgaatgttcaaaatgctttcacaaattccgccgtggtcacatgaaaaaacgcttgcccggggcgaagttgtgttcaggcacgggttgaagttgccgcagttggccacggggcccgaaatttggtcgacgccggtgcggcacagaatggcgccggaggggggaacacagagacaacagcagaagagaagcggaagaaaggggacgataagagaagcggcagttgaagaagaagaagcagaggacgaaaatagcattggaaaagcggagaatgggaaagagtgggagaaaaggagaaatagagagagagagctaaaggggaaaagaaaaagggggtaagacacaccaaattaaaacaataataatttaaatttataaataaacatcaatggagcatcagcagagcaataaacattgataaaatggacaaaacgaagacggaagggaaatgggaaatgaaagagtgacccatcggaagaggtcaaaaacggagaaaagaggagagagaaaaagggagaggcagagagaaagggtggggggagagattattaattggtccattggaaatggtcgagagtttggacagagtcgagaaattcgcaaaattaaattcaatttactaatacatttttgtatatgtttggcgatttgatctttctttccattgtagcaaaagaaagtgcgaaaccatgggacacttttttatttctttgccaaaatattaagaaaggtaattaaagaaatgaaaggagagaaaatgagttggatgaatgaacggacgaacgaatgaacgaccaatcaaaacccatcaaaaagggaaagtgcgaatggtcggaggaaagaaaaggtaagttaaggggggggggggggaattggcatgccaagccaagacgaaagggccacaaacaaagcaatgaaagtgggggg

SEQ ID NO: 10753 - DNA, 1100 bp, Heterodera glycines
gagagtcccccgggggaggaacagcaaaacaaattgggagggcgaattaatgaatggaggatgataaaatggggagggggggcagagagtgatcattcataatcataattagaacaaaattaaattaattaattaattatgacaaataacaaagaatcggataaagaatcgaattggaaaagaaaaaagtgatcagatcaatgaattgggaaatgacctccccccccccccctttttttacctttttttgtcttttattggcaattggtgggggagagggaaggctaatctcaatcattaattaggtaataattaatcattaattaatggcagtcggaaatgcgtcagctgtttgaaactgaacgaatgccctgcaaaagtgaaaagcaccgttttgagttgacctttggcatcggcagaacaatcgagtgtttccacgtgcttttcatctgaccctttgtttttattttggccccctttttacgattaattgggttttgttgttttgcgataatttccaattttagccctcccccgtccgccgaatttctcatctttcaccaattcgtccaattaatgaataatagtaacggaaatgggaaaataatttggggcaaatgaaaatgactcggaaattcatcaaaatttttcatattttccgaattgacgaaacgattctttgtcggccatttggaaggccaaaatcagcggaagggagggaaaagaagcgaattaatcggaggacacttttgggggtttattttcggagctttacaaatgaatgcgatccgtccgccgaacaatgagtgaatgagaaatgagtgatggatggaaatgtgcgcattcggcgcatggaatcgttgagaaaacggagaaaatcgatgctaaatgttggagggggaaggcggagataatctcagaattattagcatccaaagcttcgaaaaaaggggagggaggggggggggggggcgaataaggaggaaaagcggggaaagagggggggacggcacataccaaggggcagcaaaagaaggggaacggcacgtggcaagggggaaatggggcaggggcaggacatggcaaagaaaggggggggg

SEQ ID NO: 10754 - DNA, 4814 bp, Heterodera glycines
cagggcgcgtatctgtccttatttataagatttgtccttatttggagggtccaaatcttacaaaataaaaatgtccttatttgtaagatttgtccttatttagggctattgttcttattttgttcttatttgtcgcttgtccgaaaaatctgtcaattttctttataaattctgattggcgtactgtttaagaaaaatatttttaaattttgcattataatttcctttttgctgttaattttgtctaattatttttgtatttgttgtttttctcttttgtttttaatttagcagctgcactaatactaacaaatggcaccgcctaagcgcaaaaatgtttttaaaagtgaatatgccactgaatttcagggtatcacaaaaagcaaaacaggagatgaattcgcgttgggacatttttgccgactatttcacaagcgatgggcctctacttttgcgcaacttttttgcttctgattcagccaaaactgtggtcacatttctcagtgttattctgccaatattcaattgaaaccgtgaaaagtctggcacaaatcaaattgaattacgatctcacttgtcccgaaatgtatgatttgctcatttcctcaccaaaattgttaaaaatgatcatgggaggtgaaaaatataatatttaatgcatttcgatcgaataaattgtaaaaaaaactgatttgaagcaattttgcgaaatgttcttatttttgaccctaaaatcttattttttggccttgatgttcttatcttgaaaaattttcgatacgcgccctgccatattatgaggcattggttgtggtgccgccagcatttgtggcgcaaatgccttccattttggtgaaaaggtcggtgccgttggcattgtggcacaaagtttggcattatttttgtaccaattgtttggcctaacaacggtggtgatggcgcgttcaattttggcaacgctgttggcccatcacttagttgtggcaaaaattaaattttgccattcaaaattcattgattcccaaaaagcaaaaaacataccgtagtaagccgctccaattgaaattgttgtttgagtacggtaatcgtttcctatcatttgttcagcagcaggaagaggattattaattgtttccaatgctattgtatgacagattggcgcaattaaaatacaaagaataattgccgtcattaagaaaatcgcttaataaacctgtttagttttctgactaaaatttaaggaaaatgaaacaaaatttatttttttaattttcgactttaagcaatggcaaaaagtgaatattttggattaaatggtcatatataaaaattaaaaaacaaaatctgataatttgaacaaattttccatttttattcgaatataaaatatttttaaaacacacaaattttttaattataatattacttatgtataagatattatatgtgtttataatgcatataatttttccaattttcacaaaatttcatgtaatattcatatgttatgttgcatattgcgggtgcccaacaaaaaactcaccatcattttatttattattattgcaaaatttttgtatttacaaaaatcctatgtatgtatagcatagtcattattcaacaagatttttttttctctaactcacttcatgaaacgtggcacaatgccacatatttctccattggcatagagaatttataaatttttcggatattagggttttttttattgaaattgtatgtcatagagttataatttctatttttttctctgactttcttcatagaaatgccatcataatacgtgtaatacgtggcacttaccataataaaaagcgatgccaaaggggggaaaaaatcattcaattcactcacttttcattcctttaatattttttaattttaaaatgtatttttaattacaaataaattaataatttacattttgctctactgatcaataagaactttaacaactgtcttcagtcttctgatcagtaggatttattattttcattaatttacattttcctccttcctactggtcagtagaaaattttttgccatttgatggtatttaagccaaataaaagtcaagctcttaattcataattcaactgtttgaaaacaaatattttccatcgaatttttaaattgctttttcaccaaaattggtaattttgtgcatttctgaaaaaataggccaaattttttggtataacgaaaattttcagcaaaaaacaaaaaaaaatttaatatgaggtggggtactttggattcagtaagaaaaggcaaacattttattatttccatagaaaagaggtgatgagaggagatccagttcatcaataaaaattatttttcatacttaataaatttaggaaaaatgaaatcaattttcttaattttatttgcatttttccacgttttaccgaatttggtcgatgctggcaactgtctttctggcaccggtttaaaatatttaaaaacatcttaacatttattttttatttcaaatattaagcgatgtcatgggatgcatattgccaaagtcttggtgaaaatgagtgccatgccaaagtcatcaccccgtgtaaattaagcgataatggccaatgtgtgataaaacgatcgattgggactgtgacaattaatgacaatagtgtaagtgattagggagaggtgaccattgctacacaattaaaagccaatttaacgggatttttggaggaaaaagctgggaccgcgacttgctgggacttaaaaagccggggatttggattttccaccgggaacgggaagcagatcaacctaaatcaaaatatcaagttaaaaaaaatagaaataaaattaaaaacatttgtctctaataaaataaataaaaaatttaaattaatcaaaaattttcaaacaaattaaaaaataaaattaaaatatttttacagaatttaataaaataattgtttttttgtcataaatttaatagcaaaggtatacaaaaaagtgccattttattaggcaaatgttttttaaattttttcagaaaatttggaaagattcttgtcaccgtcgacaaaatgagaggtgcaccaatagtcgctttgaaccatgtgtttggcaagtgaatgattgcgtattttttggtacaatgtttacctttaccactcaacgatgatcataaattaatttttatatccaaaatcggaagagcaaagaaagtgagtggaaaaaaatgatgatttttttgttgattaattattaggcgggaaaattggaccattttttgttgcaacatattcattgttttgttgataaaaaatttatttttcattttgaatacaatttaacaaccaattttttttatgattgtgtgatttatgcagaactattaataaaatatggcgattttctgatgagaaaagctaagaaaagcgatgtgcttaatgtattttattttcatgtttcagcaaaataaataattaagctaaaaatgggatgattattgccaagctcctaatcaacataaatgttgtgaaaattttgtcaatccgtgttgattgagtggtggcaacttaatcacagaaacaaatgtcaaaaaatgaatccaaaattaaaaaatttcctaaataaagtaaatcaaaaaaaaaaaaaaattttttttctatatttctttaacaaattttttttgtgacaaaatgtgcaatatttgaaaaaagcactatgaaaatgtttatcaaccagcaatgacaagaaattgtgaatttaattgctgctacaaacgaaaatatgcttttaatctcataacggatgattgattttgcttgtaatttttggtgtttgtttaaaaaacgggagggattttcatgccaaaaaaatgtttttttagggtttatgttcaatttagatgtttttttatggccataatgagggcagaattttcaaaattagcaggcataagctctgtaattatcagttacttttccatgtctttttttttacggacattggctcaatttttcctcaaatttcattaattttatttgtaattggtgctccttctgtaagtgccgttttatttccgttgtcattacaaccgactttcgaattttgagtgatatttgctaacagatttcaacaaaaaaaggctggtttttgggattacgaggctcaatttgtacggattttctttaaaaaatgataaaatacaattagaaaaattaagaatcatattttgtcgataggaaagccatgagtagggtcgcgacttttagtgacgaaaaatcccgaaatagttaactaaaatagtgacgaaaaagtgccaaaataatgaagaaatagtgaaaaaagccgaaatagtgtcgaatagtgacgtaattttcagccaaaaattaagcaaaagtaatttttattcactgattgcagttgcaaatgagctgctacatttcctttataaaattctcttagtaaatattgacattttttaaatcaaaaattttgtcaagaaaaaaaatttgggggaagaatttttgaaaaaattttccaattcttagtggtgtatttaaaaaaaaattttttggtcgattcttatgggtgtatttttttgaaaaatttttagatcgattcttaggggtgtattttttgattttattgcatttttgttaacaaattttcccaaaaatgtcaaaaagtgaaaaaatagtgacaaaataccaaaaaagtgaattttcactattttaagtgacgaaacgctaaaatagtgatttctagtgacgaaaagtgacgtccaaacgaaaaattttaatgtagaaaacgtt

SEQ ID NO: 10755 - DNA, 1337 bp, Heterodera glycines
acaggcacggggtggacgcggtttccagcatggaaccttcgctcgttgccaacgattggcgagagaaggaggaaaatctgatccaaaggaagcgactacagcgtgaaaacccggtgtattggtcgcgaatattggaggaggaaaagcgagccggtgaggagcgccgcttaagggatttgcggttggagcacacatgggatggctacaaggaaggccacttcgagcgtcggcacaatgacggctcgtttttcaaggcaatgaaaattttttcttgtgtttttatgatttgaatttttcatttaagtctatgtaatgggggtgaggggataaaatgattcacagaaatttacggaaacgcttggaaaaataaaaattggtagtttgagttggtccgtgtacgggcgaccgcctcacacactgagtgatattgcccctcattagatttcgacaacttaagcctcacacccgagcttaatcggtctttggttggtgttatttcatgccaccaccaaactttctcaatcttctcaatccccctccagtgcggcaaccactcggcctatctgtccgcgtgtgggaatcaacgtaagcctcccaatccctcctcagcccctgcccggtgttggcaggtaaagccatgcacccggcctatcaatccacagtggtggcaacttaagccaccaatccctcagcccctgcccggtgttggcaggtaaagccatgcacccggcctatcaatccacagtggtggcaacttaagccaccaatccctcagcccctgcccggtgttggcagttaaagccatacacccggcctatccatcctcgggtgggaagcaacgtaagcctcccaatccctcctcagcccctgcccggtgttggcaggtaacaccatacacccggcctacccatcccgagggtgacgacaacttaagccgcgaatcggatcctcaagctcatgggttggggactttaaagggaagaaagcaaaaaaaaaaggaaattgaaaacattttgaaaagattcgttaaaagacaattaaatgccaaaataaatgacaagcaaaaaataatgtgcattttgcgctacgtcggcccgcgggcgatgtgcaaaaaacgggtgtgactggttcctctacccacgacaatctctgcctttgtacattttgtcgtgggtatgtgacaaaaacttctgtgttcaaaaaacatgagcagtgtacaagcgcctgggggtgtttcggacaaaaacgagcgacggagagcaaaaaactgttgctcttttcatatgagaacgttgagctaggtgccctgagagacgaataatgtttgtgatcggaca

SEQ ID NO: 10756 - DNA, 2383 bp, Heterodera glycines
  unsure (1)..(2383): unsure at all n locations
ggggatttgtatctgattttctaaatcctttttcttcatcccccacccccattcagaattgtgaagaggccataaatgattactggcagcgatatcgagaaggcaaagagtacagagagcggaagaaagagaaaaagaggaaaagatgaaaaagacgggacagcggaagagaaaagtctcgggaatggctacggccgcgggagaaaaggagcaaaaggaggaaaagaaagaggacgaaaagaagggagcggaggaagaattgcagcaacagctcccggtaaatgccgggactgagggcacaaatgaaggaaaagcagaggtcggggaagaaactgatggggcggaaacaacagaggaagcgaaaaaagagatgggcgctgccccgggggagatggtggaggacgagactgaaggtcgggaggatgtgtgcaaaaaagggaattcggaatcggcagatgcgggactggaggttgaacagttgaagaaaatgttacgcgacagtggccaaatgccgacggacaatgccccacttcccctacctcgctgggtgaagggttgtggggcattcaaaaggaaatataagaaaatttatgataacatgattaaaataaacaattagtgagctgtattgtattattgttgcgtaataaattaaaaatggtcgattaatttttaaaaatttttaaagaaattaattttaatgtaattgtggaaataaataaatagagaaaatggaaattagaaattgtaaataaggagaaattttaaaaaatttttaaatttaaattggaaattaaattttaattgaattgtagaaataaataaatatagaaaatggaaattaaaaattggaaataaattaataataataaattaattggaatggaatgaaaaaaattaaaaatgaaattaaatggaaaataaaaataaaataaactaggaattaaaattggaaataaattaaaaataataaataaattggaatggaatgaaaaaaattaaaaatgaaattaaattgaaaataaaaataaaataaactaggaattaaaattggaaataaattaaaaataataaataaattggaatggaatgaaaaaaattaaaaatgaaattaaattgaaaataaaaataaaataaaacaggaattaaattggaaataaattaaaaataataaataaattggaatggaatgaaaaaattaaaattgaaattaaattgaaaataaaataaattagtaattaaattggaaataaattaaaaataataaataaattggaacggattgaaaaacaattaaaattaaatggaaaataaaaattaaatacattagaaaatggaaattaaaaatagtgggaaattttgaatttgttaaataaaatttaattaagttgcatagttaataaatgtgaataaaaaatagaaagtttgaaacaaattaaaaataataaataaaattggaaggaaagaaaaaagaattaaaattaaatggaaaataaaaatattagaaaatggaaattaaaatcaattaaaaataataaataaaattggaaaggaatgaaaaaattaaaattaaatggaaaataaaaattaaataaattgggaattaaaaattgaaacaaattaaaaataataattaaaaatggaaacaaattatctcccccgatgggaagggaaggggctaccgccggcgcgcgctgcgaagggcacaatgtggcggtaaaatttacacccacatttggtgccatatactacttacatataaaatatactaaaaataaatgataaatatttacataataaaaacaaataaatttttaatactttaaaaaatttttgcaatcaataaactttaatcaaaactaactaaaaatataaaacaggtgggtaatttttttaaataaataatctaaagaatagattttcattttccacttatgcaagattttgagcactgcggacacataggtccaaattaacctctaacgcaaaatataaaggaaacattaaacataaaaatattattaaatccaaagaccctatgaaatttatggggcattttttgtctcaaaaaattttaatggacaaaaactgaatcgagatgggctgaacgtggcgtgaagatcaatgagaattgtttactaatagacaaatgataataaacaaaactaaaatatttgtaaaaaaaaactccatggaataaaaaagaaaaaataattgctaagaaatgaaactaaaatattttattttttctgtaatatttttttggcttagaaactaataaaaaaaactctaataaatagagaaaaataataaattcatagaaaaaatattatttgataatagaaatattnttatttatatatatatatatatatatatatat

SEQ ID NO: 10757 - DNA, 2304 bp, Heterodera glycines
  unsure (1)..(2304): unsure at all n locations
aaaaaagcttaacttccttagagaaaaaaataacaaaaaaaatgtttaaaattttggtaaatattaaatattaatattccacattgatgaaatttttgtctaaggaaccacacaacatgaataatatttatatgtttattgttataattaaacaagttaaataaataacgacgcatataaaagaaagaatataaaaataattcttcaataaattttaaaaagtatcataattcagaaaaataattcatctttagaattactcgcaagcaattaaatttatataatagaaaaaagtaagaaagcttttttcaatttaaaaaaaataagattttgaatttttatcataattgaaaaacaaaattcaaaattaaatttttacataaaaagcaaaatggttttaaaacccaaaaatgatggatattcgcaatatcagcgcaagagaaaataaaaaacgcactgagaaaaaattatcaaaattctatctttttaaaataataaatatgtaaatgatttttttttattccataaaacaaatgaaaaataatttaaatagaaaaaagcaaataataaatatgataaattcgttacttaaaggaaaataccggtggaaataatttgttatatataaatttcaattttcaaattcatcacattaggcaaaaccattattaattaaatcaaaatgcaattttaaatatcacaaattattatattttttgaaaatttaaaagaaataaccaatatcagccttttttgtacaattaagagaacaaataaatcaccggttaaaaaacattgattcaaatatttttaatgagcaacaattataaaaatctataaaacccaccaagatacacatttacgacatagattaaatggaataaatatgccgtttttatcaaaacacttatgacaatatataaagatcaaaatatcctatcgcaatgagccaattttacgatcatgattttaaaatttatttattttttaatttaaataaaaataattataagtttaaaaattaaaataaattcaaatgaaaatattccttccgttgtatggccaaaaaccaagaaaattaagatttaattaatagttataaagaaattaataaataaaacaaaagacggaattcttccgataattaatctcaacagtaaacgattacaaaaagagaagtattgacatcaaagatttatgcccgcaaaatcgaaacatgaaagataaaatggaataatatgccgtttattatcaagacaaaagaccatttaataagatcaaaaccatgctaccaattctaaatttaaataaataatcgaaataaaaatcacataaaaaggaaacactgaataacaacactttgccgttcatgtggaaaagaattaagtaaccgaaacgggtcaacaagagggttaattaataattgaattaaaatttaaaaattaaacatagtaaaaagagcaaaactttaaataaaaatttttaatactttcaattttttcaataataaactttaagctgccaaaatgttagggtcgtttctcattttaaacatattccttcagcttttcctattgcaaccttattaatagcaaatttcatccaaaatttgggaaaattttctcggcggtgccttcggtccgcctgaccagactccaatcgtcgggtcccttcaaaaaaatttgtctgcccatcacccccttttcatgtataccgccagcccctaaatttttatttttatttttttcaaattggttatgcgtatttaaatttaataatatttttcgaaatttccaaaattccacacgtctaggccagctcgaactgttccggcaacgtactgtttttcgaaaaaatcgtcataactttggtctaagtcataaattaaacatttttggtttcattcgatagccctaaaggttctttatttacagcaaaatttttaaaaaattgatcatgttgaaaaattatttgacaaaaaagcacaaagttcgtattcgtctttgaaaatatttggacaataataaaaaaatttatagttttttaaatgattaaatgatctaaaaaaagagcactcgaaaatttttttctgccatcggcggacagaattaacagaaaaacaaataaataaaatttgtttttttttcaaaaaaaattcatttattgttccatttgttttccatgaattgtttgagctcaaaaattgtcgttctgagcccatcaaattcattgcgaagtgaattcatttcgctttcattttccttttcgaataaatttatttttttattatttanattattatta

SEQ ID NO: 10758 - DNA, 1845 bp, Heterodera glycines
tttggttgggtttttctatattttttttcaaatttgacgagtgtgaattttaaatttgcttttttcggtgttaatttttgctattttcccactcagtcccaacacttcgcgaagcgattgccgccgcccgctcggacacgcccgggcccacctttgtcgagctgccattggacgtgttgcaaccgtacggcaaagtgctggccgagaccaacttcgttgggcacgcggacaccgcggaaaaagtgccggatgaattgggcggggcgatacaattattcccccccccccattcccgaccaaaattgttaaaactgaaaattttagaaagcgttcaacgaccgggtgcagtgccatgttgaccgccaatttcacgaggcatttgccgccaccgaattcggcccgttgccggtccgtgtgccgacgccggacggcgcccaactggccacggttgcccaactgcttgccaaggccgaacgaccgttgctgctcatgggcagccaggccatgttgccaccggttgagccgaacacactcgtggacacagtgaatgtgtgttgttttattggaacattttaacgaaaatttcatgaaaattatttaatgctttattttaattaaatttcgtaaagttacattttttctagattttttaatttatttttgtttttgaatttctaaaattttaaaaatcccaatttttataattgttttctgggttggggaagcgaattgcaaaaatgtaaagcatttattcgtatattttgccccttttgacaatgccatatttaaaaaaaataaatttcccagttttgcaacaattttcgaccaaataaataatgaattttggctcaatcggacactcccccgacattgaaatttgtgccattctccgtttttgaaatttgtgccattctccgtttttgaaatttgtgccattctccgtttttgaaatttgtgccattctccgttttccctccaattttcagagtcttggcatccccgtctatttgggtgggatgagccgcggtttgctgggcgccgactcgccaattcaaatgcggcagaatcgcaagttggcactgaaggaggcggacttggtcatattggcgggtttaatttttaaaaaaatgcctaatttcgctttaaaatgccgcttttcaggctccgtttgcgattttcgtctctcttatggcaaaaatttttcgcccaacacaaaaattgtcacaataaatcgcagcgaagaacaaatgcttaaggtgagcaaaatgaatgaatgggtagaaaaaaaaacggcaaaactgatgatggccaaattgagggccaaaatgggcacaaaatgcccccaggggtaggccaacccaaccaaagggtgcactatgtttacccctctctctctcaccctccgaattccaaaaaaaaatttctgttatttcttattaatagagttctaaccaaatcaggcccgcaaccaaaaaaaaaaaattcaggaacggcactcgaagagtttttttttggctcctccggacaaaaatttttgtccattatttttcataaatttttggtgccgtgggaaaaagaggataattttaatcattttcgataattttggccatttaagacataattttggcaaaaatataaggaatttgggatccggcgctgccgttaggcaccattggcgaaaaattaggaaattttgggtcaattcgttaaattccggggaaatcttaaaattgttacaaaaatattaaaattatttcatcagattatttagttctgctattttcaagaattcaaccatacatggaaaagggggggggggggttcaaccgaaatttttgcgaa

SEQ ID NO: 10759 - DNA, 2153 bp, Heterodera glycines
gattctatgatacagtgatagttctgtcgtaggaaattcctcaaacgagctgggaagacctgaaaatatgcacatagaaaagcctgtacaagtggtattcaaatttccgagcagttagctgggtctgtattgaccctctgcaggattttcgcatattttttagaagacctttttggcagctttggaatggtataggcatctgtcatgttactccaataatcgccgagatatgcgcgtccgagagtcagaaaaaacaaatgcggtagcattatatataaaaacactgttacaagatacgaccccccccccccccctttccatctatgaattcaactaatttcaaaattctgatgcttttgctttcccacagaaccatgacgtgttttggcaaagtgccgtcgctgtgcaggcggacgtggcgctcactttggtcggccttcgcactgaaatggtcgcgcgcggatggaaatcgccgtgcgggtgggccgaattgttgcgggagcgtgaggccgagactgaggccaaaaatgcgaaacgaatggcccaacggccggcggatggccacatgaacccgctggtgttgttggacgccatgaacaaagtgtgatggtgttccaacaaattcaatctcttttttgatttcactcattcggtgccattctcgaatttgaaaataccctcgtttccgctctactctcggcggcattattgtttttccgccaggcacggtccgggggagggcgcagatcgtttccccacccacgtccattttttttaattgcaaccttttcaaaaacaatttttttataagaaaatctcaagaaaaaaaattcaaaaaatttaacgacgggtgaaatgaagtgcattcattgtcaggggaaaaaatttttaaggatgatgaaaattcccgtttttcttattggtgcccccccccttccaaggcgtaaccctggtaccacccctgttttcctgtctcacaaattctttttctcttgaacagtcggtctaactatgcccctaatggtattgttgtacgccaaatgcctgctttcggggagagggggcgatttgtttccatgtcgttttttggcattagtcaggcgatgccgacaggcgccgtcgggacaaaatgtttttttaatgaatttgttttttaaaaatggtatattttttggcactttgcttccaggtacttccaaaggatgccattttggtggcggatggtggcgattttgtgggcagtgcggcttacattgtgcgccccggtggccccctccaatggcttgacccgggcgcgtttgggacgcttggcgtcggtgccggtttcgcgctcggtgccaaagcggtgtacccgcagcggccggtggtgatcatctacggggacggctccagcgcgtggggccttattcaattacacataataataatatttcgtaaaattaggtctcaatataaacgatgtacaaatcattaaatcgtctcataataattatttgcacttcaaaaatataattagctcaatttttctattctcacatttttcttgacctaattggtgtcattctaaagcctaatgggtcaacaatattttgatcattcatttttatgaacatttattttaaattttttttattaattttaaactaagggtgttgactcgaaaaagcccgtaaaacacaataaaaatttaaagcaacagatatttcaattaattcaactggcttttctgcgccgaatgataaatgccgtgttcagttattcgctgatggactttgacacttttgtgcgccataaactgccggtgattggcataatcggcaacgacgcgtgttggacacaaattgcgcgcgagcaagtgcccgttttcaagacagcagtcgcctgtgacttggacgtaaaataatcgtttttttattcccaaaattgccatataatatatatataatttaaaaattaaaattttggtctgcttacaattagcgcctaatggtccattttggatcaaaatgataatgcaaatttggtccgatgtttttgaaatgaaatcctctaagaaatttccttctattttccgtctcgggatattccaacccattttttatggtaggaataataatttaaattttacaggacacccattatgagcaatgaac

SEQ ID NO: 10760 - DNA, 1542 bp, Heterodera glycines
agccattagcactttcatcatttatttattttggtattttttcaaaaaatgtctcagaaatcagtcgttgaccctactggctggtggcctatttttcaagaattgatgatcaaatgaaaaaaccagcagaaattcttaatttaatgtattttttcctcttacattttaatgaccaatttgtcatgggttcgaatccgctagacagatggtgaataattttgattttttctttaaaatatttttgcatctaattcttttaattcacttattttttttgctgatcaccttaaaaaagtttagtgactctagaagtatttttaattttattatgattttttttaaaaatgaccagttttattgattatccgaaactttgatcaagtttttctgattatttttggcgcccgtagccaaaaaagaaattacataactaaattgaattcgacagatctaaaatatatttccaattttgtaacttttttttaattattagattttttcattatttttgcaatttttttaaatattagcattaatattatgtatgttcatttttacatatattattttcacataattattttttacttcatttttacaatgagaagaaggccttttccaataaattcgtggattgattgacgtttctaaagaaattttaatataacaaattctttttaaattaaaaatattataatgtaaatgtgaatagactaaattaaatattatttttcttcttttatattattaaaacatatttagggtcttttaacaaaatccaaaaaatgctaaatttttttcggtcattccgcaaaaattttgcaatcgaaatttaatctttaagaattcacttattttaaaataaggaccaaatcatggcttttttctcactaaatgcactaattaatgataatgaaaagtgaaaaatagtgtctttttctttctttttttagtaaataaaatcctggtttattcttacatttttaccatccaatttatacaaaactcatacaaaagttaaattttctctaaattaatagaaaaaagtaatattagtaataatactacataggttcctaaatacaccacaaaatggccacctctttctcgtttcttggcctttattttgccattatttggctttgcttctttaatgaacgcgcaaatggcaccggtggaggcaataaattaaaaacaattggcgaatcctcttcaaatatgggtaattaaataaacaaatattttgactaatttattcaattaagtctctgtcgatcaaatcaaaaaaatgcaaaaacaaataaatgcattggaggaggaagtgaaggaattaaagaagcaaatggtatggaaaacgaaaaaacaataaaaaattagattaagggaataggagttttaaagccccatattcagaggtgggttgaaaataaaagtcacgctgtagatttaatttgagtacatacggtaagtgtcttttactgtatttagaaaataagaagataagcaacttattatattcgccttgaagttgaaccccataaa

SEQ ID NO: 10761 - DNA, 4454 bp, Heterodera glycines
  unsure (1)..(4454): unsure at all n locations
aattgaatgaggtacattcaaagggctaatgctcttctacataggaagncttcatagtangnagntnttcggnaacgctttctcgggaaanttanaaaagatggngangnngtnaaatatgatgaattgattgaggattgcatcannattttttgtctacaatccatgaggcaaaattgatcgaagcaacttccgtgtcatcaaggacagtgaattcagtgaagccaaaccaaagaagggaaagaccaaagccacaatccaagcaaggccaaccaaacgcaactccaactcagcttcaatgttggagatgtgggaaaacgaaccacacccacagagaatgctcgcacaaatcggctaagtgtcccaaatgtcactacaccggccatttggagaaccaatgcgaaaaagtgcaagagtggcgccgcaaaaacttcaaagtgaagaaagttggaacgcttagcattggaatggcactcaaatcaatcaacagtgcttctcttataaagataaaagtcctgctgaacggaaggatcgtgaagtttattctcgactccggggcagagatcaatgtcatcgatgaggaaacttatcgactgatcggacagccaaaaatttgggaatgtgccgaaagaggcagaatgttcgacgggacagaaaaatcttttatcggaaagggagaaggacacttcgaattccaaggcgtaaaatttaaagaaaatttttatgtcgccgagaagggattgatgaatctgttgagtgtccaaacaatggatgcatttggactgttggatggcattaaagccaaaatcaactctccgataaatctttgcagcgcaggggaagaattgagaggcaaaacacatgccccaatcaaatccaacaaagttgccggcaaacgaaacaaggacgccgagaaagaaatcaatcagctaaagcaggagtacaccaatgtttttaaaactgaattgggactctgcaaaaaggtcaaagcgcacttagaattgaacgccaacgcacggccaatatacagaaaggcccgtccggtcccgtacaacgccaaagaagcagttgacggagaattggatcgttgggagaaaatgggagtcatcggcaaagttgagcacacagaatgggcagcaccgattttggtcgtcaaaaaggccgatggtagcgctcgactgtgcatcgactattcaaccggactcaacaatgcgctaaaagaccaccagcacccgttaccattaccggaagacatttttgccaccttaaatggaggccagtacttttcgcaaattgatctccgggatgcgtatcttcaagtggagctggacgaagcatcgaaaaagctgtgtgccattgccacccatagaggaaattatgaagtcaaaagacttccctttggcatcaaaacagctcctggcattttccagtcgataatggacaaaatgttggcagattttgacttcgcgacagcctacctagacgacatcatcatcgtcagcaaggaccaaaaaaaacattctgaacatttgaaaaagatgttctcgcgatttcaagaatggggatttcgcgtcaaacgagaaaaatgttcgtttttccaagatgaaattaaatatctcggacaaataatcgacaaaaacggacgcagacctgaccccagcaaaatcaccgcgatcaatgagatgccagaaccgatggatgtctcttcacttcggtcatatttgggaatggtaaaccattaccaacaattcatcaaaaacatgcgcttcgtcagaaagccgcttgatgatttgctgaaaaaggacgccgaatggaattggagcgataaatgcaaaaatgcatttgacaaaatcaaaaaaattttgtcatcaaaattactgctcacgcactatgaccctcaaaaagagatcgtagtagcagcagacgcatctgatcagggaattggagcagtgatctcgcacaaattcccggacggaacgatgaaagccattgcgcatgcatcatccgccttaactcctgccgagaagaactactcgcaaattgaaaaggaagcactagcaataatttttgcagtgcagaaatttcacaaaatgatctatggacgtaaatttacgctcctaactgatcacaagcctcttctcgccatctttggcaacaaaaaaggagtgcggcaatgcagtgcaaatagactgctccggtggtcactcattcttttggcatacgacttcaacatcgaatatgtcaataccaacgacttcggccaagctgatgctctttcacggctcattgccaaaggaaaagatgctgaggaccgcgtcattgcaaacacttgcgtcgattcggaagtcgagtcaatactcattggaaccatcgagaagcttccaatcaaatttcaaaacatcgtcgagtcgtccaaaagtgatccgaacatcaaaaaggtcatgaaattcatcagaaatggctggccgcaaaatgttggaaacgaaaatgtggaaatcagaattttccaccaaaggaaggaacaactcagcatcaccaaagattgtctgatgtatgctgaaagagttgtgattccaacgcaacaccgagccaaaatactgcaactgctccacaaaggacatcctgggatgaaaaggatgaagcagttggctcgcgaatatgcgtactggccgaaaatggaccaggaaatcgaacaattcgtcgagaattgtcagccatgccaaaatgagtcaaaggcgccaaccaaaacgcacctgcaatcttggccaaagacaacaggaccgtggcagcgagtgcacattgactacgccggaccgtttttcggaaaagagtacctgattattgtcgacgcgtattcaaaataccctgaggttttcgaaatgccaacaaaatcgacaatttccacaatcgaaaaacttcgatacctcttcagtcggcacggactccccgaaactctggtctcggacaacggaacgcagttcactagccatgaatttgcaaaattcacaaacatcaatggcatcaaacacctgttctcggcaccatacaacccgatgtccaatggccaagcagaacgatttgtggacaccttcaaaagaacattccgaaaattaaaaggggaaggggctccgagtaaaagcatcgtcgaaacttttctcgtcagctaccggactacccccaatgattcgctcgaagaaagcaaatccccagcggaaatgtttctcggaaggaaaccacggacaacgttggatttattgaaaccgactcccactcagccaatagagcgaaatgaggagatggagcaaaggttcaaccgacgttatggcactaaaattcgagagtttgccgtcggcgacaaagtcttcgccaaacaccgaatttcacaaaattggaaattcggtgaagtgtccaaaaagagaggagtcatttatgacgtggacttccgtgacgagccgtcaggaagattccatgccaaccaactccgtcctcgacacactcacgacgaaaccgaccatttgcaaatttttctcgacgcatttgacatcggaaaacaaaccgatcgccaaattgccaatgagttggaagctcaggatgagcccaaccaatccgcccaagagcagggactcgagaatgatctgagtcagtcagacaacgacgaatcagtggccgaagaagcagatcagcaagttcagccacgccgatatccgcaacggaatagacgtgccccacaaaggtactcgccgtgagccgctcaaaaggggaggtgttcggatgagcctatttgaattatattggcgatctgtctattcaaatccccgccattttgttgttgtcactcgcccataaatagacggtcattccctccctcctggtcttttcccctcattcattttattttgttattttcctccgaccaaattatcttcgctttttatttattgttcgtcaataaacatttatttattgattgtcttccttaaaccctcggaccgaacacatacctactttcttaattgcactgggatcacatctaaacgactatgctaaaaacggggaactaaactgtattaatatttttaacaaattgccgcccttttcgcctaccctgttaagagaaatcttaatttcactaataatttctcaattttcttctataacagattaactcttctatggtgagtttttcaatttctatgtactttattaagtaaacaataattatcaaacatttttctatgattgcaaagcatttaaaaaatcataggcttgtttattttcattatgttttggaaaggtcaattaaataaacaatttttttttgtaattttattaattgtataaatcttatgcaattttctataagcaatcgatagtgtaacaaatagagaagataaagtctgatcaagcacacacctttcattatttccggttaaatatgtgttcatatttaacaa

SEQ ID NO: 10762 - DNA, 4561 bp, Heterodera glycines
tgccgccgcgttgtccgggtcgtctgatgacatttgttgttgttggttgttgtgttcgatgctttgattgtgtggccaagagaataaatgaatgatgaaaaacaagaaaacagtcgctatttataacacttttttacactgacaaattgaattttctcttttgccgccactgtcagctttttcgtctataaaagcggacattcctaaaggatttcgtcatttgggatttaatcgaaattaaatgttaagtgctgatgctattttctccaaaaatgataaaaaaatgaatagttacataagttttttcgacaattttactaaaaaacaaaaatgaaagcaaaaattagaaccgagatacgcatttttcatgtaagttttttatttgcaataaacaaattatctatccaaatgcgatcattttcccaatcttcgaaatgtgccaatgtgtgtcttgcaattggggcatcggtgttccacgtctttgaaagtgtcgatgaaaaatgggacccatagaaagaaaagtgggaggacaaagagtcccgtgatgagaaggacgaggaaagagacctgaaaagaagggaaagtggacaatgggaggggaaataaaactgccgatggtgggaatgttttactcgcagctttgtggcaagtgatcaaaaaacacaaaacggggcaatggaatacttcgaaatttgtgtctataaatttaatttagaaaatcgaaaaggagttcgaatttgctttcagcattttaccaacaaattttcaccatcggcaagggaaccgcccacttcggcgccggccttttcggcgccgttgctaacaacttttttcctgatcaaccaaattaaaatttttgttatcattcgatagctcttcagattctctattagcctgtaaaatttcaaaaaatttcgtcagtttacaaaaaagttatggccaaaaaacctcaattaactttttcttggctttttcggtgccgcgtggcataacttttttatttttgaatcattcatttctatttttacatgtaaatatagagcacacatagagctttcaaatgatgccagattggctaaagctaactgacaaataaaaaagttatagcatttcaaaatttacggcgccgaaatggtccgcgccgaagtgaccccgacccatcggcaatacatattatcggatttggtgaacgtacccaagtaaagaggccaatgacatgttttaattctgtgaagccatgctgctaaaacggttaagaaaacaatgagttttaagtgtgcgaaagaatgagtggggtggggaaatatcaatcagtgctaaacgaggcaactttggtcaataagtacttggcaccagcgatgtggcggaattttgccgtttcttggaactgagtcggcattttatctgtaactcacaaatgcccaagtgtttgaaggccgagtcggaaatcggcattctgtttgtatgtatctcagttcattataatgaattttcttaatttttttacaaggcataaattcaaaaagaaagttttgagcattttttccttgggaatttgttgagttatagataaattgccaaatcaatatcactaacaagcaaaaatagcgccacatccaatgcttggcaccccaaaaatgtcccatcgtaattcttcaccttacagcgagggcaatcgatcagttggggcctatcacttaaaaatttgttcgcattggcgagcaccgaagggcttaagttgcaacactttcaaaattacttaaaatttgaaaattccataaaacacacgaataactcgcggaacggtgcaacggcactggcaccgacgaagtgaacggccgcggagaagagggagcggccgatttttgggacatttgtaataaaggcacaggcggcaaaaatgctttatcgcgaaaagcggaggggggggggcactgtttgtgtgggtgggcgagcggcggagggacggcagaacggaagcgcagaactgcttttgcccctcgtcctttctgtttgcttactcttccttctcttgttattaagctttttagcaaaaagcgcatttgtcaaaaccaacaaaaaattagtgggcgcagacattcaaaggatttgtgaagacggagcaaaagtgggggaggggggggggggtccctttcgtttagataaattcctctgtttcaaatccaaccgcgccaaaatggctagaattgagcaaggaaagcaaaaatctaaagttttaaatttgtgagacgatttcaaaatgaaagcaaagcattcttttataatgagtggaggcaaaggttggaaatatttgaatagaatggaaaatcacaacacattttattatttacattgtcattcacaaacacgatgctgagaagctggggattattcttagctgaaaaggatgaacagtgaatgcaaagtaaattccacaatttgttatttacttttaaactgttgtcggctccgcatgagcacatgttcatgcgcgagtcgatgctgatctgctggacgccctgaatgctgaccgaggccacctgccttaggctaaacccgcttcgagcggcatgttctgtcggaagggaatacagcaactgagggacgacggaagcggacgaccaaacctaagcgacaaggacaaaaaaagaaaataaaagtccgccttttgtttcttccgcccgcgctcacttttatgtcgccctcgctggaccctgcggcaaaaatgtcgccgtttggatccaaacaaatgcatcgaacggaagcactcgcattgtcaaacgcacgcagtgtcgcacgcaactgacgctgtcgcacgtcccaaatgcaaatttcgccgtgttttccgccagaaataagcgactgaaacaaaagacaatacaacagatcaattggtctcacaaaataaatcaacagcgtgttgggcccacctgagtgttgggctgataagccacacaaaacgctccgtccggatggcccacaaatgaatgcaccgcacatttggactgaggcatcaaaatgtcccaaagagtgatgtctgatgattgtgcaatagaattagtctctatcctaagtgtcactttggtcattcatgccgagaccagcagtgaccagaagagtgctggtttgtccgaggaatttgacgtccgatgcaaatttggtgtgacacttttggatctgaaaataagcaaaaaacaacaaattggtttgggtgatttctgtcccctttcgtacgaaataaggcttctttgccggaacaccaggttgtgcctgccaaatggacagcagcccatccccatcgacagccgcaaaacgggcgccgttctgagcgaatgccaatttagccacttttgcgaattggccagcaacacgggcgacgaacacaggctgttcaacgccccattcccataggaaaacagaaccatcggaagagccactggcatcttaaagaaaaagaggaaatgaattttgttacgatagcaaaacagggcagtactatacatacagtagggcagcgatgaatgggcctccaaacggcgaacgccagaaaaaagtcgtttccgcaactgaaaaggaagaccaaaattcaaataaattgacacactaaagaaataaaaagggcacaatgaatcccaaaaaaaaaataattgatgcgaaataagccattcaattaatgattgtcagtcactcggacaacacaaacgaaaacggaaacacaaaagcacggattgctgctctaccttttgaagacagagtctgcttctgtcgacaatgaaagtgtttaaagtctacaaagattcaaaaggttatacggtcagtaaattccccgccattcgtcgcgtcagaaaattaacgcttcaagcgcatttgcccgttccgtttcccacaacaacgtacatgggctgatgtttgcgtggggatgttcttgcccggctgaccatcgcttcccgggatcagcaattggtagtcatcgttgtccttgagcgggtcacgacggatttgctgcattgaaatgtccaactcggcccaattctgcgcaagaagaaaagagctggtcgacggatagtgctgcagacgggagacgacccgctcatgctcatccaacacacggtcgatgctcagttcctgcaattgttgtgaatcccgaggggagggaatgtcattgtccacctgaagctcacgcccagtggagacgaccatcacaccgggcctaatctgtaaaaagttgttcgccaaattcgacaattgctttgggaccgaattcgctgcaaatgcgacgattgggtcgtgctcgcggtggactaatttgattacattcaaaatactgttcaaatctgctccttttgtgaccgaagaagcgattttatcctaaaaacactgccaatcatacatgaaaatgtgggggggggggagggtcgaacaaaacggcaaaaatgacatcggcggaagattaaacagcattttccttttgtcagaccgaccctcccccctccagtttaacgttgctgcaaatgaaagtttaaactattcaattcaccttcgcttttgcgaaagaatagcg

SEQ ID NO: 10763 - DNA, 4786 bp, Heterodera glycines
tttgcaggctaacaaatctctccttagttttaaaatcgtttgaataaatattttagcctattaaattttgggattatttttctaggtgaaattgaagaataaaattgacaaatttttagagagatttgtccgtattaaatttttatttattttaaaaaaatttttaagcatgcggacccgaacaaaactgcgccgtgtttttacaaattcacaaattttgtaaaagattggctttcttgtgttaatgcgaaattggtcaaacaattaagttaatttttaatatttttttaattttaatgctttaatttttagttgtttgcccacaaaattatatgttaaaataacatcgaatgatttcttggaaatattcgtaaaaagtgtcggcgaaaatgttgcacagcgaatggaccctctctatggtagtgaataggcccgaaattttgaaatggccgggactggatccggcacttggaaaatggacggagggaactccgtttttccggcactaccggttccggtggtttgtccaaaaaaaggggaccggggccgggaatcccggcgggcccccggttccgtccgggcgggctctaatagtgaaattatttggcgaattctttttgaatttgaattcattaactaaacagagagaggaaaccattttgaattttatttgactttatggcaatttttcattttaaatacatcttactaataaattattaaaattcacacagcacttgacaaccatacgcttgtgaaattggaccaaaaatggcacgacacggccaaagtgtgtgcctttgacaaacagtcgaaattgagatgttttgccgacaaaaagtaattgcataagccaaatgattaatcgctaaattaattttaaactgctaatttaagctgtgccgtcaaagcaagtgaaaaggaagtggaaaaagcagtcgatgagtgctatatggagcacaatgtggtcaatgttcaacacaaacgttgtgaatgcatgggaaacaatgtgccatggtgaagatgacactgaaattatttaatataataataattaaatattaattactctgtattttcaattaagctatggttatggtattgagaattactgtgagaaactgaaatgccaaatgttgcccgaccaatgttctgtttgtgaaaatttacgaagtaaattcggtggaaattattagtcagatcagtcagagccaattgaccttcttatcaaaattgttttgcataaatctgaatgaatttaaaaaaatttggttcacgaaaatgcgtcagtggaaaatgggtttagtaaaacaatacctcgaaagtaaatatcggcagcattttgaatgttaaaaatttttcgatttttgcctcggaaatttaggcgatgtttcgagaatttcagaagtcaacggcagagttttttagtttcaaatcacatttatccgctcccggaaaggcgtcagtgacaattttaatgtcataaaaacaagttccctgggttttcgagatcactgatcaacgaatccgatatcaatttcggccaattccaaaccccggacgcgaataattagaacatttagattttcgactttttgtttgaattcgggtccaaggttcagaattcagaacgaacttcctatataaatttacttttatactccgatatgtagttttgatacagaattaattttaaaatatttatatcactgacgcatttaaaaaaaatttaacttttcaatatggtattttcacttgaaaaaataattaattcattttttgaatttttcttgcaaaaaattccggtttgatcgaaaatccacgtcccgggcttatttaaacttttgaattttaaattattagggcccggatttatatggacaaaaaaatccaaaatatggacgaaatggtgcagtgacaaaggacccacagacgaaggacccacagacaaaggacccacagacaagggacccacaaatacagaggacccacggacaaaggacccacaaagacagaggacccacggacaaaggacccacagacaagggacccacaaagacagaggacccacggacaaaggacccacaaaataataattaattaaaatatattaaaaaatggaaaaataaaatgataatcatcaagaaaatgagatattttgaaaaaggtaataaagtatattcgtttttcaatgtttaatcatcttcaatcggttcctcgttttgctgccgtactggatcaacaccacgaaatttaacgaatttagaagtggctttcaaaaaattttccgtgtccatttgatagtaacgtccaatgagggtcaaaagtcgttcgtttgcctgacggtactccgctcgactttacagtgctggttcttggccgcaatccaacttgaccgaaattgcattaactcgcacaatttcctcacgaatgccaccaataaacgcaaaaatgttggggtggggtgaaagaaatttagcctgtatctgatggtccccatgattcaaccgaattttgtcgttcttgggagaggttgaattgttatttccctattgttccacatttcgcgctgaaacattgggcgccgagtcggacgaccgatccaagttgacttaaaatagtcaatgaattcaaggtgtgcctgaccattcccagcggaatttatgaaatacaatgacaatgcgttaaagtgctgtgcaacgtcggctgtttaataagaaattaataaggttccgaaaaatgttttcaaccgattttttaaaatcgataatgatgttgtcaggctgtcgacaattcacatgacataaaatcacacgcaaagcattcagataagtgttttgttgcttatcaggcagaaggcaaaaaataaacggaagaacacggcttttgtacaagccatgaataacccacaattgaaaaaacatcgaaggagctgaacggaaagtgccgtcagctaatcaagttgtacattgatacaaacgtgtacagtcaatttgagtgccaaagatgatcatgcgatgaggatcttcacgttcgctttcgtaaatcaaaaaatttcccccacgatcggtgaaccgtaaatcctattataaaaataagtttggtcggaaatagattgtaccgctggtatctcgatatctgcgagtgttttggtatttgaaattgaccccggctgcatgacggactctactaacagctttttccattgacggaattaggggaaggcttgcaataacttcatttgacgcaccagcgaggcattcattcacaactgtgcgtggcatatttccacgtgatgacaatgctgtgttgcggacgcttctgttgatcttagcggcttcacatcgtgttggagaagggtcatgattgtgcggctttcctagttggacttcaactccagctctcatcccgatagtttttgctgtcgcggtgcagttcattgttttgttttggtcacagcgccaataaattaattcccttcgtgcttctttttttggtacatatggccttcgaaagcgagttcgtagccgcccatttgtgaaggaaaaacgtagccattatatttaatgaattttgtaaatttagttcggcttttatagcacttatttcaggctatccgggcaaatccattggcaaaatttaattctaattagttaagaatagtggtttttggtcataaagaattttctcattaataggaatagtgatttttgatcatatacacaccgagtcaaaaaacgagacatgtgtcaataaagagagagtgcagagaaactttttgtctctaacttttctctccttttggcatactatctaatatttttattattaagaaaaacaacattccttctctccatataactttttttctaaccatacaatctgcaccaaattttgcatatcgatagagaaaaaaatctgcatcgatttctatgtttattatcatcgcttaaatgttgttttaaaaagttataagataaaaaagttaaattattattctttttaaagatttaatggctaaaagaactttattacggaagcgacagaccaaaaatgcacgccatacgcatgagaacaagcgggaggagagacgaaccaaaatggcaaaggcgacgaaagcccgcctggccaaaaaaagtgagtttttcaccaattttaactcaaaaaattattttttttttttgaatttcagccgcttcacaatcgaatcccaatgccgaaatgccacagcaggacgaagcagggccgtcaacatctgctgcatccgccgaagaagcgatggaaccgccgccaccaactccaggaccagtgccgacgcccgaaatggacgaggaaattttggaattcgacgacccgccgccgtcgacacctgccacaccaattggcgatttggtgccgtttccgtcaacaccaactgcgccaatggaacggggaacagcatccggaaaatcctcgtccacgccgatcaaatggaggcccttttcgagacggaatggggcaaaaaaatttgccaaacgatggcacatttggggaaaatccaaattttcaccaaagtgattgtttcatttttttgtgtaaatattttttttaaatttaaggcccagctattgtccccaggtgatttggacggactggagaacggcagttgatcagttcaaggcatttctcgacgaacaaccaatggtgcgaacccttctttcaaaaaagacaaaggcccatttgctgcttcaccactttgttccatttgcgcgccaaaaccgatttttggggcttttggatgagcagg

SEQ ID NO: 10764 - DNA, 3224 bp, Heterodera glycines
tttcactggttttttcgatcacggtcacgattcacgggaccaattcacggtcacggtacggttccagggctttttcagtcacggcgcacctctagtattttaccattaaaattttaaatttttcagatttcggaggaggggagagtttgtattagtaaattttgattaaaagtttagaggtattatatgtttctttggacatgcattcaaaagcgctctttactgatcgagtttcgaggaatttggtttaaaaaaatcggttacggtaattaccagtttttaccgttactgtaacagtaaattaagaacttttacatgtgctagaattttcctcttccttccctgctccacacctaagcaattgcgggggccagcagagaacggcaaatagtcatatgggctacgtttggccatccgttcgggcagaaaattgtccgggtcaaattcccaatgccttggccacacctaaaaaaaattaataattaaaaaattcaaattttttcgatagcatttcgccaaaataatttttaaaattgtttttcgttgtggtgaatgatcagtggcggaatggcgacggtcgccccgcggggcaaagttttgtcaccgatgcgcaagtcggcctgaagctcacgctccaacacggggaacaccttaaaaagtcatcagcaacatcagattcattataatttatgtgccagtcgggagagaaattggaaacaaaattttacacgaaaaccatggcactaattattggcataaattaatcaccggaaacatgcgcatagtctcgcgaaggcaccggtccaagtatggcaatttgttcacatcagaggcggtcaattccagctcagtttccccctgagttgctactccaaaatggtcagcaatttcggcacgcaatttgtcttggaaatcgggatggcatgccattgaccacagaaacctggcattatagatggaaatattttgtgggcaggcatgtaaatgacgcaaataaatatatattttttaaatgaattcgaatttttaaattttaatcgaagaaatttcttttttttttaattcattaaaaattgttatatattttagattaattgctatgtataaactgaccacatcatgccatgagcgattgtgtcgtgccctgaaattgtccaaagtatcgaatttgagaacggcaatttcataagtttttcttcttaaaattgaagcccaaattcggaatttgaattttttaatgaccttgcatttaatataatttgtgatctgaattatatttattttggcattttttgaatttttcatgtaaaataaattctttaacaacaaaaaaattcaataaaaaagattttttgttgacatgatcacattttttggcgatttgcccaatattctttttcgggaaatttccaattcctcactatgatgcattattaagttctggcatttccgacccaatcttttacggcatttttgctgctaattcttctcacctccgaacatgaacgcgtccacctgctccctcacttgctccgtgttcaactttcgctcctcgcgcagtgtcagcaaaaagtccaaaaatgccataattttgcctttgtacagtgatccttcgctgtgcattagtccgtcctttcggatgccaccatttgcctcattaatgcgaattcggtcctcaacaacctaaaaaattgaaaaaattagattttcaaaattaaatatcggagtgaaatatttgaattaattgcattaaatttaaaaacaccggaaaaatttttaattaataaaatatttaaaattatcaagtaataaattcccatttcaaataacaaagttgatcaattttaatgcatttttaattttattaatttcccatttaaaataaaaagttgaataattatattcatttttaaataatatttctattttttaaattatttcatttttagctttgttaatgtaaatcattaaagctcattctaagaataaatttaaacatattttattaaaataaaattctaaaatagtaaaataaaatttaaattattaaaaatattcatcattcaaaaatctcattaaattttgaatttttttccaattaattaaatttgcctttgtgctgaatgccttcagcgctttgaccgcttttcgtgtcgcaaagccatggccaaacaaataccaagtgatcgggaacaaaatgtacagtgggccaagtgcataaatggcatggtaaatgccgaattttttgatcgcttccatgtaattgcggccaactttctgctcaaggtccatttggacgcccatcaccgactcttcaaaaggcatcacaaatttttacaaaaaattcttgtgattgatcattgcctaatcagataatcatctgaactgataactataaaatagggacagacagtcagattattatcaggttagagggataattaatcagtgattagaatgaacgatcactgattaaaaaagaaatttactgattattgtatctgattagataaattaaatactcttaatgataattatctaatcacattcgattactgcaaaatgaatctctatttattggtaacgaaatgtaatctcaaatgagtcaccgacctgtcacgttgtacaatgcacatttgatcactaaataatataattaaaaatattaaaaaacccaatttaaattttattttacacaatggtgacaggtccacaagttcgcgccgtccctgcaattcggccaaattttttgtcaacattcgtccatatttgttgaaggtgggcgtgtactgttccaacatggagaagtgaaagatgggcaacaacattcggcgctaaattcaaatgaatgtattttgatacggtaattagaagggatacgatacggtaaatttcatttaataaacaattttttatctaaatattgaaaaaaacttgtttaaaaagagatagactgataattcgaaaaagtatatgtgaaaattcatgaaatcaaaattttttcgggtgcaaaagacaaaaagcccgaaaaattggccgaaagacagtttttcaagcgtgccccccccacccaagccccgaaaatcctaaatcttagtaatcctcggctgatttatggatttatgggactcacttggcgaagccaatggtccccgtcgctgaccaaaacgccgttgcccaacaagtggtgaaagaatttataatctggtccctttttcatttct

SEQ ID NO: 10765 - DNA, 2210 bp, Heterodera glycines
tatgtgcaatcgataaccgtttcaaaattaccaaacggttttggggaaacatgtgggcctggccgaggaacggaattgtctccggaatattgtaaatgccattggaagtgcggatgaagcgcaaatgggtggaaaaaatggcaaaaatacgccaaacaacgaaaacaagcagcacaaccgcaacgagaaacagaagcatttaataatgaggataatagcaatataaataaaaattaatattataagaaatttattgaaatttaaatgtgtaaaaaattaaaatggaattaaatttatttaaatttagttaaaaaataaaatcgaatttaatttattgaaatcctcgtcgctaaatattttaacccttttacagaatgtataatttgaatttaaaagaattattttttaaataaatatttataaaataaaaaattatatcttaaaaatgcattttaaatattttaaaaataattttgccttcacattaatgagtcttaaaaaagatataatgaaaatagaattaacattattttggccttgcactgttttttcgttaacatcataaaaaattgttgtaaaaaaatgattttgcccttcccaaagcaacagaattcgaaagagcagagattacgccaattttaaaaaaaactaaaaatcataaatggaaagaaacagtgtaattggtgcttgggagaaacctcgctccattttttattgctactaaaaaaaattatgaaaaaattgttgaaaatattttaaaagacaaaaattgtagtgcttaaaagccaaaaaaatttaatcatttgatgtcaattgatagccctaagtgttctttattagccttgaaaatttcaaaaatttttatttgcttttaaaaaagttatggccagaagagcttaaaaaaggtttttcgaacattattggtcataacttttttgaaagtaaatgaatttttttgaaattttataggctaatagagaatacttagggatctcgaatggcacatcaagaattaaaaatttgattcatttaaaccaaaattataggcaaaaaattttttttaatggtttttttagtaacgcccattttgatggtttttaaaggtttttgagtaacgtcataacatccattagaagggcagagattatgccaataaaaaaaatatcaacggaagatcattttatgtaatttggctgatgtattaaactcgcatcattttttgctgcaacaattttgaaaaaattgtgtgaaatttaaaaaaaaatatttatgtcatcataatagaacaatgtgctttttgtccttaaatggtagtgctcttaaaatgtcgttgaacaatttttgaaaattttatgtgccctgcggcgacccaaaaccttcaaaagtcagcagcagcaaaaaggcgtgcaaaaaaaatgaaattattgtgcgcgaaattgggccaaaaattggccagtttggaaaaaatggttgaacaatagaaaaaacaggttttgctaattattgctgtaagttagtcgtgactcttcatcaaacaaaaattaaataatataaaataatgaaattggaaaatagaaaaggtaatatttaaataatttttttgtttccaattttaaatggaattaaattttaaattatttctgtgccatatcacattcttgaatttgaagacacgttttgtcaaatatttagttctcttgacatggctaatttttttgtgggttttaaacttgttttgggtcaaaaaatttaggaaaaacttttttcggatcgttaggacaaattgttgtaatttaggggtcacataaacttttctaaatacctacatatttttctgactgaaaattttttcccccccggtacttaattattcttatgttgtacctagcgaatgctcaattaactaattacttttttgtgtacaacaaataatgtgagtaaaaccacggcgcgccgcgcaaaaaaaaaaaaaatcccgcgctcgcggattccaattgcatcggtcgcgggaaaaacgccccgacttgcggattgcggtcgcgctccacactgttccatatcacgcttggatttaaagttctctgaaccagggtttttttttggattttcaatttggatcgggtaagaagattggggaaaaaaaattcggatcggtagcacaaattgttggtaaaaaaatttttctacattttgttctgactgaaaatttt

SEQ ID NO: 10766 - DNA, 1568 bp, Heterodera glycines
  unsure (1)..(1568): unsure at all n locations
atagtctaaatacccaattaatttccagaaattccattcacaggccgttgatagaaaatcagcaattttttcttatttgcataatgtatcggccatcttcttcacatcgttcagctcaacaggtgtggcgtttcttgtcgcctttttcatttaaaaaaaaaatttttctttgttcccaggaagccatgcgccctcctccaaaattgcctgacaggtaagacctggaaattgtcaatgtattacttattaattaaagtgtaatgtacaaatatatgcttaagcatttacaagcttgggtctcaattaaaaaaaaaaacactactagactaaatgcatttttattctgacaatgagcctagtccattgtaacattttttggaaaaaataaataaaaatttttcggcgttttgttgcaaaatgtaatttgctttgtccaattccgattcccaacctaaattgaaaaaaaccgaaattcaaaaaatttcaagttagggataggaatggtcaaaattgatctcagattcgtgatcagcgaccaacaaaaaaaagaaaaatactcaaaattacacacatttaaattgaaaatttttcaggcccctggtcccgtacatgcgcttcagcaagaaaacgtggcccaaagtcagggcggacaagcctgacgtgccgttgtgggaactgggcaaaatcattggcaatttgtggaataacatttcgccggccgaaaaagcgatgtacaaccacgagtatgagcaggacaaagtctccatttttaattttattattcagtgatttgtacaaaaaacgtgaccggacggtccggtaaaaacctaccaggcttacatacattcggcataactcaaactaacgaaaaattccccgagttttcatttacaagaaaattttgtttatttttttaattcgggaccattttcacaaaaaaaaattcccgggttcgcctgttgaaatttttctaaaaattctttacaacgagcgaattagtctatgaattgagttagaaaaaccatttttcaaaaataaatacttaacttattaaatttttctttttaagattgaatatgagaaggctatgaagcagtacaatgcagcctattcacaatatatggccagcaaaagtcgagtgaaaagtgcacatcagcagcatcaacaggtcgaattttggtggaaagggaaaactgggcgatagcctcggatttttttttttggtataggtaagtccttttcaacatggactgaattgaagcaatttattatcattcggtagcccaagtgttctcgattaccctccctactaaattgtgaaaaaaattttttgttaagtttcataaaaagttattaccagaaaatttcaaaaaattgcttttacgaatatttgttgcaataactttttgaaacataacgaagttttttgaaattttacaggttaataaatatagaatacataaaatcagacccacccgtaacatgaattgataatttgcataaatatattttttgaaaaatgatttttcattaaaaaaaactctatttgcctctgancatatgccttc

SEQ ID NO: 10767 - DNA, 2274 bp, Heterodera glycines
aaatagtgacatgagggaatttctcaaaaaatatttcgcaaattgattttaaatttattattttttatggtaagaaggggaaccctctagatcaacatagcctgatttttggtgggggcgtacaccgttccaattttttcgtgcgctctttcgttcatacatattgggtcccaattttggcattttgtccgttcattaaatttttttaggcaattagagcgcgcattgaaggcgacaatttctgtcgatgcgaaagagcgctgggacaaaattgctacgatggtcgacgggaaggacaaaaaggagtgcatccgacggtacaaaatagtggcccaactggtgaagaaggcaaagatggacggtggaggtggtggccaacaacagcagcagaaataaatgcgcgcgggtttttgaaacattttgaaacggatttatggccaatttgcgtatgttgtttttcgactcaaatactctctctttttgttgattattgttgtcgcttttttgttttgcgttttattattgtagcttttaagagtaaacattacaacttttgttgtttaccgggcccacgcactttatgggcaaaaccggaaaacgctgcacaaataattttcattttcgtgaatcattgtcagcatttattacaaattctaagtgcaaattaaatgtgattctaaacaaataaaataattttaagggaaagaaaaagtctaatctgaaaataaatggatgatcgatcaactttatacaaatctcgagattattattattgttggatattcaatatttgattgatgtttcacgtcatccgctgatcactccggcagcgatcagttgcgcctgcagtgcgtagtaaacggccaattggtcctccaccggcagccacagagtttgttgcacaattctgttcgggtttggagatctggcaaaagtaaaatgcatcacaatagttggaattcggaatgatgaaatgaaaatggggcggagagaaaccgtaccggacgaatgaggagatgtacacattgacaaaggagcccatcaacagttgacagtcgaaacggtccatgagaccgccgtggcccggtataatgtcgccaaagtccttaacattggaaattgatgattatttccagcagtttgtgtccctccacccttttttaggaggggggggggggtcgcaagttttggaaattttcttaacaaattcattaaaagtcctaaaaaattttcccggcggcacctagcggcaccgccgaaccccaaaaatctcatttttcttaaaaaattggcttaaaatcgcaaaaattggccatttttttgaaaaggtcgtcggcggccgaccccccttcgcaaaaattttgaccgacccccccccccaccttttttatgtatggttttcttggcaaatcccattaatgtaaaaaaaacctgaaatcggcgtcaacttttttttattttcatgtccatttgtcattaatttggaagaaatgcaacattgattttacgtttttttaattttttcgttttcacagatagaaacaatcggctgatggccgaactgttttcgccctcttatttgcccgacccgcgcgcctttgtgccccaacagcgcattgaccattttcggcgtcagcgcatgtcgctggagcagcaccaagtgaagtccaacgaggagttggcccgcatggcggagctgttcagccagcgcaagcgggccatccaacgcgactcggaggcgtaccatgtgagaacaatttaaaaaaaaattctgaaatttttcagagcttttttggaaaaatgtttaaaaaacttattgttagtaattaaccataaaattttgagaaaatttcaacgattttttggaaaatttttgaaacaacaaggcaagttcatcataaaattgaaaaaatcgctgaaaatttaaaaaaaaaatttcttgaagttttcttatgaaaatctcctaagaattttttctttgaaaaatttttaagtttgaaatttcttttttacaaatcttcgcggggggggggcggaaatgaatacccattttttaaaaatctgtttacaaaatttatgggcaacacaattgagcgtttgatttatgtttcattttttttttactatttatcattttgtttcaggaaatgctgaaaaaagtgtgcgcagaacggccccgggtggaccagcagcggtgcgaagagctgaccgagcagtacaaggagcagttgttgaacgcatgggaccagttccagacaaagcaggccgcaatcc

SEQ ID NO: 10768 - DNA, 4978 bp, Heterodera glycines
  unsure (1)..(4978): unsure at all n locations
gcttgcatgggcctgcannggtccgggataaaantttcgccgctcaaatttaaaaaagaaaaattcttgccagtttcggtgtggaaaataagtggcaaagcattgtacacacacagccccaagccccaccgaccgctgatcatggaccgtccgccggacagactcgtcaaaaactcgtcgcaaagccacgcctcgggccgtgcgccgagcgaaccgatggagctgaattggcccacgaaggctttgtgccgctgtctttcctccacactgaatgcttcgctgagcagccgacgcaggcgcaaatggccaaaacggcacgaggcatcaccatcggtgccactcctttggaagctgggaaaaaggcaattagttaaacgattgctaattgaaacgattagcagctaatttaatagtaaaaaaatgaaagtgaagaatcaaatttcgacatgcaaaaacaaattttgaattgtattttcttctccattcttcccaaatgaaaaccccaccgtcccggcaccgaagcgacaattcggtccttaatatggctgaagtcggcccgttcaatgcgttccacccaaaattggaccgtccgatggacttcgcccgcactcggagggtaagcggcgcggagatacgccaccaaatcgtcgcggaatctttgcaaaattggcacagaaattatataaaaaccggcattaaaaagcttttactcttatggaaaataaaaatgtttccctacaataagtgtccaatagagtcttacaaaatttttctcgagatttgtgtaatgtgaaaaccgagggtacctttgttgctgtcgtcccgccgaagatgtgctggcagtgatggattgttcctcaacagcagtttcagcagaagttaaagcagtagtggttgtgccgccgctgttaacaatggcatttgctgtcaccgcaactgtttcccctttggcttttttggcagccatggcaaatttgccccgcgcatggtaaaacgcctgcgttttcgcgccccaatcttccgacaccaaatttgccgtgccaaccaccacgtgcagtgcacgaccgtcctccgactcgaacagcgacagtttggcgtgatgggtgccgtaggcgaacggcagtggtacgcccacgcagcgcacattggccgcgagtggaggcggcacggcggagcgcaacgcgtccaagtggcgactacccacgacgaaagtgatcggacattggcgaagccgacgcggagcgtactgcctgacggaggacaaagattaaatggagttaagggagcgcggggacagacaaagtctcgaacgaaaacaataatagacaatttgctcgtaatggccatagggagggcagggagaataatttccacagcaggcccgtgaccagagggacaaaagggggagatagttcgcccgacgaaatgaaaaattatttcgttttcccccgaaaatggtgggtttatttgtttactaaattttccccggcacctaacggcaccggcggatcacaattttcccataatttttgtttggtctcaaatggccaaatttccggattttttcgacggtgccgaaaaagagtcggtttgactgaacaagttttttgtcccgcagagcaaaaaaaaaaaaagctgctctcaccggcttctgttgcttttagccaagtaaatgaaccaaatttagtgttaaaatatttttttgcgaaatcagtggcaatttaaaaaataaataaattccacctgagcacccattgggggtcgatgcagtaattgaagtgaatggaagcggacggacgaatggcacggatcaattcgaaaagagacagcgccctcggcacggtgccatcattagctctgtcattagcttcagcacccaaacatgcgaccttgaccaaatgcactctgaaaagtattggtggctaattctggaagcagttcgtcccaggccacaggaaaaattaaaaattttttaccgatttattttgattttggataaaatcgaacgctaattagtatttatcataaaaattaaatggttggtaattttgaagaaataattgaagctccgcatattaaaaacgcacccaccatccaccaaatcggaaacggtcggttcggatgaaagctgaaaggtttattatttttgcttcaaagtgaaaattttttacattttccacaacttcaatttttgacagtttctcatttgaaacaagtctctgttctccgtcaactaattgtcgcttcatcgtgaacaaaaactaattaatgttttaaaattttaatattttttaaaaatttaatacaaatatatttttgcaaattttacaaaacattcgcattaaacaatttgtcattcatttatttatcataaaaatctgtatttaaaaccaataaaagaaacaacaacaattgatacatataaaatgcaaattgtacaatttggaaatgcctatcaacgcctattcattcatctgtttcagggatggagcgcgactgcaattcgcggctttttccgtctccgcttcatccctgaacagatttttattgggacaacgatatgtaaatttttgttcgaattgacattacaaaatgttattgaattatagtaatatacataaatatttattagacaattttatgcgattgtactggggctggggcaaaagtttgtgtaaagtttcagaggcactttggtttttgtgtaaggccacacacggggataaaaatggtctctatgcacatgtggaaatgaacaaattaataaaaatattaagtaaatacatggaacaaattgaatgacacacacacgcacttaagtagttgagaaatgcatgaagcaattattaatttggccgcacttcattaattaaatagcaaaagcaatttggttaattgtagtcaattaagtagaataacataaacaatatgagacagaaaaaatggagaagggatgaccaacactcgggtggacgatgaagcattttgaattgtgctaaacctgaaatttttttgcagggggacgggtgaatacagaaaactttttgatgacctattttctggtattatgcatttcaaatggcagggtatggaaccttcacttccaattacattccgaaaattagcccgaaacaaatcccgtccaccaaattcggcctcccgttctcaaacaatcaaaataaaatgcgaatgaccggtgaaattcgaaagaatgcaaaagccgttccctcctcttttttaatttctatgagaatttgatgcattgtgtgggcttcggctcgttgagacgcttgcaaaggttttcctccaacgcgtaaaaggcgtcgttgtcgcgccgtccgtccagcaccacccacggcacaaagttgaacgcgtcgccgatggccgccgtccgattacccgccagggcgtgcaaatgccgtccctcgcggcccatcgcgcattgccaaagtctgtgagaattgttaaaacagtccaatggaaaaaacccggagccgttttctcccctccccccaatttttcaaaaatcccaaattttttttaataaaatttcaagatttttttaatttcaaaattcaataaatcgtataattgtgaattgaaaaaggcaccgatcggacgaagaatggcctgccaaacagcttttgaacgcggcgctcacactttccttgccctgcacacagccaaccaacggcacgaaactgtcggcatcgggcagcagatcaatggcacagttcatcagctgattcaacgcgcactcggtctgtccatgttggcactcgcaactgacaaatgggggcaaaaaactcaattaaattttgcaaaattttccagcacggtgcttttggcacaccgtgcgacttaaatattttattgtactgttgaaaatttgcaaataaataaatttgtagtcgaaaattctgaaatgctatttttcccattgtctttttgttcccccacccaccgataatcttcgccctcctccgcctctgtccgggcacattgggctttcccgaacggcacaatggtcacattgatgcgattggttgccccgagacgggcccaggcgggcaacaactgacggcgaacaaaccctggcaatgtgggaagttttctctcgtgtaatgtgttaattaagaaaatttttctagtgttttttacataatcaaaaaatggaaacttttcttacataaagaaagccacattatcagacagaataaaataaaacatcataaattgcaaaaaataaataaataaaattcaatattttgtttataaattttaatttttcaatttctcaccagtcgtgtcaggacaaagagcctcctgaaaatgaaattgttgaaatggagaaacaatcaaaacagaaatcaattcaccatgtagacaatcagagacaccatgttgcccttctttttcaacgtcgttttctgccccaaggccgactcatccaaaaaaggcggtttcttaaaaaagaaaacattaaaaaatatattaaaaattgaattaaatgtttatttttttaattacggtgaaaagggagtttttaaatttgcagtagaccaagtaattttttgatttaaaactcgattaaacgatgaaaggtcaattttcgtcaaaacctcgtcctccgacgaagaaaatggaagagggtctacgccctcggcagatttgaactcggcccggacatttcgaatcacaatttgtccgtgtgtaaaaaggacaaagtgacaaataaaagtgaaaataacgataaattttgacgggaaaattgaggagaaaaaagtgccgttggcgctgttcaatgacgaaacgttcatggtggaaagcggaaaaaagaacaaataaacaaacaatctttttgttgtatatttaaaatgttcaacatttgttggtaagcaaaaagaattttaatggatgaaaagcggggagaaaaggaatggagcggtgacgaccctttccataaagaaataatcat

SEQ ID NO: 10769 - DNA, 917 bp, Heterodera glycines
taaattttatccagaaaaaatttaaatttaagcatttttaacaaatgaatgaaaattttgaaaaaaaaattccgagtgcgcctaacagcaccgtcggacccccattttgcctttatttttgaaaatttaatctatattggtcattttatgaccaaaaacggctacaaatccccccttctaccctgcgacaaaaattttgaaataacattggagaaataatgcattttttcattacgattccgcgctcggaattttttttttggctacgggacttttgtaaatgtaaaacaggatgttatgtgtggcttacgaatatttaattttcttgtctattaaaacgttcaaacctgcgggagaagcggcgttcagtaaaaagaattggacattattttgttatgatatggcgggcgataaaagcagagaagctaaggcctcgaaaatgaatgacatgcataaattttaagtagcaaaaaatatttgtgtgtaacttgcgccgaacggttcctaaaaagagcaaaacttttaggaaacaaaaaaaatttaattgttaatttggcaaaatgtttaataaattcgaaataattaagtctacaagtcacaaatagttaacggctcacagctgatcatgctcataaaaatgtctctacagcagaatgatatctttgcatttgtcagcaaagaatctaaagttaatgcaacattccattatctctttatgaacgtaattatggcaaaatggaattttgtgtaatactgtagtttgccccccccctttttggaaaaaaaatttttgcactaaaaacaagtttgcaggggttttgggggtcgctgatcacgaacatccatttcggctaatttcgaatcccggacccgaattcgaacaaaaaatcgaaaattcaaattttgaatttcgaatt

SEQ ID NO: 10770 - DNA, 2902 bp, Heterodera glycines
aaaatcccctttttatctttttcaataattttctctttttttaattttagcaactccaacaggacgaccaaagatgaatgtcgatcatttgcagcgcacatcacgtcgcaaattggctgatgaaatcgcggctgtaataaaacgggacagatcacgctcagccagccgggcgtccctcgaacggatcagtcgggaagttcggcacaaatttgctcattacacgccacagaagaaacaacaactgccaagacaaaacaagtcagttgatccagaggatgctcttctgatcctcgggcttgtcggtacacagaaggcttacagacgactaaaaaacactattcgcctgatcaatgccaaatttgatgtgttcccgccactcgaaaaagtaaaaaaaagttttagcatttatatttatttaaaaattcaattgaatattgttaggtgcttgacatcaaacgccgcatctgtgggcctttctatcccattaatctaaattttaaggtgatgaggcgctccattccgtttggcgccgacttgagcaactgtggaagtgtatgccggacgcagaccaaattttgcagcaactggagcaccattttgtcaacaactggctcctcgactctggcaaaattgatgaactgaagcaggtatgtatgtttggagggggtaattgcgttaaacttgttttatttaaaaattgatatataataattcagagacaaagtgatcagcgggaagagcatgatgagttcgatcaaccggaagaagaaactgacgaactttcgcttatcaatgtcattgattgatggtgatttagcaagaagaaattggtggtcgacgggagacggacgaagaaaacaatgtagaagaacaattcgattttgaatagacacagttcgataaaaggtttttcttcgtttttacaggaataaatttttttaatttttgagcttcattaaaaactgtgttatcatttcacttatatttatttgctttaaaaacctcaaaatacagttacagcatgcatgggactcgaacctgagaccccccccccccttttggtgactaactcacagaccactaagacgaaaaatccagcatacttgtacttggagcccaaaattgggccgctgtgtttatgggtttttaggctattaaaaatgaaaaaaataataattttaaattaaaatattttttattaattaaattcaattaaaataatggtaaagaaaatataaaaaattttctgttccatcagggaattgaaccaacgagacaaataatgaaagtaaaaaggtttagccacttgaccacttatgcatatgaacacatgctataaatgaaaataaataatttaatttatttttatcaaaaatttctgatccctcaccgattcacttctcttttctcaccaagacccccatttttaccagtgcttatttagtcccgccgggactggcaaaaccgggaccgggatttctgtttttccaaaaaccgggaccggaaccgggacctgaaaaacccgggatttcccgccccgatcccggtcccggtcaactctaataaaaagttttacaaactaaagcgtaatctttgacctaagcccaaccaagtctaagcttaggcctaagcctaaagcttaggttttagatttagcttttgctcataaccacatggccatgatggtcttttacaaaaaaaaaaaatttcttccccacttttatgtaagaagttcaattttctcattttcacgtgatttttctgtccttttcgttttcccatttggtttcttcacgtcgttcgaaagatttatgtgttttgccttttaatggaacacataattcacttaattggggcataattagggatgtcaattttatgtaaatacatatttttttcctggcttctccatgctctaaatagtaggaaaaacactttcttttttatgtttgcggacaaaaagtgggatttttatttacatatttcggggttttatacatattttacatatttcgaaattttatacatatttggtacatattttggactttttcggactttttcatacatttttttttacatattttaaggcttttttagagaaattttcggaaattctcaaaaaaaaaaatccaaaatttcggcaaatttttcgtatatattttcatatttttattacatattttgagaatttttgtaaatttataaaatttgtagtgaaaaataaaacttaaccaaactaatttttaaaatactaaaatgtgattataggcctatttaggtcatttttatggcattttgtgcctatttcaccctttccgaagaatttttttttccaaaaaaataaccattttaaaaattttatttacatatttggtacatattttgggtttttcttacatatttcgggatattttacatatttatgtgcatattttggtgctaggtcatttcgcgacaagtgcaaaaataaaaatcaataaaattgggcacttcgcgacagtgcaaaaatgggcacttcgcgacagtgcaaaaatggtgtaaaaatggggcgtttcgcgacagtgcaaaaatgggcacttcgcgaaacgtgcaaatttaaccgaaagagaccgggcctcatcagtacggtgtctctttgggttaatttatttaaattaattattatttgtgtttcggccctaaaccgtatacacacaaagccacagcaatcaagcaaagcaaaataaattttattaagcaaactaaatattttatattggtttttaatttaatcttttaactaattatatttgaatatgattaatcaacgtaatttgttagtaaatcaatttttaaatttattttgagtttgcaaggcttcaacatttgcattattctgtgtagaatcagttacacaaat

SEQ ID NO: 10771 - DNA, 1386 bp, Heterodera glycines
  unsure (1)..(1386): unsure at all n locations
ttgtttctgaaaatattttgacattgtattattattattttttttagaaacgatctgcaaatagactgccaaattcccttgctttttagggtgaggcccaggggtttagggccgagttagttttacgcggaaatttgaagttttcaaatttttgactcaaaaattcaaaaagtctaagtcatgcggatgcggtggtgccggtaataggtgcccttgtgaaacggcgtagcattgccttggctcatttcattttcattgaacgggtcaaagttgtactgttcatcatcggtggtgtgcggttcgaccgtaacattgtacggtattgtatccaacttgtcaattgcttctttcaaccatgcaagttcattgtctattttttcaatttgttcttgaaatgtttcttgcacttcgtaataatattggacaattccgagccgaaattcactttttcggccagagccttcgaaagtgacagcggaatctacgcgatatctgttgttaaatatgtttcaaaatgttgcgacttatacggcgcacagcaaaaacgaacatttgcgctgctcagcaaaatcgacacttgcgccgcgaaatttgcaccgcggacatttgcacctcggcgcttgagccgaccagcaaaaatggacatgtgcgccgctcatcagtcaaaaatatattttaaatattatgccgattttcaacaaatttttactcaatttcgcaatcccgcattttttggaaaatgcgggacttggggattaatcccgcgggatccagtcccgcaaagaattttgagttccaatcccgcagcgggatccgcaaatttgattttttgtgcgggattatgcgggattttattgattttttgaaaattctaagacagaatgccaaatatttttaaataaattaaataattaatttaattaaagaactcatttttcatcgcaaatttcattcaaagtttgtaaaattttcccggcggcgcctatcggcaccaccggataggcttttacttaataatcctgtagaaattgagtcaaaaactgcgtcatttggtcaattttagacaaaatctgttaacaaatcgcattaaatttcataaaatttctcgcagatgtcgataggcatcaggtatgacacggaaagacttccgatttccgacatttttggggtcggaattccgacttccgaaatttttgatgaaaagtcggaaattttttaaattttttttttcaaaaaactagtatgtaagttttgtacaatttctgttaataaattgaactgaaatttttaaatttctcccccggcggcgccctatcgngcacnncgccgtaccctcctccaagttcccaaaaagtttttgaaaaaatcgcgctgttaaaaacgtgt

SEQ ID NO: 10772 - DNA, 1576 bp, Heterodera glycines
agcaatttgtgtgaaaaattcttgacgtaaggcgaacacaaattggccaatttgagtgaggctcagttcaacttgtatttcgcagtttacagacgataaatcgaagattcctccattcattgaaataaaaaagaaaataaacaggaaaattttttcacgcatttaatatgtatatcttaattagtttaattaatcatttagtttttttatgtcataggatgggttagaaaaaattaattcgaagttgaaactatttacataaataaaataatttatttttttttaatttttacgcttttatcgcgaaagaagtaatcgcttaattccctttttcaatgtaaaaataattgccaatgcatcatggggatgaacaaattgattttcttgaaaatgacttttattttttattaaatttatttaattatatgcataaatttcatttataaaatattattataatcggtttaattagaagtgcgagtttaaaaaattaaggcaatcggaatttttgcccaattgattcattaaagttttactggaaaaagttaaaacaattataattcaattcatgtttaaattaataattttggattcagattatcacttaaaaaccaatgtttctcattaaaacttgtattttgagaatgaataatttttttcatttttattttatacaaatattatttattactattattaaatattattttgttaattttacatgccaaaagcatatattttagatttttgccagattctctattttagcataattcttactcataaaattgttataatgtcgcatgacacgcaaatcgaagaatgggggtgttgtattctttttcaattttccatggcaaatgatggtgatggtgatgaccaagttccaataatgacccctcatcaacaaaaaatttgttaaaaaatgtggcagacaaattaattacgtagtcaaattgacgaagataaaatcaaattcacaaaagtaaggaatcaaaattttatgaaaaaattgatgcccaataatgtgctcaaggcattgaaatcgttaagtcgttcaacttccagaaaaggtgacgtcatccctccagttaaaacttcaacgccaaaaaacgaaattgatatagattattttgtcatatttttgctaattaatagagccaacggtaataatttcaattacagctctcttttttcgagaaatcgaaacttttttgagaatctttattttaggggtttagtgaccggagaatccgaaactgaactttttttcgatctgtcaaacgccgaatcgaacaaaaagtcgagaaatcaaattttttcgaattccgcatttgggtttaaagagtttaaataaatatttgaattaaatttgaattttacctttttagaacaaaatgccaatgaaagtgttggtgccaccagcgacaaaagcgatggccataaccgttccattatccacaaaaaagggagtcttgcacactttataaaaatgtaagagaaaatctagaaaatgtgctaattttttggagttgaaaacaaaccatcatagaaagcccctaaggcttcttctttt

SEQ ID NO: 10773 - DNA, 1660 bp, Heterodera glycines
  unsure (1)..(1660): unsure at all n locations
tgtgctggcctggcattgtgccatatattccacctttgcatacggtagcacctaaaaatttatttttgcattttttttgatttatttcatttaaaatatttgtgtccctatattttcattttggaaaatggcgtctatccccaaaaatgattataaataatttgagttaaaacaatatacaatatattttctcgtaacttattgtgcataggtatcgtattttttggcattttcaggtttataccgaaatattcacttatgacaatcgaatggcactaaaatttataatttcgtcattttgaaggttaatacagaaatattcatttatggcaattgaatggcacgaagatttagaatttgatgtgtctgatttatgccaaaatttccaaatttagcaaaaagtaagaatggcgccctactggtacaaatttattaccggtaaatggtacattcgtaaaacaacagacaacgaagaacaacaacagatatgcgaagtccatttattcttaatttaacaaaatttatttatttattcttttacaatttttagttaaaattaaatatgtatcacaaataaatgaataagtatttgtgaaggaattgggcatttcttatgacacatttagaaaatggaaaaaagaattagcgccagtgcgctgatcacgaatatgacattgacttttaaacgtctcatcatcaataaccattttcatttttagcgctatttcagctgaagtagtggttgctaattttttaaatgaaaaaaaaacggaaaaagtgaagggcgtgtgccaaaattcatcggcattatttttcactttgtataaatttcttgaaaatttcagttttcccattgacagtgcccgcagacaccacttgttttgaaaagtataagcacatttcggaagggatcactatttaattattttaatgaaattaataaacgtaaagtattgattttttgaaacttttagagcacacacattttaattgcacaacagccaaactgcgcacaggtgccatcagagtgaaggaaagaaggcattccagacggactgttggtggttgaccagcgaaaccatccgtaggcaaaaaaatgggttcagtcggtagaatttgatgcattttgcacaaacagtgaccagctgcttgccagaacccggcaaaaaattaccccaagcactgaaatttactgatgtggcaccatcggtctcgtgcaaaagtgaatacattgttgattatggctggaaatttttcgggtgccattagtgagaattgatcaattaataaaatatttaagatttgaaacaattgaatttttataagaaacagattaaggggaaaaaaaatttacgcttttatgcaggtcaataaaaatatgcgaacaaattatatgcaagtcaataaaaatatgcgaacaaattattcatcaataccaccggatccattttttgtcagaagccgattgatgccccgctccattcggtcaaagcgccggtccacggcgtcaaaacgccggtccacggagtcagtgagcttctcaaaacgggcgtcaacgtcaactttgagagcnttcaaagcagtctcgacggaaccgactctgccgaacaacccccacaggagcgtcaacagaacacccaagaggataagcgaaatgcca

SEQ ID NO: 10774 - DNA, 1107 bp, Heterodera glycines
tatcattcgaaagccctcagcatgctgtactaaccagcataatttagaaaaatgttgtaaaggttcaaaaaacattatgtccaacaatatgccaatccccggtttctgatgtactttcggtcagaagttcgttgaaaattaacgaaattttttgaaattttgtaggctagtagaggattcttagggctattgaatgatgtcaagaaagttggatttggttggcaatgaaaaaacttttagttcaaaaactaggctggcgcgaaaacgacctggcccggtgattttgagggtattaatcggctcaaaaattttttttaaaaacctaaaaaaagtttttaatgcgttgattaaaattccctaaagaattctttcacccaataaatattcgtatttacgggtttcccgccgggtctccgtccgaaatttttatattctaataaggttcgctagcatttgatgaatgaaaatcttaaaaattaagggactcacaaaatccgtaactaccaaaatttatccgcttttattcaatcgtttttcaattcgtgcattgtcggataacgttctcgaacaccaaattggttccattttagctatttaaaataaaatcaactatgattatgtgattaataatgttatttgcaaaaaaagtcttaaatgagaagaaattagaaaaaatgaagcaatatttcaaaaccaaaggaaaaaatcctgaaattagcgacaaaagaatcgccattgaattgaaaattggagcttatacattgattggttagatggaaaaaagaatttgcttcaatttcaaaaatgtgatggaaattatggtggccgagtcgtttcgcgaaaaccgcaaatatttaacaaaagagagcgggccacatcagtacggtgtctgtatttgttaatttaagaaaaaaaacaactttaatgtctgtttcaagccactcaagcaaacaaagcaaagcaaatgaatatttttttacgtagaataaatagaaaaaaaattattttctaattcatttatttaatagtgtttttgggatgaggttctttaatttgttaactgataaatatatatttttatagacaattagcatacggtacatatgt

SEQ ID NO: 10775 - DNA, 1952 bp, Heterodera glycines
agtgccaagagtgtggcagtgccacttccgcgcccctttcttaccagcagttcctctcccaactgttgctcgtccgcttcttccaaagcttcttccgcttcgatctccgcttcttcttccagcaactcctccgtctccgcgtctgtttctcgtgccactcgcgcggctttttcctcctctgccgctttggcgtcggtcgcttcgtcccttttgttgctctcctccaagtgtttcatgagtaccgcaacgacaacattgaccaaaacaaattgggagatgagcacgaacacgacgaagaagcacggggccaaaatggggtccacgcaacaattgcgctgaaaaaggaacggcggaaaaaattgaaaggaccgccgaacgaaaagcgatgatcggtcggatggatcgcatccattcactgacctcacaattatcggaagggtcacagtcatcccgaagggcatcctcaaaacaagccgatgttttggtcggtttcagtgccgcccgttcttctcaccttcataatgccgttccaattatcccccgttgcgatgcgaaagagtgttagaaaagccattccaaaattcttaaaatgggcgtgctcccccaacccatcgcacgggtgctcttcgctgcattcttaaaaattgaaaaatgaaatgccaaaaaatggacggggagggaaaagcgccaaaggaattcaaaacgaagggggaaaagggggaaaagcatcggtaccgagacgaccgaacaattcgacgccgagggcggcgaagatgaaaaacagaaggaagaagagcgagccgagattgcccacttggggcaatgcttcaccgacagtgtccaacagagaacgaataccctttgccattttgagtaatttgagaactgaaacgaaaatcggaagtaattaaggacagaaagaaagagaaaggagagagatggggagaggaagaaggaggaggagggagaaaaagaaaagaaagagaggggaggagagagagagagagcgagagagagagaaggggagagagagagagatggggagaggagaaagaaaaagagagagagagagagaggggagagagacattgccaaatgaattaccaactgcaagtgaacaattatggaatgaatttaaaagttgcctctggcaattcgcagaactctcatcacgcgaatgattgtcggatttatcggcagttcaagtgcttcgaactcttcgaacaaaatcccggcaatggacaacaacacaataaacatgtccaattggttccaacttcccagaaatttaaaattgtttttaattacaaaaataccgtaacttaccgttccgccaaaaaccgtttcagtccgagtgcgtacagtttcatcgcggcttccatagtgaaaacggcagtgaataagtaattgagagcacgcagcaaatatttgagtccatcgggcatcatgtaaaactccattgccattgagacgacattgacgccaattacggcggcgatggccaagtcgaagtatttggaagtgatcactccgtgcgtaaaaaggcgaaacggaccgtagcgatgccaatagggcaatgaatgagtctgaaaagggcaaccgcaacttaaaacatgccaaggcacaatgccatccttttttggcactattgtcttcggttttcggtacccccccactgcccccgctattcctatgattgttgaccacaaaacgagataccgagttttcgaaactcttgctccacatattccgcgagaagctaattccacagcctttactatcggtgtatttattctgacaacgcgggcgtaattcctattactgtcgagcagaactagagatagtcaattatccacatgtttcccaaacaaacgagccgagaaacaacttccagaacaattagaatcagcgtaattattctgagaatgcgattgaaattcctattactgttg

SEQ ID NO: 10776 - DNA, 2202 bp, Heterodera glycines
agttaggacctcccgaaacaaaggcttcgatgacgacattggtaagagaaatgaccaccaaaatgccatccaacacattccatccgtccttaaagtacgcaaaggaaccgaagaagcagccgttggccaacactttcagcaacatttccatggtgaaaatgagagtgaaggcatagcctaaggcaatcaatttgttgtcaattgtttaaagcgactgtgagaagcaccggttgcggtgaggaaaaatctctcggcaccccccgggggaatggacggccgttccatggccaaagtgacgcaattgagcccactgagagggaagggagggcaatggccaaacagctaattagtggcaaacatgcagaagagaatggcgtagtcgaaccacttgcgcccagtcagtcggaggcaccgctccctgagggaattgcccgggggcaaaagaaacagcgaaaactccgcgcgggaataaaggaatgatttgcggactaaccgacgccacctgaaaaacattgccgaaatgtacgaaaaaggcacaacggagaggagaaggatgccgggggaggagggcgaggcccattcgatggtccaatcattacccggctaattttaaccgattgtaatcccattcaatggcttagccaactctaatgctgaattcgctcactcatccgtatccgttcatgtttatcttccgaaatgcattttccgatctgtcgtcacccaccaaatgttctttcgcttttccgcccttctcttctcttcctcgagtgtctgctgcaattcctcgttggccttcatcaacttttctcgcgcgtacgcttcgagcagtgcgtggtggccatggacggggcactgcgggtcaaagagggacgagtggacgcagccaaagtgagaccaactcatcagacgaggacggaccagggaacactccatggaagcagtggggagaagtgagaggggcgattggaagacggacattgatggaagagtggagggacggaaatgaccgcgaggaaagggacggacggcggcagaagaggatgagcagtacggcacccgacgattggcatggagagaggtgcaacggctgagatggaagggacgaacctatgaaaagggggaagaaggacggaagatgaagaaaggaaaggagggcgggcggaagatgaagcgatgaaaggagtgggggaagatgaagaggataaggacatgacttgaagaagtgacttacttgggaggacagaaatgcttcggctgctgaacactgcggaggagcacttcgtcgattgtttttgttcttctcatccgctgaatgtggatgaaacgatatggaagaacatggctcctttgaactttcttcacgtttcttcaaaatggttctgattcgctccgaattcttcgtgtattttattcccatgtccttcctctcctcttcctcctccgtcctctccctcttccatctctcttccgttggtttcatcctccttcccccttcttcttcttcttccatcctcttccttttctcccccttcgtcgtcttccgcttctcttcttcctcttccgtccactttccccggtccctcctctcttctggtggttccatcctcctttcatcttcctcttccgtcccctttccccagttccttctctcttccccttcatcttcctcttccgtcccctttccccagttccttctctcttccccttcatcttcctcttccgtcacctttcctctgtaccttctctcttccgatggtttcatcctcctttcatcttcatcctccgtcctttccctgtctcttctctcttccgatggtttcttccttcttcctttttcttcttcttcctccgccgttcgttttgtctgctctcccctcaccattagctgttctctgaccgcgtgcaaattgttctgtccgcagctgcactccttgcgcttgtcaagaaactctggcgaagttgtctctgcgattagcacttccaactccgtcttgcgctccctttcttcctcctccgccctccgttgcgcttcttcctccaattggcgcttttcctcctctttgctctcctgaaagccctcaacgagaatggccaccagcaaattgaacagcacgtaattgccgaaggtcattagggtgacgaagtaaagcgcagcccatggagtggtctgagctgaacattaattaattaccattcatt

SEQ ID NO: 10777 - DNA, 891 bp, Heterodera glycines
aaatgaaagcaaaggtattaaatgcatgtcaactatcatttaattgattaatcacctgaaagacggtgagaaatgcggtgagaaatgagtcaaagttggccctttcgcaatgaccatacgatggcacattttttgcttggagaagtaattccgcattcacttcattttgagtgcaccgttcgccggaaattatttttgtacaaaaagtgcagacgaaaagaatcatgcccaaaagcatgagaaaaaggggggggggggtaaagagaaaagaaaagcgaagagaaaaggaaaaaaggaaagaaagagggaaaaagataaaaagagagagggaggagagaaaggagagaaaggggagaaaagagacaagagagagaaagaggagaggagagaaaggggagcgaaaagggagaaaaggtaagagagagagaaaggagagaaaaaggaaaatgaagagttaacaggaggggggggggggggtgggtgagacaaagaaaagaaaaaatacgaaaaacacaaaacattgaaaaaaacaacacacgacaaagacacgataaaaacattcacagcaaaagaaagaaaaaatacaaaaaaagaagggggggggggggaagggcacctgaaaaacggtggtcagtgcccacaaaagcgagtcgaagtttttgcgctcgcatcgtttcacagactctccccgccaattctcctcaattttgcagaatttacagccgaacaaattcatgccgagaatactgaacagtgagagtgggtttttggttttgattagtcggaggaggggggggggggggtaaggaagagattggcattttgtaaggaaaagaatggattggcattttgaaaagagggagtgagtgattggtcagccagtgagtggga

SEQ ID NO: 10778 - DNA, 1161 bp, Heterodera glycines
  unsure (1)..(1161): unsure at all n locations
gtttagtctgaggggacgttttagtcagggggtcgttttagtctggcaagctgtttttgtgccacataggttatattctgatttttttcgagaaatgtttaatttattatcaaaaaatatttatcaatgtgttaacaacaaaaaaataacaaaacattgaaaaattacgggcgcatttcataatttcgagaaacaccaacgagcaaatggttgatgttatcgggattaacattgacattggcatgataattatggtcattttggtgagcagggttattgttgatggcattgtagccctgcaaaagtcgaagaattctcgcatcagcggcacgatattttggcgcatttgcaggagggagttcaagcgatgcatcgtgagatgtccgcatcaattgacttttgctcacatcgaattgtgttaatgaagcggaagacagttgaatatgaacaagcaaaagcctgtagaagctttctatggaaaaaacgtgaaaaaaatagggttttactttgctagaagaatataaatttgactgaaaaaggcggcgccaaacaaagtgccatctgcgtacacatttttcataacaccagtccattccgaaatcgaagaacgagcaaatatcaaaattcttaatatggaaattagtgaaatttaatggattttttcacctttgcggtccgtcactgagttggtgaagaacataaagtgcaccctcatgttccagcttctgcttgtttcgctttgtctttatttcctgattggagttttccatttgatttgtagctaaacagacattttaaagttatgtttatgtatatgattgacaaacaaaagaaatttataaaaagtaattaatttgtgggtgaaaacagctaaccagactaaaccgaccctctgactaaaacggtcagactaaaccgacccctcccggtaaaggtggccttcgtaagacaattttactttttgttttttggttgcaattgggttagccatttctgaaaaatgtccaaatcagaatgtacatcaaattggttaactattaggatttggaataagtaaaattgtaaaaaatgagcgaatgttaattaaacctagcttatgccaagtggcgagggatccctcaggcttagtttttagaatcttaatttttanaaaagcacatt

SEQ ID NO: 10779 - DNA, 1104 bp, Heterodera glycines
aaattatttgactatgatttttcagaaaagccctgagcgccgcgcggtcccgcaaatggtgagcatgttaaattaaatattactatcattgatacttttgtaagttcggctcaccacgcaaaggttcttcagcattaacatttatttctgtcttcttttcccaattaaagaagcacaatcgaataggctctgtattcatgctgaattgcgcgattattgaacatgaattggaattgtgaggctgaacgaataaccaaataaactgaaagtgtttgaggagcgccgttcaagtgttgcctaaggggtggtggcaaattatcgaagtgacggggaaagggaagcgaagaacgaacgacaaaaccattcaaagaaaggagcagctgcatttgagttgttctgttgctgggcatattggtggctttgacaattcccccacaatattttcttacgctttgcccaatgtttggcttccctccgttactttctgccgcccttctctctttttgtgttgcctttgccgtcaattctccgtgcgctgatcaattgcagcgttgcggtgtaatcgttgaagagtttgagcgtcaattgcacgacctgaagaactcggcattcagaaactgcttcacaaacacagcgtaagaaaccaatgatgagtttctgcatgattttgtttttgaggtgtgtacatgagaaaatcgcatttgatgattgttatgccaaatcgcttagggccatacggacgtcattaggaagcaatttgccctccccaggcaagtaaaacgacaaaaagaagatgccaaaaggctcactattacgaattgggattttccaaaagttcctttggcatagaaagacaaattcagcaaatagcgactttttgactgcggcagagatgtttagtccgcggctggaacaatgcttcaccagcagtggtgcgacagtcggagatgaaattatgactttgatgagtggcgaagggagcgcaagcctatatgtcacaaccgtatgagacaatcgttcgctttccatatagccccacaaaatttcaaagagtacgcttttagactagcgccgaaatgtgtttgaatttacgaaataataaag

SEQ ID NO: 10780 - DNA, 3159 bp, Heterodera glycines
tttggcgattgccatgtacggaatggaattggcggaccgtttgtgggcgctgccctcaggcactctgagcagagagcatcagctgctgaacgcggaaggcgtctgctcggcaaaggtgtgccattagtacgaacataaaaccaacagattgtgtgaagtatcatcatctgatgaccaataggagtccccgacaaatggacgaatgttcggcggcggaatcagtcgcatttcggacccctcatctccacagccgtgcgcattttaattgaaaatttacgcaaaaagcattgttgtcaaatgcagcaacaacatgaacacttcgtgcacgttgagtgcgtccgaattgaattgttttgcgcttcggttggaccaggaccctcagtatcggctgctgatgtccagcaaggacaaggccattcgctcatgcatccaaaagtttgttaaatgccccaaaaactgagaccatttacgccgcagtgttcgccttcaacccgatggcaactgccacttccttcgtccgtcgtcccatcggtgcatttgcgaggcgcgcgacgaattggacagccgaatgcaaacagtaaaatgattagccgatggaattccgtaagcatttcattgacgagtaaggctgttctgaactgcgtccaacactcggccgttgctcaactttacgccgccctcagcagcctcagccgatggaattcgccggccgaaacggacagagcgatgcccacacgacgtaagaagcagttcaaaagggacacgaaatgagaaacgagtgcattttaacagccgactcttcgcccacccatcaacagagcgtctccaccgctggtccacttttgcccagcatttccttccaaaccggcgaagaaacactttcagtgccctcgcagtctgctgtgctcacaccgggtccggcctttcattttggaattgaatttttaaatgacgcggactaattttggacccaaattctccccccccccaatgaatgccattgctcaacccttaggcacttcaattaacggacaatgtatttgcgcatgtgcgcaacccacaagaacggcaagtgttttggccagccatgactttgtcggaaaaacgaccacagcaagcgccgcgacaattcccgcctcagatggcattgtttcggtcggactcactccgcaattataccgtcctctgccagttatgccatggtaaaactaagccaagacaagaagagtcaaaagaaagaacatcggataggtactaccaaccaatgcaaacggcactgagcgcagaagcaggaattgcgaatggatttgaacggttttttaacggacaaccgccactaaggaagaaaaggggggaggacgaagacaaataaattgaagatgttaaggcatttatttgcaatcaaattggcattgtagcaaaggttcaaatcaaacagacaatgagacgaaaagagactaacattggaccaattgaatttcccccaaaccctcgggcaaatcgccccaaagtttggttgagaaagggaacgtgccgggccgaaaatagaacttttcccgagtttgggttccccgggataattgtgattttccccaattttccaattccatatttaattgtccaaatcccttaaaataattctcctctttttataatttccatatcctctctttttacttctccattatccatttaccttgatcgatttatttattttaaaataacggaagaaaggggagagaatttgtaaaaaaggtcgggacctaagaattagaaaatgcctgtgggttacagttggtccaatcggcgcttcgccccccgttctttcgcttattcgtcagtcacttccatcttacaattaacactatttcctccgtttgtatcctccggcctctttgccctctctttatgcgattctctctcctcttcttctttgtccacctttctctgtccctcaaccattttggccaattcttctccaatggtctccgccatgtctgtgcctcctctttgctgcgtctctccatttaaatcgaagaaaattgtcaagtgccggtcccaattgatggacaacagaaaagccatgcaaagtgtgtcccgagggctcagcttccgcaattggtagtggcggtccttaaaaatgaaaacattcggctggttttcaacaagtcatatttatttttgaaaaaagttttaccaaaatgtgaaagttttttggtgcggctttcaatggctgtggcggttgtgactggagttgttggtcattccttgccctccctttgttcgaatcagtcgaactttgatgcgagcgttggagtagaaattcgccaaggtgttccattgtaatttcggatggtgcgcggacgaagtgggaacaatgcatgtgagcggggacggagccggaggaaaggagcgatttgctcggtgccaattccacctcaatctcatcgccttttcggcacatttcctcggcctaaacgagcagaaatttataattttagcaaagtggaattggtttcatgaatcaaatggttaccattgtctccaaaatgagaaggtcggcgccctcttccgacgatgcacaccgcgacctgctggtctgatcagtgagctgctgctgacaatgagtctcatccatcacagatcgaacagtggacggattagacagttcgtcggatgacaaatccgctgataaagtcgagtcggaacttagcaaatcggacgagtcgtcactgcttatgtcttaacgccttgagttattacacaagacaaaataatggaaaatatgccaaattttaaaaaacaaatcaccactagaagaatccaaatcctcagagctcgaaaaagctgaatttgcagtgggaatctgctggttgtgagcaacaacagttgaagatgagtcgacttccatcgcttcgacgggcgcgggggttaatgtgacgaccacctgatcgaccaattcgccgctggcgttttctgtccccgcgggggacgagtgtccctctcctccaccgttctctgttgaagagctcgccggcggatttgcggtgctcgcagtcgaatccacggccatttattggaggccttcgtttcttttctgggaattttaaattgtgggtaataaattaccacccatccatttgtgtataaatttaatat

SEQ ID NO: 10781 - DNA, 2122 bp, Heterodera glycines
tattagtttttgattttctactaattttgggcaaaccattggcgacattttttgaaaattcatgccatttgaattaaccttatttaacccagaaatactgcgaactcaaacattagaaataaaagaagtgcaagctccaacatgaaataagataattttgaatattctgggctaaattttaaaattaatgaaaacaatttttaaaaatggaatgagtcttttgatgagtggatatgagccaaatttattttctggtaagaaataaaattcgaatccataataaaatccatgttcgattaaaatccgacaaaaacaatgaggaaaaaagtgaaaaaacgaaatccaaaaaatggcatgtgcactaatttagtttaattaaataactaaaaattgctatcctaatattttatctattaaattaaaaaattaaacaatgcaaaagaatttggcaaatattattgtaaagtcgcaaaatcggacaaaggcccaaggcaggtcaacatttccattctcgtcattggcagcggattaaatgtggcggtgaacaacagcaaaatgcgcacatactgtaaaggatttgcacccgacataacatgggctgtggagaacattacggtaagtgctgtagttgatcagctgtgtgcagaaagaacgctgcacgggacgaaaatttttagaaataaaaaaaatttagtaaaaaaatgacacttttatataagccgcttaaaaagaataccgtattttctctaattaaggccctgtctccattaaaggccctgtctccaattatgtccccctttctgaggatgttgaaaaataatcgccccgtctctatttatccccccgggggataaatggaattattattattttttaaatcttatttttaataaaaattaattttaattaattctaaattgaaattcatttaaatgtttaataaacatgaaaaaataatacagaaaaatcacttactttactcaagtccgaatctaacccaccccggtgctatgtgttttcaattttttgaaatttaattattaatccctaggggtcttatgagacgggggtctggggttcgagtccgcttggctgcggtttatttttttaggtacttgtacagtttacaccagagttgccgcgggttacccgaaacccgacatttttctcgacccgaaacccgacccgatattttttctcgacccgcggcaagcctggtttacaccccataaaaattttctgaaagggcgctaaaaatatgcatacatttaaaaattcataacaagaaaactttttttgcttttattttgaagaaaggagctcaaaaaagcatttctgtattgaaattttcgattctgaagttactatgcgtcattaaaaattagactttgtcagcaaaatattaaaaaattttggcgttatgtcattattttagagtagagcgggaccgggaccgggccgggaattcccggtcatccgaggtccctgttcccggtcccggattttgaaaagctcaggtcccggtcccggttttgctcaaaattcccagtcccgctctactctacattattttattaactatttcgagatttttcatcactaaaagtcgcggccctagtcattaaaaatctgttgaaaaataatccccccgtctccattaaaggccctgtctccaattatgtccccctttctgaagaggttgaaaaataatccccccggggccttaattagagaaaatacggtatatttcgcaaaatttcaaccaaaaataaatttaaaaaaacgtgccctggagcgaagggccgccttgtatttgtcaccggtgcccttgtgatggtcgaacattttctgctccactcgtccggcaacttctgtcgcgtcgagagcgcctaaaaaattatcattttttcattaaaaaaatttgtttgtgccaaatttcgtgccattccaatcatacatgaacgaggggtgcgccgaggacctatttttccctccccggcgaccttttttttgctattcaatcactttttttcggcgcgttttttcctaaaaaacttttttggaaggggtgaggcggtccggcggtgccgataggcgccgcggggaaaattttttgaatttt

SEQ ID NO: 10782 - DNA, 1032 bp, Heterodera glycines
cctgtattctatatacttctccttttgctggtggatctgaatgcgccgattcggtgttgccgttagccgatgccgactcggtgttgccattagccgatgccgactcggtgttgccgttagccgatgccgattcggtgttgccgttagccgatgccgattcggtgttgccgttagccgatgccgattcggtgttgccattagccgatttgagtaacttcgtctcaagccccccaagtaatctttaaggatggttgaagcattagttacttggataatacgtctcacatattttattttcgaaaaattttcatttgaccatagagtaagccattttgaatcaaattatttgcaatccgaaattccggacaaattcatggccaaatgttgcaatttgcttccccccccccccgctcttcacctgtacatggcatccttcttgcctttcgtagggtaaagcattgcatttgccattttggttttttcctctgccattttcctcattagcttgttggtagctttgtttgctttttccgcgttccattcattagcacgtttttttgtatttttcggcttctgttctttggcaaatgtcttggccctgttatccatcctttctttgtccatcttatttttctttgcactttcattgtcatgtttgccgacgccaaaatcagaaggtggaagaagaagaaaatgtgcgtcttcaggttttttctgaaattttaataattttttctttattaagacgattcactttcatttttactatgttctcccccatccctttttttccgcacatttttctgccccaaaaaattataaaaattaaacgaaagtaattcaaaaaatcaattgtaaagaaaattaatttaataaaaatttagaggatttttttaaaattttatggcaaaattgaaagaaccgaatccatattccgcattgttattttttcatatgataaaggggggaggtcccacttcttccgcggctgctgattggtccaaatgtgccgacgacggtgtgttgccgttg

SEQ ID NO: 10783 - DNA, 520 bp, Heterodera glycines
gaagggccattatttgttgacaaattgcttttgttctttaaattatttattttttcagacctcttttcacagttatttttattcgaccatcaattttgacaattattttttattccttatcaaaaaaaatatatgtttatgcattttatgaatgaatagtttaattccagatgaaatctggattttgatttaaagccgattttatcggaatcaggaaaaaaaggtacttatttcctttaccgggtacttttaacatattttcagatgccaaaaatgtgttttataaattaatgaaaataagttttaagaggttttttggggtcgctgatcacgaataaagcatccatttttgccaatttcgaacccctgagccgaactcaaacaaaaatcaaaatagaaaatttatatggatgatatcctcattggtatcttgcccttgagggtaaccttggtacaggaagcctatcaagtctttgtccctgtacagctcatgtaatgaacggcagcgttggtctgagcc

SEQ ID NO: 10784 - DNA, 4308 bp, Heterodera glycines
tgattaataatcagaaatggaattcaaaattagggttgtcgaagataaacaccaaaaactgaaaaatatgcacataacttttccaaattgagggcaaaatttcaaaccaagactttcaaaaaatggctaaatatggtgtgatttagaataaaaaattttaaataaattaaaaccaaaaataactaggtatttttgtttaatttataacatttaccaatttttaaattatatttttattaatacatgagtaattcattccccaattttagcgaaaaaatgacctaaaaccgaaattttccacctttttttattagttatgacataattttatcaattttaagaataaattcaaataatttctggaaacttttataaaaaggatttgtttttttggaaaatttccatgacttttaggaggacaaaaaacccaattttttggatatagaagtccatcctagaagcttcaaacgaagcttataagcatgtttttcatgcatttaaggcatcccaaagaccagtaggggaaaaacattgatttccatataaatcaccgcgctaatgacaaaatttaaacattttcataaatgaatgaaagcatttttaggcttatactttttgcttaatatagggcatattatgaaattttaatgcttaataaaagaaacaattaccattatgagtgaaatcaatttttattgcatgcgctaaatgggcaaaatccatcatactttcattaagatatttgttaatcccattttgcgtgcttaagaaaattattaatggaaaatcattggttaattaatgttccaatttgtcaaattcctctcactttttgttggcacatttttgctcctttttctcgacaaaactttcaattgcctccccaattaattcaatgtttagcaattctttcagttcattcactttcattgcttttttcaataattcttcaacaaattgtgccaaaaaacaaaagctgtatttaatggcaaattttgtttggttggcactctcttctgccgttgaatttgccaaatacttcaaaataaaatggaaaatttgcgagtccgaacggaggaccaaaatttgtccatcattttcaatgttgccaagaattttggccatttttatcacttcgtaaactgtgggcgaatattcggacaatgaatgcaaaagatcaaaattttctgaaataaaaaatggaaatgtttatgaatttaaaaatattttagtggccggccccatgcattttataaaattttccaaggatatttgtcttgaaaattgagctaaagaaaattttgagtcaacattttttttgtcctaactttttttaaacccagtgaaattttttttaattttaattttaaaatattattcagaggaattcacattaacatataatgtttattgccatgctcacatataaattattaaaatgcaattgagccaaaattatttatatacgatagccctaagaattattatttttttgtctttaagattccaaaaaattctgcttcaaaaatgtttcgccaaaaaataaactgactaaagattttgaaatataacccatacagtaattcatttttatagagaatacctagagctattgttgaaactgagccaagttatgaatttaaatgttttacattttttgtttttgttttcctacgccaataatggcggaatttaagaaaaacttagcaccaatgaggatttgagaaaatttttaggataggaattaccatatggcgccgcgaaatttattttaattgcattggcaaaattcacaatattttctccaaagaatttgctcatctcatttttcatgcttaagcataaatgcatgaaatattaaataaagaaaataattataattaattaattaatgaaaatgataggagaataaattgcaccttttgtccccgcacattctctcctttttctcggcaaaattttcaattaccatcccattggattcaatgccaaaaaacactaaataatgattttcagccattgctttttttaaaaattcttcaacaaaatatgccataatgcacggcaaatgttggtcaggcacttttgggttagaattaaaatagtagggcttcttcagaaatttcataacaatttcaagtgttttaaaatccgaagcgatgcccaaaatgtgtccatcatcgtcaatattggcaaagaaattcgccattttaatcaattcatcaaatgttggcgaatattcggacaataaaaccagaaatataaaattcactgtaaaagaaaattcacatttatgtgtgatattcaggagatttaataataaaactaaaatttataaaaataaaaaacaaaaggacttaaaaaacactcataaatagggatacgatttttaggctctaaaaacagccaaaatacctaggtaggttttaggtcctaaaaaacccaaaaataggcactaaaaaaatgaaaaaaagcaatagaacagggctcggattcgtacttggatgccaagtacatacttggatttctgcttttgtgcttggaaaattttaactgtacttttttccaagattgtacttggaaatcgggatttttgagtatgactaaaaaatgtacattttatgaaaaaatctaaaatttttggcattttgtcaaaacgacattaattttttactaaattaacctagaaatagaaaattttcggtgaaaatctgtaaaaaggtcaaaaggtctaatttttctcccggcagcgccaatggctccgtccatcctcccccccaaaaaagaactcactttttttaagaaattgacccaaaatcgcaaaaattttcttattttgggtttaaaaagcaaaatcttaattctattgattttgcaaattgaaaaccagcagttgttgaggtgtttttgaaaaatgcgtaaattgctcagcggaaatataaatatttggataaaacattcaggtgaaaaatagatttgaagttaattaaccttttttaattttttttttgttcaaatttttatgtgtacttggatttaataaatttcccacgttatgtacttggaaattggtatgcctgtacttggaaagtgacttggtacgatccgagccctggtttagaaatattttaattttatgtatacacacaaaaatgtctaattcacaagctcaagctgaataaaaccgttcaaatcatgacttcgtttctctgttagttttgtctatcttctgtttgtctaatcactgggcgttctctgtcccttcgttttgcttttcgattcgccaactctctccgtgtttgagtgtcacaaatgcttcgggttcaatccctgcagcagcaacagccttcgtcagcatttcccgtggctccaaatacgtttcgtatgagcccatctcaaaagtgccccaatgaacggcaatgctcttcttcgacttgaccaatgcgtgaatttgaaccgcctcttttgggtctgatgaagggggaaagaaaaccaattaaaaagggggggggcaaaaaggaaaatgaattcacaattgaaaattgattaccgtatttactggattagaaccccccccccctctctcttgcgggccgttgaccctttaaaactcaaaagtgttcggaaatgccatcgaccaaccgatgtgttgcggcgccaaaaaccatctgcgagaaaagaaaaaatttccctggtccgacttcatccactccctcctctcgcccacctcggctcgtacgctccgattggaattgcgcttaaatcaatgggtccgtgaatgacgcccaacttccggaattcatcggcacaaaggcctgtgtcaccggcgaaaaaaaatttgtgttggggccccttggtcagccaaccactccacaatgactaaattgggaaggcgtgcgttttttgggtttctcgtcaaatctcaccgtgtttcggtcaattaagtttcgctgtgaccaatgctgtgccggcacactgaacacttcaaaggttctctcgtttaattgcagttccagacggtcacccttaaaattaaaaaaattatcgaaagtttgtctaccaatttttatttattttttattgtaagaaatgctgtgtacgagttgccaagagctcaaaaaattgctgaagtttttttcttcgaaaattcttaaaaaaattgaaaattaaaaaaaaaatttgggacgaaattttggggtgcacccgttgtccacccactcgtaacggcttctttatcttctgtgcctcttcctttcaaattcacaatgtagtttttttgggtttttttttcctcaccccccccccccc

SEQ ID NO: 10785 - DNA, 5168 bp, Heterodera glycines
cacacaagggtcaatcagaagtgtggatgttaaaacaatctcaggaaggattgttgagagacctgttagtaaaatatatcctttggaggcgagtgccaagggattaacagattcaaattgtcaaggattaaaggaaacatcaaataaaaatattgaacttaaagaaatgatacaaaatgagaaggctaaacaaattaaagaagataaacgaacccatcatccaatgcttacaagagcaaaggctaaaatattgaaagagtcaatgggtttcatgataattttattatttacttgtgtctttttgactgatggtcaaaatacaacagaaaaaataaatagatgtaaggattgtaaaatcaaatgcgattcactgggaattattctgaaaacaccaaaacgaataaagaaaacggaaatttgttgtacgggcagttgttatacccattcatacataagagaaatgaaatacaatctgccaagggagtacctgatagtggatcatgaatgtactgtaacttattggtcaagaagaaacgtgatgtatcaaaataaagttttttgccccccggtggaaaaatgtgattcaataaaaattttgagttgggacatggttttaaatccagaatgctggacgaaatggacagaattattaattggtgtaataatgttatttatgttaattattatttcttgtatttattggtgtgtaaaatcaatttatgctattttgaaatttgctgggtcatgtttatgctttccattcaagataatgagaaaattttgtttaaataaaaattttaaaactgaatcggaaatgagtctactcgcatcaaatgaggaggataacgagaccaagaccaaagagtggataaaaaaaagagaaaccggcggttaaaaaggttgagtctaagtacaaaaatgggttctacaatgttatttatgttaataattatcataatatcgattaaaaatgttaatgctggggctgaagtagcagtaattcaagcatcatctgaagattgtattaaaaactctaatggcactttgtgtcgggttaggggagcagcagaaatgacaatcctaccagcgggccaagagatatcattagcattgaaaaatgataaggctcaagtaaaaggttcaattaaagtcagactaaaatcattaacattaaaatgtgtccaagagacagttgcttggctaagggaatataaaataaaagttaaatcagcaagaagatgccctacgatggggtcgtgcaaaaaagggagatgcgcaaacatccgactaagtgaaaaactaagagaattaaaaaattattggaattatcctggtaatacttattgtatggagggagagtcaatttggggttcaaaatgtgctttaccatcactgggtataaatgaatgcttcttttataaaataattgcgataccaagtacaaatacagtatggaaacaagtacgttgtattaattgggattatgaaattcaagcggaagcagagttagtaatgggaaacatgacaaaaaagaaaaaacttaaactatatccagggataacggaagaatggcaagaaattgcatttaccccgcaaggagtgactccaccaattgcgccattgctagatgattattttattatatcggataaagatataatctatgcgggaaaagaagtgcgaactcaattaaaatgcaatgaccaaaatagtgcgcaaaatttcgagtgtattttgggtaccgatgcatgtaaagagtgttggcttaatagaacaaaaagtgaagaagagttggtacaatgtgaatgtgaagactcaacttttggtagggtcgagccaaagttaccttttacaaccgataaaatgaatttaagaaaggatagaaatacaattttgagtgaaacaatttatactcctatccagttattagtaagagttgaaaaattaaaaattgtaacagaaattgagtgtaatttgtgtaaagccaaacaagtggcaccattgaaaggttgttatgaatgtaccacgggtggacgacttaattatacatgttcaacaaattggggtgaaaatatagctgaaataaaatgcccaggaaacttgattttcttggcaaaatgcaataaaaatggcgaaacccaaattgatgtgttaccatttacaaagtcgaaaattaatatggattgtgaagttatatgcccaggaggaaaaacgagtttaaaaattaaaggcgagttaatgtatatacctgtgaatgaacggaaatatcaggtaagaaattcagaaatattagaaaatactaatgggttcggacttaattgggaagatcttttccaatttaattggaaattatttttaaatccatttcaaaattttaaattatacatattaatcataattttggcaatttttgcaatcggagtcatttatattttttggcttatgattccaattttcaatggttatagattcataatcggcattttaattttagtcatttcaattcccgctgtcagcggagggatgcatggcatcgagagcataaatgattcagggataaagggtcaaagagtgcaaataaaaattgggatatataagggaacgatggaagacaataaggcacattcaaaccaatcatattcccaaatatttaaaatttattttgtaaaaatgccttcggaaaaaatggattttttgaaatttgcctcccaaattctggcatgtgcgaagagagacatcggaaattatctacaacaacacttctaccgaaaactattaaccaaacacaccaaactggcaataaaaaatggtgccagacttctctaccgctgcgaaaaaggggtttacgatattttgaatgggccggaatttttaattttgggtgaccggcctaattttgggctgagacctcgggtcccaagtcatatatttgcactccaaattctgagactaaatggggtcattgggtctacaattggccctacactccttatgaatggtcattattacccattgggaggacttgtatttcaagggtaccaagatgagttgaattattttgaagattttttcaaattggaaatggataaatcggatatggaaataatgccacaaatgggtcttggcaatgaggaagttactgaaggtgagaaccgaattacaatacacttggacaacaattcgagtcgggaatgggtcttagaattcaaaaatatgggtgaaaatggattgaaaataattggaaagggtaaattcaaggctgttctcaactttgtgtgcttggcaatttgtaccttggcattgttaaatggggttcatggaatggacagacaaccaaacgggcaaaaggtaccaagtgaaagtgccgatgatttcgaagacttcgaaatgcaacaatggcaaagtgagctaagagatttgcaacagattgagacggccgagtccacttcgggtctaaacacggttgccacaaacaccggtacaaacaaccaagaagtgagtttagcaacggatactgtaatggttgtgccaatttctgaaccaagtcatcaagtacgggatatcattgaaaacccagttgtggatacaaatgtacaatgtgttgtagaaaaaatgggtacgacgaggcaattgtcaattccgacgaatttggatttgttgaattgggctcaaattcatcgttttttaccaccccctaatataatgttgaaggcccaacaagtgtccccaaatgtgcctcttgatcaacgaccgtccacttcggcaaacaacattggcaatccaaatgtcagtgcttcttgtgccccttcctgttcctcgatccaatgtggcaaatacgggaaagcaattcgaaattgggatggacgagttgcgcggccagtacagactgacctgtgccgtcgagaacgttcagctccttacttccgtccacggccaattctagcagcacctcaccagcaaccacgaatggtcgccaacccgccttttcctgttgagtccatccctcccattcacgtgccgtctggaattcgtcgagagttcttgcgcagaatgagccaagagacggaccactttttcggcctcgctcagttggttggagaatggaaccctacactcgcaactctgttcctggctttggaaacattctgccgtgccatccttcagctctgcgtgactgaagggggcgaccaccctgtcttctcccgccccgagtgtcgccgccgataagcgcgacgaaagatcaaaggaaagagatgatgattaatcaaaatggggacggaaaatcatatttaagaaagcaaaaagagagcacttcatcattcatttgatcattcaattgtgcaaataaatttgttgaatcattgggaaattcgggagaaataatataatttaatattaaattggttaattcctaaggcataattccttagaaggtcgaattaaacaaagagtctcgacagtcaaattacggatcaaaattacggaaaaatcccaaaaatccgtaacccgtaatccgtaatccgtaactcccaaaaccccgtaatttccgtaatccgcaatccgtaatccgtaattgcgtgcagccctggtctggatcctttaataggacatggggcaggggtctggacccttaatatgacaagggacatgggtctgagggtacttaatagaacaaggggtaggggtctgaacgaccatgtccgttgattatatgcagaaatgctttaagttacagggcaggggtccccagatcccttgcgataggttgtaggggcaggggtcccagaccgctgcccatgtgatagattacaggggcaggggtcccatgtgataggttgtaggggttcactttgttttaattcgattgaataaaatgaaaaagacaaatcgcaaatttaagcataaattgaaacaaactcatttgtcgcagaaaaagattctcttgcataactcttagattaagaaaatcgcatggattttgctttaaaattaatttttattttatgaattgactaaaatatttttaataaccttaagaaaggatattttttgtgtagaattaatgtgaaaatattatttataaaaaaatgggaaaacgaaaaaaggggattttttttatatttatttttaaaagaaaaaaataagtttttagcttccgggttaactca

SEQ ID NO: 10786 - DNA, 2666 bp, Heterodera glycines
  unsure (1)..(2666): unsure at all n locations
gatttccatgccggcttcattttgccaaatgtatcaaagcaaaaaagccgaaacatgccgggattgatcgcctcataataagccttaacagataatgcttaaaaataaagtcaattaataaacaaattatttgcctgaattgattctccgtattcctcaattgaatagaagggtaggttgatgtcaatgttgcacccccggcacaaagcatgaacgccttcaagctgttttctctcatcccttttgtattccgaaaaacgttgttgcgcaagtatgaatttcatccgaagcatttcaaatgaccggaagagacagagattgtcgttgttcagaagctcatacgttgcaccatcggcaatacggtagtcgatgttgaagtcgttacgcccttttccagccattttcggtttggcgcacttgctctcgattgccgtgatgtcaattataaatggttcttcaaggagtgatggcctttccttcgctttgttgctttggtcgaccatttcaaaacgcgtcaggattttttctgttgccgagttgtccagctttttaaagtgtacagccacttcgtagtcaaggtgttttgacgtcagaaggaaaatgaagtggtccgcggatattttcattgatttggccccctcggaggcataagaaaggcacatggtgaataaattgcgcagaatgtcctccggaaaaacagcaccaaacgttaggctcatcaaaaattgcccaataaaacggaacgctaaacaccattttaaaaaaatacctcaatcaatcaaagcacaacaaaaaatttttttaaatataattttcatagataaattaaataataattttatatgatgtattatttacaaccacacctttaaaacgtcccgcttccgcctgtgcggcagagagacatgtaaagccatcgccgttgaacaattccgcctccaattcgcgggtaattgacggctccttctgggccttgcgctcattgttgtccgatggcacaacctgaaaatgtctcccaaaattagaaaagaattttagaaaaacatttcgtaaaaactaaccgagatcggaaggcgtttcataacctcatccaatggcggtgcttcgtccatcaattcggtgccgtcatccccaacaggggaatacggtccgtcgagggtaggggggagggaattgtcggaatattggctcattgttttctttcttaaatttaaaaaaaaaagaaaattcaaccattgagtttagttaaaaatgtcaaagaaaatggccgatcaaaaaaaaatcgggcatgacccgtcccctgagcgatgttttgggccatttttggagagccaaaaacgcgcataggtccgcccctacacgtgtttttaaccttccggcccaaagccatcacattggagggcatacccaccaactatgactatcatagcaagcgattatggaaccgctcatggaactcaaagtgtgtggcactaccataccaaagtgcggaggtatggtgtaggcatctctatgtcgggtaattactcccttcacagagcattttcgccaacgcccacagcacatatgagttccgtcaacgcggattttaatccggggtgttgagtttgagcagctgcgcgttcgacactgctcagtgactcgcggtcctccgggccagccagtcccggttattctctcgctgtaccaatgcagcccgtaggcagggcacattagggctaggaaccgccacccccgctgctaggaacaggcacaccttcaccctcaaggccagcgagtgaagggcccccatccacaccagaccgactatctggttaggcttaaacatcgctgtgacacccggcgggctatgacggaaacttggtttcggtcagtcactgccgcagccctggataccagcggaataagccccgtggacagtgaacgcccgtgcccacccctctgggaagtaacccagtaccggggcaggacttctcggtttaaggatggcccccaggatatttgaaaaggcttaacaaatatcctaaaggggtttagtaccgagtaaaccaacaaaatgaaaaaatggggagagaaaggacagtgcaaagtacttgtgatcaaagaaaaatgaaaaaaaaaacaagggaaaaatgaagaaaaagataaatttggcaataataaaattaattttaaaagaggaaaagaaaaaatttatagaaaaaatagtcaaaaatggaaataatttaaagttaaaaattttaaataggacaaacataatgccaagagtcgaaataaatttttaaatttgttaaaacagaaagccaagagtgaaaataattttaaatttgaaaaaaacagaataccaagggttaaaataatttttaaatttggaaaaacagaatgccaagagtgaaaataatttttaaatttgaaaaaacagaatgccaagggttaaaataatttttaaatttgaaaaaacagaatgccaagagtcaaaacaattttttaaatttgaaaaaaaattcaaagggttgaaataatttttaaatttgaaaaaaaacagaatgccaagggttaaaataatttttaaatttgaaaaaacagaatgccaagagtcaaaataattttttaaattcgaaaaaaaaatgcaaagggttgaaataattttttanatttgaaaaaaa

SEQ ID NO: 10787 - DNA, 1497 bp, Heterodera glycines
  unsure (1)..(1497): unsure at all n locations
acccagtaccgggcaggactctcggtttaaggatggcccncaggatattgaaaaaggcttaacaaatatcctaaaggggtttagtaccgagtaaaccaacaaaatgaaaaaatggggagagaaaggacagtgcaaagtacttgtgatcaaagaaaaatgaaaaaaaacaagggaaaaatgaagaaaaagataaatttggcaataataaaattaattttaaaagatgaaaagaaaaaatttatagaaaaaatagtcaaaaatggaaataatttgaagttaaaaattttaaataggacaaacataatgccaagagtcgaaataaattttttaaatttgttaaaacagaaagccaagagtgaaaataatttttaaatttgaaaaaaacagaatgccaagggttaaaataatttttaaatttgaaaaaacagaatgccaagagtcaaaataatttttttaaatttgaaaaaaaatgcaaagggttgaaataatttttaaatttgaaaaaaacagaatgccaagggttaaaataatttttaaatttgaaaaaacagaatgccaagagtcaaaataattttttaaattcgaaaaaaaatgcaaagggttgaaataatttttaaattcgaaaaaaacagaacgccataatttaattttgaaaaaacagaatgccaagaattaaaataatttttaaatttgagaaaacagaatgccaagaattgaaataaaagaaaaataatttttaaatttgaaaaaacagaatgccaaggattgaatatttattaaaatttaaaaaagagaatgccaaaaactggcaagaaataattgaggagttttggcacgaaaaggtgcgacaattggcaaatgaaaatgtgaaaaaagggggcaaaacaatgccaaaaatggaaggaaataattgaagaattttggcacaaaaaggtgcaataattggcaaataaaaatgtgaaaaaaagggggcaaaacaatgccaaaaaattgaggcaaaataaatgataagggattatttgattggcttttccatccgtaaagtgaattaaattaaatgaaaatgaccaaatggacaaaaaatcaattagtaaattgtttattgtctgaaggtgtcagattacataataagcgtgcgggagtgtgggcggcactacaaagtacgcgaccaattaaaaaatttgatttgtttatttggcccnttcccaacaccccgcccccttcataattgatttgtttacatgaccccccatccccctctcgccgcacgctcttgcccccctcccccccgctggtgacgtcaatttttccctttatgagagcaaattaatgattatcatccattgcctatgtggccgagtggttagtgcgtcagtctggccgccctccctggggatctgatccgattgatagcggcgaatttttggacaaattttaaatcaatttaaattcaacgtctttgacctttaagacgttttaaaataatttaaaaattaa

SEQ ID NO: 10788 - DNA, 4127 bp, Heterodera glycines
  unsure (1)..(4127): unsure at all n locations
tttaaaaatttttttattttttgggcaaatttttgggcccttggggattttggcctactatttgaaaattcataacaaatcgaagggttgataaattttacaggaataaagccttaaaaatagagaaaaatcaggagaattttatggactttatttggattttctatctaaaaaaggaaaaaagttattccagaatttctggaaaaattcgaattttcagaaaaaaattcataactcggttctgaaaagatattctggaaaaataaaatactacaaaaatccgcagttttttgctttattatataaattttatttggcatttttatcacttttttaagaatttttataaaaataaaagtgattttgagattcgggaccaaaggggtgagcataggatttttgagcggaaatttttttttcacaaaaatcttccaaaaatatgtctttaggggttatttgggccgctgatcacgaatacgtgatcagattttacttttgacatcgttaagacctcagaatccctgtgtgattggggattctgaggcatcattttttggggggggggcaaagttcgaatccggacggtgtaacaatatttttctgtgcatttttgggttattttgactgtttttaattaatttaaaatattttgttgagttaataaataaaaaattatatttaatttaatttttttttgatgaataaattttataagtttaaattaattatttttttaattaaatttgttaaaaaatttttcatttaaaagagtgtttgtttttttaaattaattttttaatttaaattaaattatttttttgtgaaaattttttaaaattaaatttttgtttgattaaagaatttcatatattgtttttatttgagttaaggtgctgagcacaatatgattacgtttcagaattttttgtattttttaaaaagtgcaagttcgaacccggacggtaacacattattgggggggcgaagttcggacccgggcggtgtacattatttttctttgtatttttgggttatttttaatgtttttaattaatttgaagattttataaattatttaattaattaatttaatttcattatttatttgagggtgctgatcactaatctgacatcagattttagtttatacatcgttaagacctcagaatccctgtgtgattggggattctgagtcatcttctgtggggtgggggcggtaggttcgaatccggccggtgtaaattatttttctatgactttttacgttattttcaatgtttttaactaatctgaagatttgttgtagattatttaaaaaaaattttttacagtaaagaatttaattatttattttttgaattttctaatcactgttgcacctcttctaatcacttttgtacctcgtctaatcaccattgtacctcttctaatcacttttgtacctcttttatcacttttgtaactcttctaatcactgttgtacctctttaaatcacatttgtacctcttcatcaaatttgtacctcttctaatcacttttgtacctcgtctaatcaccattgtacctcttctaatcacttttgtacctcttttatcacttttgtaactcttctaatcactgttgtacctctttaaatcacatttgtacctcttctaatctctgttgtacctcttctaatcacttttgtacctcttttatcactggtgtacctctttaaatcacatttgtacctcttcatcaaatttgtacctcttctaatcgcttttgtacttcttctaatcacttttgtacctcttttaatcacttttgtacctctttaaatcacatttgtacctcttcatcaaatttgtacctcttctaatcgcttttgtacttcttctaatcacttttgtacctcttttaatcacttttgtacctcttttaatctctttttacctcttctaatctctgtaaggccaacaaaatttgaaaaactggcgcgaggcgcccgactgaggccgcgatcggcccaacaagctaaaaaatgggcgcgaagcgcccgtttgaggtcaacaaaattgaataacgggcgcgaagcgcccgtccaaggccaacaaatttaaaaacgggcgcgaagcgcccgtcttgatcctcgatgtggactaaaaacccctaataattttttaaaaattcaaaaaaacctctccaaccaattcgatccgaagctcaagaagtaaaaaacgggcgcgaagcgcccgtctgaggccgcgaagcggccttaatagcccaacaaatttagaaacgggtgcgaagcgcccgtataagcccaacaaaatttaaaaaacgggcgcgaagcgcccgttcgaggccgcgaagcggcctaaaagtcccagataatttttaaaaaattccaaatctccacaaccagagctaaaaaaaccgtagttgtacctcttctgatcacaattgtaccttcccacccgtggttgtacctcttcccccgtaacagtctaggtagcgaagctcccaaagcgcgaagcgcttttccacagctaaatagccgacggttcacgcacccgctagtgtattttattacagggacatttgtttggtgattgcggaatcatgaaactgggcttgcattggcatgcgacctcaatgccaagtgcatcgatgggtgggccgatttgcctcccgctcctaacggatggggtggggaaggaacatttgtcgccgaattcaaaattttttcatcctctttatcaccagaaaaactgtaatgaagcctattctttccatgatttcgctcaaggcttttccttaatcaccaagtttttgaatttggaaaaaattttctgaaaaaattaaataattttcagaattccattatttttgaaattgtcccggtcccgacgtatccctggtccaaaaattgatccggatcggatgagagtgccgggaaaacaacataatttgggatcatcaatgacacttttactactttactgtggcgagctctggggggggggggaatttggaattctctcccgaaatgtaaaattaaaattttctcagtaaatttcgctaattctgaaaattttacattcaattttcaattatacttttattaaaaaatgttgcagttatccgcacggcgtcgacgcggtgtttctcagtccgccctggggcgggcccgcctatttgcacagggtcggtccgtttgacctgctcgccgacatggagccgaacagaatcgataaattacgccgaaccctgtctactttttgccgaaaaacacccgcactgatcaatcagcaggtggttgtggtgatggcttacaattaactgttaatggctgactcataaaaaagcaaagaatttgcgaattcttgcgtttgtccaaaatccttttaaatttaagtttttcggttccaggcaaaacatttaaaaaaattgccccatcgagagtattttatttcaccaggtcaagtttgccttgagctttccattcgccccgataaaatctcagtaaattttgctaacatggaaattttgcattcattttttcaattatctttttattttttaatgttgcagttatccgcgttttcgtcccatctttttacattttcgtatttcaaaagaaaaaaaataatattatatattaaatgaaaaagtcaaaatttttaaaattaatctctttctattttgcacaaattaaatgtatcactcactaaattttgatattgaatttgctttgggtggtttccttccttctaaatccctcgcttctcttttcatatctctcaatcacttttcttttcaactgatatgctaattttgtccctttcatggccggaagggattcctggttgtctctctccaaccctataccatccatccgctgctatgcctggtggaagagatgtccaccaaaaaatgaacatcctggtcaggctcttggattgggaggccgaaggaggaagccgtggcatagaatgaattcatttttggccggaagggattcctggttgtctctctccaaccctataccatccatccagagatgttcaccaanaaaatgaacatcctggtcaggctcttggattgggaggccgaaggaggaagccgtgccatagaatgaatt

SEQ ID NO: 10789 - DNA, 1070 bp, Heterodera glycines
taaataggcctagaattacattttagtattttaaaaattagtttgattaatttttatttttcacttttcaaaaattctcaaaatatgtaataaaaatacgaaaatatgtacgaaaaatttgccgaaattttggatttttttttttgagaatttccgaaaatttctgtaaaaaatccccaaaatatgaaaaaaatgtatgaaaagcccaaaaaagtccaaaatatgtacaaaatctcgaaatatgtaaataaaagtcccaacttttgctcgcaaacacaaaaaagaaagtgttttccctactaaaagcatggagaatccaggaaaaaaatatgtatttacataaaattgacagccctattgatcagtgtattgaattttaaaaattgttggcaaaattgggcaaatgccgccaattaaaaattaaatggcgtcccttatgagttaatcctagcgaaatttccaggccaattgtgctctgtttcattggcattgatggggccggtaaaacgaccattgtcaaggcattgcaaggaggtaggccaaaccaaataaatgccatggccgagcctttagcaaaaattgtcacgccccttcagaggattttggcaccgttcattccacggttggcttttcccgggcggaattgcgagtcaaaaagtaccgtatcactgtgtatgatttgggaggatcggctcgaattcgcgaaatttggcccatttatttcgccgaggtatttacttaaaagttatttcatcagcaggttaattcgcaaaatatttatttacattttgtaaaatgaaataaaaatccaattattttttgcctttccaattttaattcttggcactattttgctctttttttgtttttgtttttactttaggtgtttggcgttgtgttcgttttggatgcgagtgccgccagtcgaatcagtgagaacaaaaagatggtcgactctttggtcggactgcccgaccttctcggcaaacccattctgtttctgctcaacaaaaaggacctttccggaagtgcgctttgttttcctttcctttgccttgaaccgattgagt

SEQ ID NO: 10790 - DNA, 1206 bp, Heterodera glycines
acagaaaaaagaagacgaaggaacctttgagaagggcgagcgaatgaaacgatgacaataaatgacgtttaagcaggaaaagaagggaaagaggaaaaggagggaggggaaaagagaatggaaaacggagagaaacaagagagagaagaaggagcgagagaaagcagaggaagaggaggaacaacggaagagagcggaaaagaaaacagagaaataggaacagcggaagggagtggaagaaaaagcagaggaggaggaacagcaccggaagagagcacaagaaaaacaaaaggaggagaaagaagaggaggaagagaaagaacagcggaagagagtggaagagaagcgcaagcagttcaacaaggcacagttgaaattgaaatgagaccaactccccgagcagaaagcagccgaggcggaagcactcacggacgaaatgcgatagacgtaatgacaacggtgggaagttgaaaaacatgctaatcactcaattaacacttcaagtgatcataggttgttgctaatatccttttgctgccctcaatttgtcactgattattaaattttgaccgattttttaagaaatattcgcccttttcccaagtattttctcttgttgtttatccattcaattatcctaataaacggatatttgtgctcttcagcagctacgttttgttcccttaatgaatgaagcacaaaacggcggtcaatcgccaaggacagccgccatttgtaaagggacggctttaagtggggggggggcattgaatggcattgcccccattaataaatgactgcaaaaagaaaggcattattattatccgccggtcggtcaatggcaaatcaaaaagtgacattgaaatgaacaatagaggaaaacattgattaaattaacaaatgagcgaatccgaacttgtaaatgggggaaaaagtacatggaaatttaaaagtgttaattgacgagtgccctccgattctttccaattaaaaggcaattgaaaatgtaatttttgtagcaaattttgtgaaaactgtgatttttgtggcaaattttgtgaaggtccgtcgggcctcggaattagcatcaaaatatctctgattggccaatcgattctcttccgatcactgatcatccctctctctctctctctgatcagtcttcccatgtcagtgagtgccgttcgcccaccctcagctggcaat

SEQ ID NO: 10791 - DNA, 1769 bp, Heterodera glycines
acacggctcgctgggcagcggaggcggcggcgtttgcaaagcggaaccgcaaaggtcgccttggcacggctgaataaaagtgagttttttgcgatttgcaaggaaaatgaccggttgaccgcctctgtttccatttggaggcgatggaaggggaggaaaaacgccctgaaaattaaaaaatttaatgagggcggctttcacccttcgaacatactcctttttgtacccatccgcctcccccttgacagccgccgccagagcacccacttgcgcttccctggcacccacttccttggcacccacttgcgcttccttggcacccacttgcgcttccttggcacccacttgcgcttccctggcacccacttccttggcacccacttgcgcttccctggcacccacttccttggcatccgcttccttggcacccacttgcgcttccctggcacccacttccttggcacccacttgcgcttccttggcacccacttccttggcacccacttgcgcttccctggcacccacttccttggcacccacttgcgcttccttggcacccacttgcgcttccttggcacccacttgcgcttccctggcacccacttccttggcacccacttgcgcttccttgccatccactcgcgcttccctggcacccgcttccttgacatccactcgcgcttccctggcacccgcttccttggcatccgcttccttggcacccgcttccttggaatccgcttccctggcatccgcttccctggactccgccgcttccttgatattcgcttccatggaattcgcttccttgtaatccgcttccatggcatccgcttccctgacatccgcctccttgacacccgattccttggcacccatttccctggcatccattttggcttccttggcatccgcttccctgacatccgcttccttggcatccgcttccctggactccgcttccttgacatccgcttccttggcatccgcttccctggactccgcctccttgacacccgattccttggcacccattttcctggcatccatttttgcttccttggcatccgcttccttgtaatccccctatttcctgggttgctccttctcgttggcaccctgctccttggcattctccgccctgcttatttcctcctccctggcatcctccgcttctcaggcacccgttgcaccctccacatccttggcatatccttccttggcaccctcctcctccctggcaccctcctccagcacctcgatcctgctggcatcctcccccttggcatacgcatccttggcaatgtgtggccacctgctgctgttgacacccacttccctgctggcattctcctccttggcaccctcccgcgtccgcttgaactgctcctcccccgcccctacaactgcaggcacaaaattccgcaccgctaaagcattctctgccgcctccccctgtctccccgctctgttggcattctccgccgcattcgctccccccgcagtcataaaactgcgtctgttgttgatagccgaatgggcgtgggtaattcacaattagcggtgccgcataacttccgcctccgccgtaacttccgtagccgtaacttaatggacggagaaaaaagtgccaacgaaaggaaaagtgggaaatgccgaaaaatagggatttatatttaacagaaggtaaagcatgacggagtgtttacttcatttgacagatgggaacggccggcgcacaaccgacgagcgacgaaggaggacagcaa

SEQ ID NO: 10792 - DNA, 989 bp, Heterodera glycines
agcgatgagattaatctgaaaatgaaattgaagggcttaaagtgatgtttaatgaagaaagaatggctgtgaatagagctcgacctggacctgaacccaggcctagattttcctaaatcaaagtccaggtaatttttcagcaacttggattttgtccaggaaatcaaagtatagttcaaatatgaaataaatcaaggcccgatttcctggacaatatttatcgagtgagtgaccaagctttttaaaaaaatatgaactctagtgaaaaattctttttgaaatttgaataaacgttttactgacttttattggcattttctccgtggacattcccttgccgaccatcagcgctttcttcaccgcctcaatgccttcgtaggagaaacaactcacttcgatgtccgctcgaattttgagtgctttgggcgtaagtttcttttgaatttcttccaccaatttggcgcgcactttagcctcgatttcgcactcgtcgaaaacggacggatcgctgaaaaggaattggggaaaatggatgaaaattaagccagacattacgaggctttgtggtggtcaaaatatgagggcccattcccttccgttccccactcgtaaatcatttcccatatcgactccccccgcccaccaccacccagcccgattaattcgaaaacaaaactttaaattcttaagaattcattcaaaaaattctaatttttatcagagaagtgatacggagaattgaaggggaggaaaccaatttctaccaaaaaacaacttaattttttttaacacttactttacggcttttgtgaacacttcatatgaacctgcttttttcttcatcttacggtcgaaatgccaagcggtctaaagggacaaatgaaaaaatctattgtgaaaaacaggagacaacataaagtattttcatttgatagtattcaaagttaataatttcgacactaaaaaaggaaaccctgcagtgcgttgtt

SEQ ID NO: 10793 - DNA, 1649 bp, Heterodera glycines
ccaaaaggaggggaatggtctccttataaacacaattctttaaatcggaaagggcgtggagaacaaagtacaagaaagggcgtggagaacaaagtacaaatatgaaaatattaagaaggtcaaaacgccaatttaacatttccaacacacttcataactttttgagttctgcacggatcgagaccgggataagaccattggaaagagcagctcgagctctacaagaagctatggaaagaaaaaatcgacatttcagggactttttcagaaatcatatttaattccccaatggggccccattttgggtccccagccacagccccatgcttctcccaattgtggcgaaaacaatatttcacatttcacttcataactttttgagttcagcagggatcgagaccgggataagaccattggaaagaacagctcgagctttacaagaagatatggaaagaaaaaatagacatttcagggactttttcagaaatcatgtttaattccccaatggggccccattttgggtcctcagccacagccccatgcttctcccaattttaagtcttggatttgtcaaataaattaacgatttcgaattaataataaaaaattctattataaattttttttgtagaggggaaaattctgaaccaaactactatttgaaaacccaatcaaaactgggaaaaatttgaagtcaaaaaattattcgaatttctccaattttgtttccataatttccgaatgttattcggtatcataatgccaaaccaaaacgaattcgttttaaaatattcttttctggacttgacttggtttctcaatatcgaagcttttttctccgcaatttctaaaacgcttataccaaaccctagatttttggttccgatgggtttcagaaaaaatcccgtgtggtgaaaacatatttcacatttcacttcataactttttgagttctgcacggatcgagaccgggataagaccattggaaagagcagctcgagctctacaagaagctatggaaagaaaaaatcgacatttcagggactttttcagaaatcatatttaattccccaatggggccccattttgggtccccagccacagccccatgcttctcccaattgtggcgaaaacaatatttcacatttcacttcataactttttgagttcggcagggatcgagaccgggataagaccattggaaagaacagctcgagctttacaagaagatatggaaagaaaaaatcgacatttcagggactttttcagaaatcatgtttaattccccaatggggccccattttggttcctcagccacagccccatgcttctcccaattttaagtcttggatttgtcaaataaattaacgatttcgaattaataataaaaaattctattataaattttttttgtagaggggaaaattctgaaccaaactactatttgaaaacccaatcaaaactgggaaaaatttgaagtcaaaaaattattcgaatttctccaattttgtttccataatttccgaatgttattcggtatcataatgccaaaccaaaacgaattcgttttaaaatattcttttctggacttgacttggtttctcaatatcgaagcttttttctccgccaatttctaaaacgcttaacca

SEQ ID NO: 10794 - DNA, 1694 bp, Heterodera glycines
  unsure (1)..(1694): unsure at all n locations
aaaatttgaagtcaaaaaattattcgaacttctccaattttgtttccataatttccgaatgttattcggtatcataatgccaaaccaaacganattcgttttaagatattcttttctggacttgacttggtttctcaatatcgaagcttttttctccgcaatttctaaaacgcttataccaaaccctagatttttggttccgatgggtttcagaaaaaatcccttgtggtgcaaacatatttcacatttcacttcataactttttgagttctgcacggatcgagaccgggatatgaccattggaaagagcagctcgagctctacaagaagctatggaaagaaaaaatcgacatttcagggacttttcagaaatcatgtttaattccccaatggggccccattttgggtcctcagctacagccccatgcttctcccaattgtggcgaaaacaatatttcacatttcacttcataactttttgagttctgcacggatcgagaccgggataagaccattggaaagagcagctcgagctctacaagaagctatggaaagaaaaaatcgacatttcagggactttttcagaaatcatatttaattccccaatggggccccattttgggtccccagccacagccccatgcttctcccaattgtggcgaaaacaatatttcacatttcacttcataactttttgagttcggcagggatcgagacagggataagaccattggaaagaacagctcgagctttacaagaagctatggaaagaaaaaatcgacatttcagggactttttcagaaatcatgtttaattccccaatggggccccattttgggtcctcagccacagccccatgcttctcccaattttaagtcttggatttgtcaaataaattaacgatttcgaattaataataaaatattctattataaattttttttgtagaggggaaaattctgaaccaaactactatttgaaaacccaatcaaaactgggaaaaatttgaagtcaaaaaattattcgaatttctccaattttgtttccataatttccgaatgttattcggtatcataatgccaaaccaaaacgaattcgttttaaaatattcttttctggacttgacttggtttctcaatatcgaagcttttttctccgcaatttctaaaacgcttataccaaaccctagatttttggttccgatgggtttcagaaaaaatcccgtgtggtgaaaacatatttcacatttcacttcataactttttgagttctgcacggatcgagaccgggataagaccattggaaagagcagctcgagctctacaagaagctatggaaagaaaaaatcgacatttcagggacttttcagaaatcatgtttaattccccaatggggccccattttgggtcctcagccacagccccatgcttctcccaattttaagtcttggatttgtcaaataaattaacgatttcgaattaataataaaaaattctattataaattttttttgtagaggggaaaattctgaaccaaactactatttgaaaacccaatcaaaactgggaaaaatttgaagtcaaaaaattattcgaatttctcctaattttgtttccataatttccgaatgttattcggtatcataatgccaaagcgaggaacgaattcgttttaaaatattcttttctggactt

SEQ ID NO: 10795 - DNA, 2540 bp, Heterodera glycines
attctgaaatagttaaataaatattcaaaagccaaaaatttttgcaatattgaaaacaaataactttaagtgacaatattaataaaaatgaattatggttgataattttcctatttttaggcgttttttgtaaaaaaaaaaaatgctgaagttatcgttttatttttttattgtgaatattctataaaaatatccttacaatttatttaaattgttatttgcgaagtaaattatatttaaatttaattgttattttactttttcttgccaatatttgttcagtagaatttcattttaatttgagaataaaataacagataatgtgaaatcgatgggagatgagaaggaccaccgattgaaaacagcacaattattcatccgctttgtgttgagggatatgcatacattgaatcaatcgttcatttctctctctccaatttttcgttccaattaattagtcatccattgattcttatattatttaaaaaactttaaaaacattaaaatactttatttaaacttaaatttgcctcttaaatatggccgaatttgcccaccgagccggtgctccattggagtgcctttgcatggctctgaaggtaaaaaaaattaaattaaataatgaattaaaactcaatttaaatacccaattaaaactctaattaaaatacacaacaattatatctgtaattcaaatgtttgaaaggtccaaaagcgtcaggaaggaacggacgccgaaggcaatccgcgatggaagtaatttaatattattaaaatggaaaaaaattcccccgtgtccttttaaattattttggtgggttttcgaagttgctggttacacgaatttgacatcaattttgacaaacccgaattgctaattgaactcgaaaacaaaaattaaaaataggaaataaatgaaatttttccaaccctttgaattaagttaggtattcggatttggtcgaaatgggcgtcataaaatgatcttgactccgaaaaaaacttaggtaatttccgattttatataaaaaaggttctccctttaataactctcaaagaaccgtaaaaatgattgtttttaattttattaaagaattggcataagtattggcggtggcattgaccaaaaccatcgacagtccgtctacagtgattccgtctgttatcaattttatgaaaaaaacgatgaataattttcttaattgatatgctaacaatatgatttgattgtttatatatatatataacgaacgccctttttatggtggcttttatataacgactatagcaccctaaaaaacaaattttatcaaaaataaatttaatttgtaaataatttttttgaattattattaggcaatcctaaagaatgggggtccctaatttttaacttcccattctttaggatggtcgataattacataaaatgattaaaattttcccgacttaagggaatttatgtgacaagcgtggaagcaaagtgacgtgccaattccttcttgaccatttcatatttcgattttaagttcacccgcggaagaagctggactgaaagtgcatgacaaaattctgcaagtgaacggcgtcgattacgtaaaaaacagaattaaattacaaaaaaaaccattgtttttatgcatatgtcggtaaatgaatcatctttggggtgtcttttttatttttattacattttttaaggatttttccaaaaatcccgaaagtaggcgcaaaaatggcgaaaaaggcacaaaagcgttttgttttttgcttatctgagcgtatcaaacgcacagaaattttaggctttttttaaaaatggcagccctaaaaataataatttattaagcattcatatttatcggttccacttttttttgcagacgatgatcactcacgatcgagcagtcaaatatttgaagaaggagccggtgttggatttgctggtcaccagggccacagcgaaacccagcacggaagtgcaaatgtgaactgcttgccggaggaacgaactaattgcacattaagtccgaaataaacacacattccaatcgctgatccgatccatgtaatttttgatccaatccgaataatttaaaataaatttttgttggatttaaaaatttacgactctactctgacgatgtaaagaattacttttatttactcaataccataactcggcattagaccgacaactgggagaccgaatcccggttctgtaataatatacaaaatgccgtaaatttagtgttcctgtttttcattttgacggtctttaaattcgagccatgccctgtttttgcatggtatactatttttcactcaaattttggcgagttatattgtatttattttattaactatgaaaaatcgaaatgctacttttcgattttgttcctacacctcaaaatttaaaagaatatttaaaattccataaaaacctttaattaaaaagtattaattgataaaatttggtacttttcggttttgctcttaatccaaaaatttttaaaagcccacaaaagtgcgcgcgcaaaagt

SEQ ID NO: 10796 - DNA, 2448 bp, Heterodera glycines
  unsure (1)..(2448): unsure at all n locations
gtagaaattaggctgcatcaatntatttgtnnttttgaattaggataaaaaattgagtgtcatttcagttcaaaaataagacaaatagaaaaatgaactttttatgcgtaccttttgttgatttttttaaattttgaggtgtatgaataaaaccgaaaagtacaccgcattgccaaaaacggtgtaaaatgaaaacgggagatcagaaatttagctttattatcaaggaaagatcgaaaatgccataaatgatgtaaataaaaattgcggcttaaaaccaattacatttgcagcaaaagtaatgcggaaaattgtgcacccaattattttacccatttctgaaaaaaaagaattaaattcctgtgaattaaaatgaacttttatttatgtatgtattactgccattgattttgttttccggatatccttaatctttgctaatatgcccaaatatattttaaaaattttctcacaaacttttgggggaaaaatgttaaacttatgacacgaaaaatacaaatcttcgttttgcttacacatctgcaaattttaatgatcatcagtaagaattactgcaattttaacgaatttattcgaaattgatgctgaaattttagaaaaatgatatttgcttaactgtcgcaattttaacgcattggaaattctcatataaaaggcgagtaaaagaaatggatgcatcattcaataattcactaggaatttaatttttttcagaaatggggaaaataattgtgtgcacaattttctgcggtgtcttggctgcaactgtaattggtctcaagccgcgcggaccgccctatcataagggacaagaacgttttggcccaccaccaaatggccaacatagcccaggaaagttcggacccccaccgcccaacagctccgaccttccatcgccggaaagcagctctgacgcttcggcccgtaaaaagcgcattccgttcggcttccgtccccatggcctaccaccaaatggccaacatagcccaggaaagttcggacccccaccgcccaacagctccgaccttccaccgccggaaagcagctctgacgcttcggcccgtaagaagcgcagtccgttcggcttccgtccccatggcctaccaccaaatggccaacatagcccaggaaagttcggacccccaccgcccaacagctccgaccttccatcgccggaaagcagctctgacgcttcggcccgtaaaaagcgcattccgttcggcttccgtccccatggcctaccaccaaatggccaacatagcccaggaaagttcggacccccaccgcccaacagctccgaccttccatcgccggaaagcagctctgacgcttcggcccgtaaaaagcgcattccgttcggcttccgtccccatggcctaccaccaaatggccaacatagcccaggaaagttcggacccccaccgcccaacagctccgaccttccaccgccggaaagcagctctgacgcttcggcccgtaagaagcgcagtccgttcggcttccgtccccatggcctaccaccaaatggccaacatggccttggaaagttcggtcccgcgccctgcaacagttctgaccttccgccgctctcatcgacggacagtgaatgagcaatgaatgtttggatgatcaaatgcacattatcattggaaaaaaaatgcttgaattatggcatagtttatatgagaatacattatgaagtgttgattatttgacgcattttgtggaaaagttcccgagagtcctctttttcagatttttctaatttgcgtgttggaaatgatttttaaaagaagaattaccaattttctcagcaaatctataaaactgcttattttaaataattataattcagtgaaaagctttcccgttcattatgccaatataattacccaattaattagcattacgcatggattgactttttatataattcataattgggactcggaaaattctttaaattggcataggaaattttttaccaaataaagacaaatttttttttttttgtaaataaattcaaagaaattgaatttttcctataaaggcgaaaaactaaaaattttatgatgagataaattttttagaaaatttttaattttccaaaaaatggatgaaaatacaccttttactaccatttaatacagtatgccactgttgaaaataaaaggtaacccgctggggttcgaacctacggcccttccaaaccgtgcgggttttacgagtcataatgctagtaaactcttaaaacaaaagctgcaaatagatttagcagtagatgactggggcggcacagcatttttgtgcttgctaattaaattcaattttcattaatgtaaattaccctaattaaacccattaaaggcacaattcttttcttcagtatcattcatcatatcctttttacaagattcaatttaagat

SEQ ID NO: 10797 - DNA, 927 bp, Heterodera glycines
  unsure (1)..(927): unsure at all n locations
gcgggatcccgtccccgcaaaganatttgagttctaatcccgcagcgggatccgcaaattatattttttgtgcgggattatgcgggattttattgattttttgaaaattttccaaaaaaatcattgacctatcaaaaagccacaaaatgaggataaatcctcagatctggcaaccctgtattaaattcatcctctttttccttttcatcattatccatatttttttttgttttgtttttcttcccgcagcgtagattttcgttcaacacaatattgagcattaataatatcaggaaaatcttcaatttcatcaaggtttacaacgcaatcattagaatattttgttttgcaccgctttttttcccggagtttgaaccggttcaacagcttttatcaggagcgtacaacccgtttgaccgcttttatcgggagcttgcaacccgtcattttctcggaaagaggaagtagaacacggcgcatcggaagggaaagtttgcttagtacgtacatttggtatttattaagtaaagtatctagaaaaaaaggaaaaaatacattaaaaagaaatatttgaaaaaacgaagttatgaaaatacatttcattaatataatttaaaaatagtaaaacaatatttattattatattaacgaaaaatacattaataataataaatcataacctaaattttggtctttgtttagtaaaaaaaaagttaactattttaaaaaaataacgaacgtataattaaagaaaaaaatctataagcataaacaatttcataatcttattgtctgcatttagttttatttgtgcaacaaaacaacaatccaattattttctgttatttcattttttttaatttaaagctttcgttacaaaaaataatctattcaaaatgtgacatacagacagacagaccaaattag

SEQ ID NO: 10798 - DNA, 2363 bp, Heterodera glycines
  unsure (1)..(2363): unsure at all n locations
gttgatttcgacagtaaaccttatttttaaaaaatttgttctaatggcataagtctcgttaaattttgacaattaaaatgataagaacatggctcttatacattgcagatgggtcgtgattttcgaattcttgcttaagagtagggttgctccccgacccctcggggggcaatttttttttaattttaaaaaaattgtcgggggccggggaccgcggggggcgacatgtcgggggtcggggcggggaggagctcaattgtcggggaccccgatcggggaatggccaaatttttttaacccaaaaaaaccattttttttctttttatctgctcgtaaatcttttttttactttaatcatctgatttcgttagcgccagtaagagtgagtccaagttggcctttaaacctggggtttccatttgttcttatttataagaatattctgattttttggggggtgggtagcgactaaaattattcggatttcttaaatatacttatagttttgaaattttatggcataatatcaaaacttttcaagaaattttaaggtctgccgcaaaatttttttgatcttttgatcccgaatttactgaaatttataattttgcattttcctccccaaaattatcaaattgataataggatactaaaaatataaaatttgatcgaataaattggaaaaataacggattggaaaaatgttgctaaatgttcatatttttgacactaaaatcttattttggaattggtgtttatattttgaaaatttttcgatggaagccctggtttaaaaatacgtagaaaggagtggggttaaacagaaatttttgcgaacccgtctcaacatcgaatttgaccaccattttttgcggcgctctttttcagaaaaacttttgggtaacaaaggggtgatgagggcggtggtgttaggagccgcgaggaaattttttttttttaatttgaaatttgttaacagatttttcctaaaaataccaatttttgcaattttgggacattttttgcaaaaaaaaaattgaattttggggggccggcggtgccgataggcggcgccgaaaagtttttcggaatttttaataattaatattaagaaaattgttcaaaatttcataaattttcaacctttcccctcttcgttgttgaattaactttttaaattttacaatgctcggggtccccgattccccgaattagtgtcggggagtcgggggccaggacctcggggagcgacatgtcgggggtcggggcggggaataggcccaaaaaatgtcggggatcggggtcggggaccggggagctcggggacggggagcaaccctactctcatccacataactggattggataaatttaaaatgagttacttgatatatagaaagtatttaattattaatgctaatttgacccagccattttgaactcaccttttctcgaagaatcgcttcttgagtaactgtggggagggaaaaaaggaaaatgccaaacattgatgattggattgaagttaggcacaagccaaaaaataaaggttatttggtttataagataaaaaaagactttcgaaaatatgttagtctcagctttggagcaaattctttggaatatccctgtgaaatttttgctatcgaatagtgctgttcgagaccgaaaattcccgagactcaatagcgagaccgttttgactccaaaagaaataaaaacattcggctaaatacaaatcgtaaagaaacgaaattgattttattgaataatttcctatgtttagaccatgaaatttagccttgatagcctttatttttgaccaaaaaatgtcatttcaagatttttctaaacacacataataattaatttaaattatttaacccaaagagacaccgtactgattaggcccaggtctctttcttttaaatttgcactgtcgcgaagcgcactcgctcagttgggcctcacggttgggccggcacggtttacgtcattttcttgaccaacttttttgtattttttaattttaaatcgatattatttgttaaaatttgtgataattaaaataaagttttttttttttggaaatttggaaaatttttttgacttattggggcccaaacgtgccggggcttcttcatttggtagttcccgaaactattgagacgctgccttttgtttgttctggaattttattataattnttttagtatttttctcaaaaatactaatcctttttgtgccgctttttctctattttttaatcatcattttgataatttaccaagcgtcagtttaaataacaataaatcacaagaatcaattccacttcgtcctcacaaatattntaaactcgttga

SEQ ID NO: 10799 - DNA, 1585 bp, Heterodera glycines
gaaaattattagatacaattttgttatcatttcattttgaaaaagggaatttaggaaaaaatttataagctaacataataatttttttgctaatttcaggcagagcgaccagttgttgttacgttgtgctcgacgtggcgtggccttgtttttttttaattttttttttttgccttatgagttgaaaccgacggtactttcctttttgtcacaccccctgctgaaatattttttaaaacaatttccctatggtaattttcagcgctatacacgaagataactggtccaaatgttcacgtaactcacgccgacgttttggcgccaaaactataataaaaaaaagaaaacacccaaatttaaaaattttgtaaaacaacaaaaaaaacgtatttttcgcgaaggtaatactgccgatggttggttgcccccttttttgaagaaaatttttttgttttcaaaagtcatgaaaacatgcttccaatggttttcagggtcgctgctcacgaaccaggcatccatttcgaccaattcggaacccggagccgaaattcgaacaaaaaatcgaaaataaaaaatttcaaaattctctttttgtttctaaaatagattaaaacaaccaaaacgttttggcgccgacgatttggcgccatgtagggaggaggtagaaatgatgaaatcgttataatttttctgacgaagtctatcaaagagccggattaattcttcatttactctttttcgctttggcttatgttatcttaattttgtatttaggtaatgaatcgtcaaattgatacgaaaaaacaaaagcctaaaataacgcatgaaggccagcttcggccggtgggctgatcgaatgaaagaatgtttcggagacggcacattctcattggcacctccaatgttctaccaaataaattgtttccatttcttcattttgttaattattatatttaacgaaaaatttcattttttataatttttacaatttcttcctgccttttttttcatttttggcttggcgccaaaacgtcggcgccaaaacgaccctggcgccaaaacgtcggcgccaaaacgtcggcgccaaatcgtcggcgtcaaaacgtcggcgccaaaacgacctgatcccgttttaggagcttgttttcgtgaacttgttgttttggcgctatgccagaaactttaaaaaacgcaaataatacataactctaacgcaaaaaagttttatgaaaaagtaaggcaaccaaataaagacagaaagccaaaaaggtttgatcaaaaaccaatgatctttgtcatagcatatggatatagatgtgcattatcatcatttttagcctgctgctttcactgggttgttggacttcggcgatgcttctcgctcgggggctgcccctcacctgacacggaaattgcccctcttccaatgcattcttcgtaaatatttttaactcgttgactggcctcaagcttgtttccattgcatgacaatgttaggtttttgagctgaatattttcaaaatgcttgatcgtcttcttgatcttcgttttcaatgatgagactttttccgttgcctccaccgca

SEQ ID NO: 10800 - DNA, 1249 bp, Heterodera glycines
gacgaacacaaacagccccagtgctggccaacgaacgtcgcggcagcaaccaaagacaaaggctgtactcattggccgaatattacaacaaggtttggtgttaaaagacggaatttttttgtaaaatttaaaccccaaatttccaaataaatgcctgtttttttaaattcgtaatttttaaatttggatttgcacaattccaaattgtttaagatcatgcaagtgtttcgggagcacaagcaccgccactatgtggtgaaggcgggcgaaaaagcggtgcatttggcacgtgccgaaggcggaggcggcacattgggccaggaagtgctggagcttctaatagtgcgttttaaaaaacaatttccatattattataaatactctatatggtaaatgccatcatctaaccctcatttttcattaaaaactaatttttgaaaaaaaaacctgaaattttcctgtaatttttatagtttcccccaaaataaattgacaccatttttcaacagtccgaaatttacaccacaatgttcacgcaacatttgatgtccgccaactacccacaagcggtgctcaccgtactgaccaacccgaacacacagcgccaaatggtgtgcctgcgccagttgatcacccatttgttggaccaacgccaacgccgtgtgctcgtctcgttgccctttgatcggctgtcgtccgaagtgatgagccttttggaggcacgctgcaaggcatgtcgggacggacacaaaagcattgaacgaaacagcaactcttggccgaatgccggtcccgaaagtccattataggagaaaattatccatcatcggccaaattttttgagcggcatggcgaaaaacaggaatttgtaacggttttgcgccaaaaaatgacccattttcccattttggggtcaaattttcaaaaatatggtccaatggggtccggccgggaaaattttttggaaaattatactgacaatgaagatatgataagaaaattgtctattggccttggtcgagtgacttttactgatcccgctggacatttattgatccctccaaattgcaggccgaactgatcaatggtgccccaaatggtaccaatccgatgtacgaaatcacttatgcatttctcatttcgcgctgtgaatttacaagaggtgaaatttgtttttaataaaaatatttcaaaatttattatttcctccccctaacaaatgtttatatcagctgccaaactgatgtac

SEQ ID NO: 10801 - DNA, 3992 bp, Heterodera glycines
  unsure (1)..(3992): unsure at all n locations
tctagagtcaaataaaatattttcaaaattatttatttcctccccccattaatgtttatatcagctgccaaactgatgtacgaattggcgatgcgtttgcgccgtgaaattcagtcgcgcgccatgctgcaacggcggagtgccgcgctgtcggtcgcctaccaaacaatgcaaattgacatggacgagccgaacatctgttacgagccgacggaatacgaagtaatatttttatacacggcacaatgcattgcaataatgccaaatttcaaatgtatcgccaaaatgccatgcattttatgggccctttgttataaaaacttattttaaattattttggaattttaattacaggacgaccaactgctgttggctgcggatggtattgaacgttttgctggcgatggagccggtgaagacggagcagacagaatggcagtcacagattttgagatggtcgacatgcaagcggaggaacaacaaagtattgttgttgttaaatattggccattaaaatatttacggaggataaatgcaattttctaattgatttcgtttccaaaattcctaacatttcgactcgacttggcctttacatccggaaaatatgttgttgaacagtaccattttccattgttcagttgctgctgctgctgctgctgctgctgctgcacgaccacttcgaacccgtgtcgtgatcaccaaagaggacgtggcacagcaactgctccaagcggaggcgcgcttggcactgctggacgcggacgcgcacatggtgccaccgctggtggacgaggacattttgcgcgagtcgctcaaccacaaacgcttcgacatggcctggctgttgatcaagttggacttgagaatcacgaataattttgacaattttaaatcggtcaaaaaaacgattttttcctcgtcaggcaattcgagttgaaaccgtacgagctgttggaacgcgtcacggagcaggcaatccgcacggatttcgacgctgaagacgacgatggtggcggtgagggtggcgactcctcgtcttcgtcattcgttggtgtaatggtctctgacgaggggtgcaaagatgtcgagacggccgacacgagttttggtgccagacagaagaagaagcgggtggtggacgacgagttggaggagttggactgggtgatgtacaaccggcagtatttgggcgacggagggtctgtttttggatccttattttgcaattcatataaggaacacgatccacttaagttctatgatagttgcgcccttgcgacggattgaaaaatttgtttaaaattattaaaatttaactggaattcatttgttcaataaacacaatcacaaaatgaaacaagttttggttaggaccagtacaggaaatttcagcaaacctaaaaatttattgagcaaatgtaaaacttgttttaaaattttattgcaaaaaacccaaatttaaaggaaataaaaccaaagattgaaaaattgttgccatttttggggtttaattattgggaaattaatattttttgtttttctacccatttccattcattttcttcagcagtcattccgcccattggcgtctcgtcatttcctacttggacatggccatggaactgttcccacatgacactgccattttgcgcacggtggccaacacttttctcaagtactcgctgaagttgcccacctggttggagagtcgttacaaggtgttgctttttagtgtaaaacaacaatcatgattttttttattcaaatttagcgcgttcactttgcggatttgttgcgtctgttgatcgattatgacgacctcagtgacgcatttcgccttctccattcacacattgactcggcacggcagcgactccgggaatttgtggcgcgatggattcgcaccaaccctaaggcactttttcaaataaattttcataattattcaaaatcgctatattatctcaaggcaacattcatccccgacgaggaattggccccccttttgccgtacacacacatcaacgaactgttgcggttggcggagaagcgcactgacagacagcaattggtgggtgatttaaagtgctgctcaagagttgggtctcgaatctcgggggtcaagtcttgagtcttgtgaaattttcggtctcgagcagcactagtgatttaattaagtacttaccaatgatcgacgcataaattttggcaattcaattttcagcccatcaaagagacggtggacaagttgaggcagttcgccgacttccaaaaatcggtcacaaagaatccgatgccatttttggccaaatgatttgctctcgcacagggcacggcaacaaaaacacacattttcttggcacctttttaaatattttgttgtttgtcctacactttgtgctgtcctcctttttgatctgctgatgacacacaaatgacttgttgaaattgaaatgcgattgactgccttttttaattgtaatttttgttaacaattttttattcgcataaattagtgcaatttgtttaattagtcaatcaaaatgtttttggaaaaagtgatcccgccccccntaaaatgttttgttgtcagttgagtgagcgaataatgatcacagccggcaaacggatcaacttggaggatttgtgtgatccggtgggtagctttttcaacaattaatgaatctgctgcttcctttttctcaaatttcaattagcggtcggttttcggcacattggttcgagacttaatccggcatttcgataacaaaatcgtttcctaaaaacttgagagttgggcacgggcccggtttctgttccgcagaaattctggacgcattttttgttttgcctgattagtcaggatagataaaccgagttcaaaatgccaattctgatttcggcactccattctttgtgattcattcgtccgcttttctcagctgttgccgcccaaacaaaagttggtgcccgacgaattcttcggcgtttattgccttgtcagcaaaagtgtggagaagtgctataaggcaaattcaaaatccagacaaattatttgcctattttatttaattaaaaaacagaaccgctgttacatcggcttcacggtggacccgaacagacgcattcggcagcacaacgcgggcagacaagcgggcggcgcgaagaagacggacaaccggggaccatggtgccgtgccgggaatgggataataaaatgccaaagtagtgtgtgtaatgttcgggaccgaccctcgtgaatttgttctaatgggcttgacatttcgatatccaacggtggataaacaaataatgatgattggtgatcataacgtacattccttgagttaagcccaagaacatctgctgatcaggggagttgaagcgataggcaaaggctgttgattgggactgatcagaaaaccaccagggcaaacactgatcaacaggctttgtaacaaaaatgatgtcatgctgctcttctctgtccagggatatggtctgcatcgtgcatggctttccgaacgcaatttcggcacttcgcttcgagtgggcgtggcaaaatccaaaacgctccaggcgtttaaaggtgtgcttatgcgttttggatgccaaattatatctataatttcagatcactatcttttggatgaatttttagatcgaattgatcaatataaattttactagtcattagcgatcattagtgctcgtccctctgaattttgctggcaattttgcttccatttcagcgctttgtcgacactgaattggccaagcagcggcgcgagtctccgttcgcctacacctaccgtatcgcgtgccgtatgctgaacacggtgccctggtgcgaaatggcactcactttccgttggcttatcaaagtgggcgtgcccgttttgccattcattgttctctttcatggtgccgccgcttccttcccacttttgaggagtatgagctgccctttccgcccgagtcgcctctcc

SEQ ID NO: 10802 - DNA, 4618 bp, Heterodera glycines
ccgtgaatgttatttttattgaattctgaaccgggttgagtagattagactacaaaaaatagacgagttcacttcgacctggggcgactgagagggggcgatattaactagcagcaagcagcacatagaccatttttggcacaatttgcaccaagttgtcccaatttttaaaatttcattcttataaatgattattcgtctttaaactcgaaatttataaataacacaattttataatggtttttgcggcccaaggcaaaattggacatttagcatttgtttcattaattacgttcataaactcctttcataattttatttttttttttaattttaacgaaataaaaagtcaaacaaaaatataaattctaatttaaaaaattaatgacctttaaacagaaacatcttttccatttatcaggtttcaatgttaatgaataaacaaaaataacgaagaataataatttttacgatcataaataaattcaaatgaaaataaatttcattttttcttcaattttctttttttcttcgtaatcttccatgccctcctcaaattattgaattaattaattcaaaaatgtatataaaacttatataattttttttcatgaattccctaaaattgtaaaataactaataaattgcccagcaaaatcatttaaaaattagaaattttactcaactcaccaacaaaattaacttccgctcgccatttttggacatcatctaaatcaattcacaaaaaatccgctattagcatcagagttaaagggatacttttgcctgagtcggtcgaaatcattcatcaatttctgccattcatctgtccgtactaaacgagtaggcaattgttgaaaattaagttttattttttctagaatttactagtttttatgacaaaaagttggtggattgaaacagacgaaaagaaattaaacaaattacggtccaattatcgtatttcctctaatatagtgcgtccctgaattagaaataaagccacccttttgaggggggttgataaataaagccggccctgaattatctgccaacccttacgcatttatatattttttttaaattgtcgaattggaaatacttttcgtttgggcaccatcgcctaaaatgttattcaccagattttggacaggataatttctttggggaatcttttatactaccctaattaattttactattgggtttgttcttccttgattcacaaattgtcattattttgatattttgggttacatcctctaatatattattctccaactgttttggggtactttgggtattcttttaaactccttatatttcattgtccaacagaaatgaaagtataaaattgaaaaaactaaattatatcgaaaaaattcagcatgccaaattatatccaactgaccaaatgaaaaattaaattctttcatttatcctctcgcctcaaaaaaagagttgatttgtttaactgctttaatgcctgcctatttggccttattttcaatgcaatgtgcattgccgtgccaaagttgccgtggagacaattatacttcacacaaaccaccaagtaatttcataatttcctcaaaaattaataattgttcgtaatcattttccaataccaattaggtaacgtgtgagttttattatttttttctttaacacaccattgtgcttattgttcatttgtgaatatgatattataaattcaacgttttttaaattgtatacataaaattataacaatcattacaatatttatctactgtttcattttttgtttttattttttaatttatattcaaatttgtacacaaaaacatccgccggatggaaatgaagtttattgaaaactatgtgagaatgtttttctttcatcattatttttgctttgagaatttttgcatatcgaaattgaattgataaaagccggtcaattatgcattaaaattaatgaaaatttcaatttaatatgagaagattcattcatgtctataaggtttattttactttttcttactaccaattcattttgaatttttattatatttcattattttaataacaaatgaattcaaaaataattttaataattcacagaaatttcacgtcaatgccattattaatacattttgacaaaaagaaatgaagaattgcaaacttcccgtttcccttttgtttaacttttaagcctcacttacatattagagaataaatgaagcgctgacgttctttcgataatacattcattattttcgaaaacaaagctcaacgatggaaaaacgagcttacatctaatattttaatcaatttttatttaaaaaaagtttcaaatatactctttaaattaaatagacaaatttattgaccataaaaggttaatttaggaattagaaacttcaattttaaaatgatattaatttaatttttaataataaaaattcataatatttagaaattgttttataatttttgaagatgggcatttgtcaaagcattgaagaaaaagctatggaccttaaaacgaagcaaatagaccgagaacttattcaagagcatcttgacgcacaaaagattgtcaaactattattgcttggtaaaattttaaaccaataaatttaataattcaatttaatttcaattattactaaatttttaaatattattttttttgattagtcttaattttaggtgctggcgagtgcggtaaaagcacaatattgaagcaaatgcggttattttttaaataattgctttattgaagataaattaagtgaaaaaaaaaattaaaacatgcattcatatgctaaagtattttaattatttgtttaataaaattcatttctttgacaatcagcattctacatgatcatggcttcacggatgaagaacgggaaaaacaaaaatcagcagtgtacaacaatacaggtcagaaaaaacaaaactaaaaatttgcatgatttctttttaccgtagtttgattgtcgttattatttagttttggctatggccactttactccatggaatgcaaaggctgaacatcccatttcacaatccacgaattgaagtaagatataaatgatcatcaataattgtgatccggcattgcagcgtggccactgctaatcttttaatccattttttccataaaatttttgttttaatcagaatgaagcaatgatcataatggaggtggtaaatcatgggaaagaatcagagccattaagcgatgaattagcacatgccattaaaacattatgggcaggtaaaggaaataaaattgtaaaaaaatggatattttgtaacgatgaaatttaaaaaatggaatatttagataggaacattagagaaaaggtttatcctcgagggcaggaatttcagtaagtgttaaactaaattgtatttgatataataaaaattattagttaaaatccttaattaaacaaacattaattataaaactttttgatttgtatgcacaatttccttcatttaggcttgtggaaaacagtattttgtaagaattttatttaaaatataataatagttaaacatttattatattatatagttttttggaatcggttgatcggatcgcaaaaccggattatcgtccaactgagcaggacatactgttatcaaggatcaaaacgacgggtatcattgaggtgatggtacatatttattatttttaaataaatctaaattgccattttattaattatcggatgttacgattcagtttagcttacatttatttaccacatactagtataccgtattttctctaattatatgcccgtctcattaatatgcccgtcaccaattatctccccctttctgatgaggttgaaaaataatctctccgtcttaatcccccgtctccgattatctcactttataattaataaaaaattaattcaattttaaggttaaattcaaaatgaaaacggttgatttccgcgtatttgacgtcggtggacaacgttctgaacggaagaaatggattcattgttttgaagttggtgttttcttttagtttcataagatcaattttccaacctaaactggtgccagttttattaccaaaacaacaccaattcgaaaatttaatctcgaactaattctgaagaaattaaaaatctgttaataatttatttatatttaagtaaaaaaatctttaaatagtattaggaattctttaaaaaaaaagtttgttaaagctaatctttcttgattaaggatgtcaacgcaatcattttcatcacagccatcagcgaatttgatcaagtgctttttgaggatgaaacaacggtaattgatgaattttataaaattaaatattattttatatattcagaacagaatggtcgagagtatgaggttagcattaatgttacatttattgtgttaagaatattttttattaaattaagaaatggacaattttcgttgtattattttttaattaattgcagattgtttgagtcaatttgcaactcaagatggttcacaaacacgtcaatgatcctttttttgaacaaaatggatttgttcattgaaaaaatcaaaggaatttccataagtgtttgcttcaaggattataaggg

SEQ ID NO: 10803 - DNA, 1414 bp, Heterodera glycines
cgatggtacggtgggccgatggcgaagacgggcgggctttgatgttcagtgccgggatggggccgagtggaagaacaacagacggcacatttccaccaaagatcccgttgataagatgccaatgcctgtgggattagtcaaacgaggaagagggaaaaagtgggccaagcccgagattagtaaattttggcaacaactatgtttatacgagaatttcccctcagcccccaaaaaaagagattagctattaattctacaataaacccaaaacaaaattgtcgcagacaaaactaatacaaaacttcatttcattttggcaaaaaaacatttcgggatcggggtcgggcagcaggtcaaaaaggttggggattggagaaggcaagatcggggtcgtggagcaaccctaattaaaaatctaatttatatatttcaacatatttaggttcaattaatccttgattctgttattgatttgattatccaaacaaatttgcaaagttgcggactttattgaagaaagtttatcaatatttcttgtttcaatacccatcatattatttttttatttaacaactttttttatcatgcttagttactacttgtatatatttactaattatttgttgaaatttatcagtttttatcaatcttcatttggctttggttttttgttaatttttgctttatgaatacaattgtttatttttatttgaattgaatcatttttaattattatttttttctaaaaccattattgtccttcactgaagtttttgttgttggttaacctgttaaattgcttcaatatttagcgtgattcaacaggttttcattgtaaaataaaatatcaaaaactttaagaccgattcagtcgccaaccttcatttatttattaattgacataaaataataaaccataattgagacgggagagagtgaatcaatttcaagagtctttactcagtaccattattttgttttgcctctaattttgttatttctatttaaaaatccaattttttgtccctctattttaatttatatgtagcagaaatttttggtataatttattaccaggtctatttttcattcaagatttgacattattattttttatttattcaagttattttaacatgcgattcaatcgctaaatttttggctccatttaaaaaatatgaaattttactttttgacgcaatttaaaagtttcgcatgtgcagaaacttaaaaataaaataagtttttttgaagtttttcatattttatttttatacggtatcggagtttacctttaatttaagaatgttttcatttttcacaaatactcactccaatacattatatatattcttttcttaacatccatttgaattttcttaattgttttcttttaaattcacggtttaaacac

SEQ ID NO: 10804 - DNA, 4388 bp, Heterodera glycines
  unsure (1)..(4388): unsure at all n locations
tcgagaaaaaggaatttcaactgttgtccgaattcttcccttctagtggctatnccaattccgnaagnatnnatttcatcccttgattaagtcaaacaaaattgtcattttaaaggtgatcaacccattgatttacacaatggtatgttttttaatttgatttaattaaaagttttaaaatggccaaaccgcagcaggagggaaatgggcaattttttgtgagctattagaaaaatctaaaaaattgtgaaaatcattttgtaagcattaaatactccataatatagttaatataactagggaagcaacttttaatgatttaactattttttgctcaattgttttgaagaaaggagctcaaaaaacgcgtttttacgttgaaatttccatttaaccgtcaataatcttctgtggaaatcactattggcatttttttacaatttgtacattttttgaaaattttattaacaaaatgcaataaaaagaaaaatattcccctacaaatcgacccaaaaaaatttcagaaacataaacgcctatgaaatgaaaaactttctcgaaatttcatctttaaaatttattttttttacttgccaagaatttttgattttttattctccaaaaaattagcgcacgaaaaattggaagtttaaattttgctcaatttttggcggaaaattatgtcaattattcgtcactttcggactttttttcaccatttcatctctattttggcatttttcactatttttgttaattatttcgatattttccagaactaaaagttgctaccctaatgataacaatgatgaagtgcataaaattcgatttaaattacatttaattttctaaattcttaactaatccaacaaaatgaaaccttattttaataattgtacgaaatttaaatgtattttttcgtcgggttaccatagcaccgtatttttgtcaattatttctgctttttcagtacaattcggattttcggcgctgttcccgcgatttgttgggcatgggctgcatgaaccaacaccgacgcacaatgagcgtcaaaaaactgcaccaacagtcaaacctcttttgacaacaattgaattcatcatttttataaatattttttaactgctctcggtgctttcattataattttgtcaaaattaaattttcatttaaacccaatctttttttatttccaaacccctaataaaaagagtatgaatttcatctttaatccgagactggatcgtgatcaaaaaaaaacccgagacatttctcgaaaaacctaataatgaagaccgaaaaattttgtttttttttaaattaaaatttttgaaaatttcttaccttttcttagaaaatgtataggttggtccctattccgaaacaaaatttacccgaaaaaaatccaaaattcttgactgaaattttctacatgccttccttctatgcaaaatggactgaattttacctttggatcattttaaacccatttaaataataataatatttatagaattaaaaatatttctcttatgttttatgccacaatagataggataagcataattgtcaatttttgattatttattaaattcataatttttttttgggttttgtttgtatgaaacttcgttctccttccttctttctttcttttttctcctctctttgcttcttcccccattcaatcagaacaaaatgcaaaatgcagctaaaggatggaattagataaatgaaattaattttttatggtttcttttttaccggccaaaatggcaatcaccaatgggaccaaaacggcgcctccactgccaagcgatgggtgcgtgccgagcgcaccgttgcacaaattcccggtgcaacaatcgaatttgcatctggggtcacgtctggccacttcaaaatgaggatcacctcttcctgcgcacatatccatattagcacagcccttgacatggccgctatcttgaaataaagataaatttttaaaaaacttttcattaggcgaagcgtcattttgaaggctttactgctaattttaatttcatttttcaatgcaaagatttggaacaaaaaaggctaaacttaaatacacatttgtcactaacaaataagagcccaacattctttggttaccaactgctgaagcgcagctcatctttaagcagaaattgagcattgggggacagaccatttgcccttttgcgttgaactcgtcattcttggaatcagtcataatggccaaataacattgaagcgctggtaatttaatattttaatatatttaaattcaatggttttctcaaaaaaaaagtatgtttaaagtcatcttaccgaatgcagtgggcaccaaaagagccaaagtaagcagaaaaaaagcggcggattgaacaaacatcgttttttgttttgtttgttaaaaattgacggaagcagatttattctggattattatcaaatgcataattattttatgatttgcagttttgcatataaaaaaacaaaaacaaagcagtaaatgaaatgaaatgaaatgaaatggaatgaaatgattttgcttttgcactgtacataaagtgaacggaattttagcctaacattgtgaaaattattcatccattttatgttaattgatcagggaaaaaataaatgaaaaattgtgaagctatctgacaaaataaaaatgattcatcgctttgtgaaagcagcggcgatatttaaaaacaattaatgacatttaaaaagaatttgtataaattgtttgattaaataaaaaaaggttcaagagtctaccgccaatcagtcaaccgcctgcggatcacgcgcggacttcttccgaagcaagaagtattgcaccaaacactggccgccgtacatagtcaagtgtgcgctgctttttagtacaataagcaaattataatttttattttcactatgttttcaaatttcttcgggttttgaactgattcaaaaaggtctcagatgggccgtttcgtccttattctctgatttttagccttaattcatgaagataagatccctcgaatgatcggaacgggccaactccgtctgagccaactttgagtcaatataactcttgaagttattgaccaaatcaaacaatcttgatatcattcgaaagctcttcacaggctctattagcctactaaaaattacagaaaatttcgaactataaaaaaaggtagaaataaaaaactttgaaaattctgccttttttgcggttttcaactgacaacttttttgagagctgattaatcactgagaaataccttataaatatcttctaaacatctagggctttcgaatgataccatgattgtgaagtttggccaacaaagaaaaaagttatagctttttgaacattgctgagacggagttggccagacggagttgacccctaccgtcgaatgataccaaatttgtccgggttgggcacttataaaaaggagtaccctttttctctgtttctcaaatcttgaactggttcaaatatctgtttaaatttttttttcaaagtgttagaaaaagcccagaacacaacaatcatagttttattgaaaaagggtttaattagaatagagtttaaaaatttattactttgatcagtgcagtaatattctccttaattctataacaaatccttttttttaatttgatagataaatatttaaataaattcatttaaaaaaaataatatttttaaacatcgacggtgttttccacaaaacgaatgaatcatcatttttattttgttaatagctttacaatttttaatttgcttttcccaactgattgacaattagcacaaaatggatgaaacttttcaattttatgcaaaaggccgttgattttatttactgtgaaaaggcaaaacgaaaaatacctgttaatttatttaatgagtttttgggtcttttaattaattgacaagagattaaatgaaaaaaaacaaattaattttttatttaaaaaacaaaatattccaaccattcttaaacaataatgtctgcttcatcgacattttttctgcttttttccttttggtgccaactctaaacggttaattcattaataactagtgttgctctcggggtttttttttgggtcttggtctcgaatctcgggaaaattttcgttcttagcagcagcactgtttctgcaaaaataaatgaatttgagaaagaattgttgtatattatcaatttagtttttattttgtacatttcagcgcttagatgctatgancgcactgaataagatggccgcggngtataananaagtgtactgccccccccccccctcaacaccatgtgcatgaatatgcgtgtgtgtgacaggtaaattcaagctttttttgaacacagaa

SEQ ID NO: 10805 - DNA, 1627 bp, Heterodera glycines
taattttcattttattaacaaatgccctgggtatgttttaatcacacatttaaaatattaaagtacaaaaatttactttccaatacattcgcataaaagtaaaatcacaatttgtatgccttttttcgcctggcaatgtttcttctcccattttagttcaatgcaaaatggcaattcctgtacaaaataagaatattaaagctattattatttatttatttttaaattccatccgttaccagtcaaaatgccaatcagtgcggccaaaatcatgctgtttccagtgccaaaagtgtgcacggttcgcatcacgccgttgcacaaatccccctggcaacagtaattagtgcaactgtctgtttcattactcccttgtctacagtctttatcggacatgcaggtcttgtgggtactgtagaggataccgttcttaccttggaaaatgaagcaaatctttacgaaaattttttcaattaaaaagaccattgctagagactgtgcctgtatggattaaaaacatgcatgaatcgccaatcgtatttgcctaactcggggcattattttcacaatgttctgcagcaaaattaggcataatttgcgaaattttaagaaatttacaaatatttacatttcttttttaatatctccttttttccagcctgaaagccacccatttgatggtcgtcaacttttataaacaggcagattttcgaaaatttaatgcagaaatttttttttgaattttgcgaaatgtccgtccctatggcataatatttctgtaccatatttaaatttattcatttaaactcacaaattagcacagtgtttaatgatccttctcatataaaaacgatctctgacctttgtatttgcagtcaatttttgcgcaattgttcaactgatcggggcattttccctgctctgcttcactctttatcggaatgttgctcgtttttgcggtaacattgtgaacaccgtgccaacattcaagtgctgaaaatgagcaaatgttatgaaaccggaaatttacgacccgatttaaaatttgtagctttgaattttaatagatttcatggagcaagattttgttccaattattagtaccaacaatttgcattcttagatatttatataggttaaaatctttgtatgacacattttcgcttaatttgcatttatttatttctattttttgacttttttgtcgattctttgtatcggaataaaaaaaaagattttgtcaattttaggcgccggcgaaaataattaatgaatttatttttatgtaatattttttaacttaccatttgccattgacacaataaatgccaaagaaaccatcggaaaaagggatgaaggcgccatttgaattggaaaagtgaaattgtttatttcttatttttaatctaatacaaaaagtataaaagggcctttagtaaaaatgaataattttcgtggttattcaatgtaaaatggaaaatgtttagtttcatataaaaccaatgattcatcatttgaaataataaataataaaccaaaaatttggaaataaataaataaataaaactgttataaaattaatggatgaattgactttagcaaaagcaattagattgaattttaagaa

SEQ ID NO: 10806 - DNA, 1074 bp, Heterodera glycines
taatttttaaaaaatgatatgcttttcggatttaacgatcgagcaagcaccaagcatcccggtctgtctttaaataatcagaattcatgtttttctttccgtaaaaattaagcactgaattaataaattcctatttttataaattgaacaattaaataatatttaatttttacatataattttaattcacctgaaaataaaatttgattgtatttgggcgaaaatgtttcaaccaatcggtccaatgccaagaataaattagcactcgactcggccgcaaaaagcgctaaaataacatttaaatttcataaaaaaactattttttagattatcaaaaaatattaaacgaagctaagctctccatttatttggtcataaaaatttactgacttttctatttacttttataaaaaaattattgctttttttctcaccggccccacatgaaccaataaaataattaagagacgcatttgagcagaacacaacgccaaacacgctgtacagtgaggagacaaggccatgaattggcaacatcagcacatcagtgatgccgatgaagaacagaaacttgtagcagggttgggcacggtgtttccaaattgctatcaaacatggaatgtagagaatctgtttgaaattaaattaaattaaatcttacactttttaatgaaaataaattataactatttttaatcaatttttgtgctgaattcaattcttattttggaaccccttttgagcaaaaaagaaatgctcctgatggtctcatttcaagggcgtagccagacccttggcttcggagggggctgaagttcaaaaatttggtttttaggggtgtgtttttcgttttttgaaatcccgaattatggggtatattttacaagatttttagccgtttttcgccaaagattactattttttgacattttggtaaaattggaggtcccggcggtgccgataggcgccgccgggaaaattttttgagtattttaatgcaatttgttaagaaaattgttgaaaatttcaaaaaatttactgaaaatttttacttttttgcgtttcggggggggg

SEQ ID NO: 10807 - DNA, 1822 bp, Heterodera glycines
  unsure (1)..(1822): unsure at all n locations
ttcagcaaaaactattcatagacaaaacaaaataggcttnaacctaaaaattcataaaaaaaggaatctaaaaatatatcaaattctcaaaagctttaaatattttcaatatttacaaactacatattaattaaattttatgtaatttagccaaaaatgccggaaaattttaaattataaaactaaaaaaaatattttcgaacttgggtttagcgatgccgattgtgggggagacggagcaatttgttggggaattttcacagaataagaactgccaattaaaatgacagaatgttataatggcacaagaagacgacaacaaatagcagaaaacagtgccaattggcagcagatgttttctatttttaactgtttttttgttgacaccctcattaattaaataccccagctgtcagtcacattcatttgcctgttatgatgtgccattttctgaatttgccacttttttggcataatatttttctcccataagttttctcgtaatggtttttgaattagagcgaattatgaatagggcttatatttttagggttttgcctattttttcctgagctccctatgttctgaaaatgcacgaaaaatatgttgttatttttttggtagttgttaattgtaagctacttttcgagtcattagcacttatttcttaaatctttatttttagagtcaaatgcataaaaaaatttgaaaaacccatatttttgcctattttggcattttgcccttataacaaagatgcaataaaacgaaatatacatcactaagaagcaccttaaagtttcaaaaatacacccatatgacttaattttattactttttgaatacattttgtcatttaataccccctaaattttaggttttttactgcctattttatggatttttagagcctaaaaatataagtcctacttatgaacatataaaaataacaattttatgggttttgtaagattaataatttttcttcgttgaatttttttttaattataaattttaatcataaaaaaatttaaaacctataaaaatctaaagaatcagaatttcaaatattaaaatttcttattgaaaaaaaggtattcaaaatataatgataaaatttatgaaaaagtaaaacattcctcagttttgtcaagtcagcacaaattacatttaatgctgtaaattgaattcagctgtcataaataattctcacggttcattcaaaaaataatgcaaattaattaaagaaaaaggtgaaaattgagaaacccaaaaatattacaaaaatgaaaattaaatagacaaattaagaaactttaagacaatatgcactcttcatcttaactcttcagtttaaactgtagccaatttgtccgattcaatcttctcggcatctaccgtaggagagttgttttcggtctccaccgtagtcaaattgtccgcgttctccgtcacatcccccgccgtagtcgaattgtccgtgtcctccgtcacatcctccgccgtagccgaattgtccgcgtcctctgtcacatcctccgccgtagtcgaattgtccgtgccctctgtcacatgctccatcatagtcgaattgtctgcgttctctgtcacatcctccgccgtagtcgaattgtctgcgtcctccgtcacatcccccgccgtagtcgaattgtccgtgtcctctgtcacatcccccgccgtagtcgaattgtacgcgntctgtgtcacatcctccgccgtagtcgaattgtccgcgtcctccgtcacatcctcccgcgtagccgaattgtccgcgtcctccgtcacattccccgccgtagtc

SEQ ID NO: 10808 - DNA, 1211 bp, Heterodera glycines
tttgaaagaaatgtttttgaaacgaatttatgcaaaatcttaacaagattcagttaaatattcaaatttttatctcagcagtacacttccagcttagagttcggcctggacctggatccaggcctggatttttcctggatccagctccaggtccaggccatttttcggcgacctgatttttcctggacctggattttcgttgccccctaaaaattcttattcttttaaaaaattggcttaaaatcgtaaattttgtcattttttgaacaaaatcgttaagaaatcgcattaaaaattacaaatttccccggcggcgcctatcggcacccccggactctcttccctccccatacccaaaaaacttttcggaaaaatacgccgaaaaaaattgttaaaaactgactttttgattctgaatgcactgaaatttacaaattgataattttttccacaaattattaaaatcgattttcggaaatgtataaatttctcatttctaagcaggaattattttcttaaggaattgacccaaaaaatcatgaaaattagtcattttatgattaaatcggtaagaaactatgcccacaacaggcacgcctaccgaaacaacctgtcctcccctcctaccttccccaaaaaatgtctgagaaatttgacttaaaattcaaatttctgcttataaatttttatgtttattttttctttaataaaaatggcaatattttgtgagtatttaattaaatttacgaattactctcccgatcgcgcccgggattccgttaaaaatggacaggattttacgagattcccgttaacgctcccggaaaattattttaccggtctaaaatttatgcagaaaatttttggcattctgtcctattcaaaatgtataatggattccgaaaaaatctgatttgcggatccagctgcggttttgaaacttgaaattttgtgggacgcgacccgcagggactaatcccgcaaaattccacgcgggatccttacgcaccgggctttaatctctaattaatgtaaaaacacgagctttgcaaattccaataattttgattaaaaaagaaataaataattccatctcgcagcagaataagtatttggtttttcctattaggttcctcttctcttcctttttaatttctttcgatttagattttttgaccctaaatttattttaaaatgtcggatatatcgga

SEQ ID NO: 10809 - DNA, 1706 bp, Heterodera glycines
  unsure (1)..(1706): unsure at all n locations
agttgcaatattgattttcaaaaaaattcacagatgtgggtcgtcagaagannaatggaatttntggggtgggggattactcgggtttcttagcaaatcctattaaaaatctcaattttcttgggtaacgcctctcataattgccgcttatcctcagaaatttttgataagaatgctccgaaaagcaaaaaagctttttaaattagttacttggatgaaatttcggatacatctttagttttttaattgtctttttttaaatatatgtgaatttgtcagccaattttcacggaattttgcaacaaaaaaaatggtacaaatttccttttttccttaaatttatcccggctaaatgtgaacataactaattggaaataatttttgaacgacttataattgcttaattaacttggtatttaattcagtgaactcgacacgctgatcaagcaagagaaggaaacgattgaacatcttctcaaggagttgccgacccaatttcgaccaccgtctgctgttgatgaacattcaacggcacaaatgccatcgggaaaccagcagaaacagcagcagcaattcaatggtctgtctgattgggctcatttgttggcacatttaaccagtgctgtggcaatgtgtgaagccgcattttccattcttatgaaaaatgtcagaatttttatgtttccaaaaacttgcttcaaatgtggagaaaaaatcttttggtaaaaaatctgggtaaatgtactaccgatagggcacatgtcccactggaatgaaaattataatcaattttcctaagaaaaatgagcaaattttttggatgtcttttggttagttattttgggaaaaacgctaaaaaatatttaattgttgtaattgtaagaccaatctttcggaatcccccccccctttttcgcgttttgtatgcctatatgtaatcctgtaaaaaaaaagagagcccgtcaaaaaaacattttttagcgcatttgaatgccggcgccaacaatccaccgcagctgaagcagcgtttcatcgcaccgccaccggcgccctcatttctgaacccgcagcaacagtcaaagcagcagcccccgcccaccgctgctgctgacttttctgtgccaccgccacccatcggcggcatgcagtcgcagcagcaacaaccaaatgagtcagtagtcggtcaaattccaacagtaacgcaaatgtatttgtataaatatgccaaaaaaaaatcaggggggttgagattctagaccttttttttgctgttcagccaaatataaacttgagaatattttccaaatatttaatttccgcggagaaaaaggcatttttgtatatttcgtccaaaaatgggaattttatgaaatttttataaaattttccccatgatacctgttgttattgccgagacctcaaaactccatgaaattttttaaaaatttaacaaactaacaaaatttccgtaacttttgccattgttttttgatggttttaaatatgccgctttcaactgtcagattgtcttccgcttctttgccacctccgccaccatttgtccaccattttatgcgtccgccgccgtcgctgccgccccccaaattgccattgccgcacagttcgccggcacaaatgccaccgcagtttggccacagttcgtcccttttgttcacaaagcctccaccgacttcggttgcatcaga

SEQ ID NO: 10810 - DNA, 1499 bp, Heterodera glycines
ccactatatcttatccttttttgagggattatcgtccagtttgaatcaacagcagaagaattcacatttcttggtaagctgaaaaagcatttttttattttttattttgaaattttcgttgcattttcttgttttgatgccatattataagagctttgtcaatggaatatttgcgcattaattgttcgggtgtcaatttcattttatttagttgaccaatttgtacggtgaacaccgtccaacttgctaaaaagtggtcattttatttattaaatacacaaaagtaaacaaattattttctataaaataattataattaccgttatcaacttccatcatttttttatccaaatttgtcattaaatgttctttttttcctctcaatgaattgctaaataatgggccaatggtctaaaaaataaattgagatataatattaatattttatttaaaaaattacattcactttcatgtggctgttgaatagttccgctaatactgcacaatcgctttttgaataacaaaaaattgccaattttggcatattgccaaaaaaaatattatttttttaacataaataaaaataataaaatgttagtatgatttgatataacaatattttattataacaaattctgagaaaaatttattttaagtagaaaaatttagaaattcaaaaaatgtcttctaagcatttttgcaataattgatgcattcttcgtaagttctaaaataaaacttttcaaaataataaatggatatttttcttaaattactcaaaattattcgcattgccaagtgcaccaaaataagagaacaccacacaatttccagccaaagctttgtaaaaataacgctaaatttttttgaaatcaattttaattctgaaaaatcattaattaacttgtgtatgattctgttgaaacacatatttcccactatcactttgaaccttgcagacaatgtctgaaaattgttaaataattaacataataaacgcaacaaccattgcttaggatggcatttttgtggaattaatccaccagaaaaaaaaaatcatttttctcagaaagaattttcccgttttaagtgccggattcccgcaaattctgcgggataacgggaaaacgcgagattcccgcataggattacttctcgcctttttgctggcaaaaattatcattggaaatcacttatccagggtaggtaaaaagattggagaattctggaacccggggtcaggatccaggttatggaccggcgaatcagtcaaacaaaaagaaaaaccgggaaatccagctataaacccatgaaccgggacttatctcggtaaaaaacttgactgatcccggtcccgacctctttaataaattaattaatacctttattagcaggacaacaatgttcgtttacacatttgtacccctctggacaattgtcatctgctggacatgtcaaaacacgcgattgactgtcaaaagcagctctcactccgcctt

SEQ ID NO: 10811 - DNA, 1574 bp, Heterodera glycines
  unsure (1)..(1574): unsure at all n locations
tttatatttttaaatnntaatcaattaattagttactatgtgagcatctgttgtaatcatcgttagcttggcaaacattnagaagagaagtgattgtgattaataaaacgaaaaataacattgaaaattttgctataaaaacgaaaagtatttttagaatttgaataaatatttgttattattttcttcacactaacatattttatttaatttccctctatttttagttcattaaattaaatttccctattttattattttctcaatttatcaaatttttgttttgacaaaatatcatttcgccgaatttcattttgattaattttccagcctgtactcatatgacagacaattcatttggtgacttttgttgtaataaacaacttggaccggtcgaaggtttttaattgagccccatcaaataatttattactttctctcaaattaatggcttttaattaattctcaaaattacttactgtacaaattcaaagttttttttttttaattttagaataaaaaatcgaaaaaatgaaaaatttccttacatttttggcttttttcttaatagtgccatgtttcaaggctgacaatgagaaaaacaaagcggcaccacgagtgtttgctgaacatccgggtagaagaaattatcaaatattaaaattaaaaaattgatttttaaattttagggccaaaattggtggacgaaaccacgcgatggagcaaatgccaagcggaccaaaacctgaccatttatgacttcgaagtggaaacacttgacggcaaattcaccaacttggagaagtacaaaggacaaattgtactgctaattaatgtggcaacattttgcggtaaaaaactcaaaaattcaaaaaaaacataaatattttttcagcgtttacccaacaatatttggacttcaatccaatgctggagcgtaaccgtgccaacggcgtcccattgacaattttggcatttccatgcaaccaattccatttgcaagagccggccgagaaccatgaaattctcaacggggttatgcatgttcggcccggagacgggtggaaaccgcactccaacctgcacatccatggcaaattggaggtgaacggcgccaacgcacatccgttgttcgactttttgcgcgactcggtactgtttttcgacgctgctaacaaaggaaggtccccaggtgtccgtgggatttccaaatgaaatttggtgggtggatagagcacccatgggttcttaagaaaagtgtttttattttctgcgaaatgagtacgagtgccgagatatgacgtgccaaacttttttctatcccaataaatcgaataaacatttgcaccgttgtgttgttcggaggtgcggaggttgtgctcctgccttccctttttgccctcgcaggctcgaatcccacatatgttaatttattttccccgctttaattttgatttgatgcaaattaatggccattgaaatccattccatcgggccaaagatttttattcctcctccaagtcattcctaaatatgttcgaatatccccaaagtattattgtccctttcaaaaa

SEQ ID NO: 10812 - DNA, 1987 bp, Heterodera glycines
aatggttggaacgatttctgtctcccggataatgctaacttaaaagagaagcaaatcccaatccatacacctggaatatgccagcctttagatgtttttttccggtagttttgttgccaaaaataaaataaaaaatagttttagaatttggaagcaatttacgagaaaaatatcggaatttgtaatgatttatgatgtgaaaataaatttgcacgacagggataacattgttaaattacaatcgttaatccataatcaggttcaagcagaacgttttcatggatggattaattttgcctggagaaaatcgggttattacggggacgagcctctgccaaatttttgccatcccgttaaatactgctttgaagtgccaaaaaatgacatgtgtcagaaattaaattgtgaatgttttattttattacggtgtgcttattgtgaattatatttatgctttaaccatttttttaatgattaccatttgtgtgaagatgaataaaattgaatgaaaaaggagaatttttgacccgatggaattgatttcaatggccattaatttgcataaaatcaaaaataaaacggggaaaataaattaacatatgtgggattcgaacctgcgagggcaaaaagggaaggcaggagcacaacctccgcaccaccgaacaacacaaacggtgcaaatgtttattcgatttattgggatagaaaaaagtttggcacgtcatatctcggcactcgtactcatttcgcagaaaataaaaacacttttcttaagaacccatgggtgctctatccacccaccaaatttcatttggaaatcccacggacacctggggaccttccttttttatacgtacttattttaagaaaaaagtctttaaatttaaaggattctaagaaaatgttccttgtgtttgtgtctaaaagcaattattaacaatttttggcaaaatttgatttttgatgctaaatcataaatttgttgtttcattaattcaaaaaattgtcatcctaattaaaataaaaataaaaaaactaacgaatatatactcaaatttttccattcagtgccctcaaacggtccctgtgcttgggatcaaggaatcaatgttctataatccgatcacggtgactattattgctttttattcattttttcaacagaaaaaatctgaaagtatattaaaataaatttgtaataatttttgtaggtcagtgacatcacttggaattttgaaaagtttttgatcgacgctaacggagttcctcgtttccgttttcacccaacaaattgggtaaaatatattttaataatttcacttttgagttaacattttttattttagtcccatggtaaagaggtccagaaattcattgaccagctgtcagccgaacagaagaaagagcccgtgaaaaaggcatgaaaaggaagtgatttagaaatttggaaaaaaataaataaaaaccattaatatttaaattcaatatttgtgttaattttagaaaaccaaagtagaatgaagataaaataaattgtttaaaaattttaaattagctgatcaaattaagacttcaataaaaaggtaaaattgagacaaaattcattaactaaaaatggtaataaatcttctgccattaacacattaatcatatgagattaaacagaataaaattggaaaaaagaagaattcgtcaagttaaagatgatgagagtaagtcaaaagagttgatttgattaatattcttctaaattcttaattttattaccatataaaaaatttcaaacaaatttattattttttattctctcatattaaaaatatgtaaaattgtgcaaaataatattaaaaattttacattttcaaagatattaaaaaatgtcaacagaaattggaaatgatcagcagcagaagagcaaaaaacactcaacagttacaacaactgcttggaattcgatttatttgtgcacattattcacattttccac

SEQ ID NO: 10813 - DNA, 6227 bp, Heterodera glycines
aatgttagaaattttcattgccgtttcaaaaaagttctgaacaaaaaatgctgacttaccactttttgaaatgttatgacaataactttttttatacttaagtaaaaaattttggaaagttattctgaaagagaacaattaaagctattgaatgatacaataaagaagtaatttggttgaatttgagccaagatatgaatttttatgtgttacccattttttgttttcaaacccattggcggatttaagaaacgcgcatgggtggcggaatttaagaaacgcgcttaaaatttagctcaaaagaaaggcaggcgaaaaagtcggcgtaagaagcgagtggtggatattgtttttggattgctatattgcttggccataattatagcgatatgtgcttggcattgggcaaaattcaaaattaatgaatacaaaacaaaacagaaaggtaagataatcgaatcagtcaaattgggcgttggggaatgttttatttaataacagtcggaaaaaggcaaaaaactttttgtaatttcaattaaaaataattaacaaaatgaaatacaaataacacttaaactgatttaaattgactactttaatttcagaaaatagtttaacaaaaactggagacagaaatacagaaaagcttttatatacatttaacaatgaattaaaagtttcaattaatttctttaaaaattgctaaaaaaagtcacaacacataaaattcttcataaaaatttagttttgaaaatcaatgccaacctatcaaaacagagaatagatgaagaaaacaaaggtggtgatgattgcccaatttgcctatcggaatttggagtcgtagaggaggaggctacagaattgtcgtgcaaagtcagttatgctattttaatatacaataatataaaatgtgtaaaaccaaaagtaaaggcggtacttctaggttttgtcacccccctgaaattttttttctaataattttttctaggctaatttttgatgctgatcaagaatctgacctttatttttagccataacgtgttttaagtgagttatgtgaattttttcgtaaaaaagtgaaaaatttaaagataaaaaatttaattaggcgacataaaagcaacaaatttcgtaaaacctcatcaaaaaacatcatttatgacttttgatttgttttcttacattaaagccgggtttgaaccaaaaatgcgaaactataaaaaatttgattttcgactttttgttcgaatttgggttcaaagttcgaattgggctgaaatggatgtaagaatcggattctctgaccgcgaaaacccctaaaatgacttttcttcagaaaaaaattttgaaatttttttttcgaaaaggggcggcactattggcactcttacctttttaaatttttcacgtaaaatttctcacgtaaaaaatgttatgaataaaaataaaggtcagattcgagaacagcatcaaaaattagcctagaaaaaattattagaaaaaaaattcagggggggtgacaaaacctagaagtaccgtaaagacgtagtaaaagggcactcgggggatgcgccccgaggggttaaataaataaatatttaaaccggttatatgaaagttggcaatttaagcacaaatttttataacaattgcacaaatttaagttcacgatttacactttttttttgtcttttgaataattgaactaaaaaatttagcataaatttcacacggaatgcatcggacaatggtaaaagttgaaaggcattaaatttccatttctttttttgatttattttttttgtaggattaagctgcatcagacttgtccatattgtcgagcaacaatagaaaatgaatcaagcggaaaaggtccttttttggagaaggggaaaagctatttaaaattaattgggaaataataaataaatattttttatttttataaattcactgaaactcaaaacccacgtattttcttttgtaacttgaaattttgagaagtttcataatttctcttaaaaagttaggagttttaaaaaagtttgagatttttattacaattaatgctcaattctcagtgattatgtttttttaatgaatttattttggtgaattttgaacttaagccaacgcacaagggcaaccgcaacaattgccccctggcaaatgatgccacagaattcggatgatttgacgtggcggagagtgtctgatgatagaaaatgccttcttattaagcggaaaattgcagtttacccgtccataagctttagaaatcagagatagaagggacaaaattttatgttttcattttcattaatttccgaaaaaaccctacctttttggaggcaaaaatttacatattttgaccaaaaagagcgcttttaatcgaaatgggttaagtgagtctgaaaattgttaaggacgggttaactaactgtgcaattctgagttcatcagctgaagcattcacttgcattttcattttcttttctgtcgtttttttcttaaatcattttccattttcggtttctctttttctgtcattttttattttctttattttccattttaaagaataaactttaataaataaaataagtccgcaagaaacgaataaaatataataaataaaaaatagatgacagagaataaatggaaacggaagaaaagaagcaaatgacatggaccgacaacgtaccaggtgttttcgacagtgattggttttgacagtactttttaattaatttctacataaattattgtatacatgaattagtattaatatataatttgcatatacaaaatttataattgaagtaagcaataaaaaaaagatttgtataggattttttgtcaaaatttatcgttttcactttttctatataaatatctcctgattgactgtagtcaaaaatacaaaaatttacttacaaatcatgtgcgaacatctgctaactaatgtcaggtttgagtgccaaaatctaataatacttataccattagaacattaaaaaaaataaactttactgtcgaaaccaacactgtcgaaaactaacagcaccactgacaaagtttgtgtgttcggtagggctgtgcgagagtctcgattcccgactcgggaaatttctcaggtttttcgcttctcggtctcgggtttttagtctcggaaacccagaaatttttacactgttaaggatggtcattgcggggaaggggtcgccagcgaagggagaaaagaggaaaaattattgaaattttggacaagttttcttaataaagttcattaaaatcgcaaaaaaatttcccgttggcgcctatcggcgccgccaggccacaaaattcccctaagttcaaaatgtaaagttatattgactcaattttgttcagacggtgttggtccgttccggtttatcggtaccgctgactcaaaaaacttatactttttcataaaattggcctttttggtgcaaaattattactaaatcgcacaaaaaacccaattttttaccggcgccgccggtgaattttcttaaaaactggactggcttaaaaacaaaaatttggtcattttagacaaaatctgttaattttagcttttaggtgctaaaaataaaaaactagaaaatagttgtgctaactcaaaaacaagcttagtttcctggctggattttgcacatcatttcccgcactttttcagcgctgaaaagggcaagtgcgcccctaattctattttttcaaacccattcaaacctttttacatcgattcagaccgtttttaagcatttttgaatttggtgactacgatcaatatctaccaaattttttcaaatttcttaaatatttgctcaatatttcgacaatttttcgtaaatatttatttaaatattagggacttttattaaaataattcccatttcaattaatcacataaaaaattgcaaaccaaagggtcacccttttggttttaataaattcacatttttcggggggggggcaattgcagtacgagtttttacaaaaggtgcaccattaaatggaaattttctgggataaagcctattttttgaattggacaaaccgttccccacaaaataccctaaaccatgccacagaagagaaaatgggttgctgctaatttttgtttgccaaaccaacattttcgttcgatttgttattgttgtgggaggggggggggagggggaaggaataaatgttcatcggaacgaatacaaacaaattccatgtccatccctctgcgggggggggggagagtgtggcccgaaaaacaatggccaataataatgatttgttgatcaaacctaccaccactaaatatgtggccatggagcaatgaatgaatgaatggacggagtttgttgagagggatgactttggcagcagcggagggcaaacacaaacaatggcacggaaggacaaacggacgaatgaacagtttggggcaactcaaactcaatctgctgatgataagctttcattcgtagccaattttgaaaaatattgcgacaaaaattcttttattgcttcttgcgtcttaattgtgcttagatttctcaaaattttgagagtcccatccacaaaaattctttaaaaaagttaatttaaaatatgtttccaacaggaaaatttatttctgtccaaatttttgtggtaaatttcgcttattcgttaaattgatttaaaacaaatatttatccaattttttatccaataattcttaaatccggaaaatttcgcttcttttttatgtatgcttttaggtttctaatttttttcttccaaaatacttttattaaattgggcgagggggacggagtggtcgaatctgttgacatttgatgtcctttcgcctaatatataaatgttttgtatatttcttctctgggtactcgtgaaaagtgccacttcctctcgtctttcatcaaaaagaaatagtttttccattttgtcgttctgtccattttttgtggataacaatcctcccctgaggggtcgggggacaacaaagagtgccgccgacggacgacgacggcacaaaaagatttgcttccggaatggcatcccacccctccactcgccgacctcttgacggtgcgcaatcgacttgtcacaaatgcgatgcaaatgcaatgtaatgagagggggaggggggagaggagggcacatttcaccaggggccgaccgccggaagagtttatttgtacaacgaatccatccatcggcacgtcgtcggataaaacggcgacggacggtgctgctttttgagccttttcgggaagtgagattcaatgactctgtcgatcattctgtttgttattaattatgtccttctgctgctgtggcaatcatcagtcacacaagcaatcagtttcaattttgaaccatttaaaacatttgagaaaaatctttgattgtaagaaaaatttatgcttttatgaccaatatgagcagatttaaatttattaaaatgtcgaaatatttaatttttaggcactgtattttttgaatttgaaaatttttttggaattttacaaataaatattacaaatattattttgcaatgaatttatgcatattgacgtttaaattcattcaaatgatggtttactttttcgtgtatttgccaataaaataaaagctgcaggaaaatattaaaaatgtaatccgatcgatcataattaattaaattaaaaaataataataaattaatttttctcaaatgttttgaatgttcccttcctctttctgctgcttaatgcttttcccaatatctttttttccattttccgttaccgtatctcttctcttcactctttttccgattggctgctcatcgtccgtcattcagtcatcagtccgccgttgacactgtgcaaattaatccgctcgacaaatgatgcgcaaattgtgggatttttgtgacggggggggggggggggggaaatacgcccaaatgacactgttcaaacattggacggacaaaaagccaatgaatggctttgcttatgcttttccgatgtgtttactgcttgtctgggtggacggcttacaagcttaccacgggataatcatcaaatcagtggattaattgggaaattcacaatattaaatgaatcttataatttattttcattaaaaaattattaatattttttgtatctttaaatcgttaaaagctttttatccgctagaaaagtttataa

SEQ ID NO: 10814 - DNA, 5920 bp, Heterodera glycines
ttctaaagatttttgtgctttcaattcggaattaccgcttttgctctaattatagcccatgggggattatttttcaacctcctcagaaaaggggggataattagagactgggggattatgatagagggattatttttcaaaacacctcgtagactggaggataattggagactgcgggattaatagagactgggctataattagagcatatacggtaatttcggtttccgaaatttcttgatcctaagaatttacgagcattttggacctcgtaattccgatttttattattttataagcctagtattccgttttctgaaagttttggaattacgatttcaaaaatttgagcctcggaattttttaggcctcggtagtcgatttccgaaaatttatttgaatgttggattgcattgcctactttactgccttaaaaataaatctttaataaaataattattgttaattttgtacatttagaaaaataattttaaaacgtttttttttaaattggtttggagaataaacgacgaaaaatgatcgttttcccaatgatgattatcatattatagtggcagatgttttttttattagtcatcgccactttttcaatgattggtccattccaatctgttccattgattagaatctgaatcacatttatttttaattatgttaatcaacaattctttatgaattgcaaaaattgttcattttttattattataaaattaaaaatttaaccctttaacaatttaatttttaaatgaaatgcagtgccaaaattaacaaaaatatggacataataaaatcgagaaaatggaactatgcaaaattgtggatataggatattcagtactgcttgagatcgaaactttcccgagacccaaaaagcccgagacttttctcgagtcgtgacgaataaagcctagagcatcatagccaaaaaaattttgtaaattaatttccgaggcctaaaaattttggaaaccgaaattccgaggctcaaatggaaaccggaactccaaaatccccaaaaaaaaaaaaattcataaatcagaattgcgaggccccaaaaatcccaacctctattataataatgttattaaatatttttcttcattttagagcacaaatgcgctttttcatcggattaaatatttttatgttgagtttttgcataattttctatcaaattaaattaaatttagggagagaagcaattagaatctctatttaaaaattttaaatttcgggagagcggcgattagtctttaattattaattaataataatttggttaattaattattttgagttgcaattttagttcttcccacagttcgctttggatgtgttaagtgccaatcatggatcaaaagagttgccgcctttatcgattgatcagactttctcacttcaacacactgatcaagtgccaatctccatcgctttcacggcattgaccgacacaaacacaaaaagcatggcggtggagctgctaattgcccatgatgatggtgggaaattaattaattacaaaagtctattagaggccggtttttaagtaaaaatgaaaaagccaaaaaaattttttttttttttttgtaatttgtttaagccaaaacttgcgcagaaaaacaaaagaaaaagtttttcacgaattaaaaaaatgaaaaaatttcttttttgaaaatcttaagatcgatttttaaaatattttccaataaatttttttttcaaaacctgcagatgaattttttttttgtttaaatttcagactgaatgtttgtgagaaaatttgaaaaatttcaaaaattaaaatcagaaaatatgaaaaattgtttttttttttattttgagtttttcttgcaaaaaaaaattaagaaaaaatcctccttttaaaaaaacaaagaaaaaaaatatattatcaaataaaattaaggtgatagtgttcggcagttttttttactttttttttcattttcaagtgtccattataatttaaaagatttatggcgaattaaattttgttaagaagcaaaaaatattataattgattgattcattgttattaaatgccggcccaacttttcaacatcgaaaaattaaaaataaggtaaagaaaggttaagaatttcaagagaaaaaattaaatttatatacaatcaaaaaattcattaaaaattaagtcagagaaataaataaatgattaatttaattaattaattctttttttttaaatcctcctcattcgttgtttcaattcaaaaagtcaccgtttaagcactgtaaaaagcactaaatttttccaaaataagcatgaaaaaagcaccaaaaggcaaaatcagcacaaaaaattggaaaaaagcataaaaattaaggaattaaaggcacaaaaaattggaaaaaggcagcaaaatttttgcatatttgcagattttatcaaaataacaaaatattatttcttagttcaggttgatagatcaaatatatcaaatatatttcggggttcagagatgaaataagttcctttatcggactaaatacggtcatttgctccctgctgattgccgctcaaatcggtgaacatttgccaattttttagccgattaacattatattgtttcaaatatttatgactagggaacatatttttttaggcgctaaaaagtgccaaaattgttagtttttaacttctaaaaaactcccaaaaataggagctaaaaatgagaaaataggtagaaaaaatttcaaatttaaggggtgtaatatgaaattttattcaaaagcaaaaaaattaagctaaagcactgatttaaaacattttttctattttttttttattttttttctttttttaaaatttttttttaaattaaaaataaaagaaaaaaaataataaaaataaaaaactattcactgagataaaaaattaaaaaaaactaaaaaataaaacaaataataaaattaaaaacaaaacaaaaataaaaaaaaattgttttttattattttttctttttcttttttttttggtatgccttaacggtgatcttaattaaacgattttaaagttattaaaaaaatagttaaaaatttttttttatttttgaaaaaatgttttgaaagttaaaagttttttttttattttttttttttgagacacacgattttattcttgtcaagaaaataaataaataaattttggagatgcatttttaataaaaattttccatttcttaagggggtgtattttttgaaaatcgctgaaatattctcgaaatcctcaaaatgacgaaacagcacaaaaaaaagcaccaaaatggcaaagtcagcataaaatttaaaaaaatcgagaaatcagcaaaaatcagtattaaaaatataggtctagaagcttcaaaccaagttaattttgtcaatttctaaatcatttaaataaaaactaaattttcaaaaaaaaaaaaatcttttccgatttgcccgcccctctcatcgaaaattttttaatttttattaataattgttctaataaacctacagtttcgtattacttcaatttttttttatttcattaattgccgattttagcctgtcgatgaagaatgaatgtacatttcggacttccccataattttttttagttaaatgccaaaatatgtgattgatgttccgccggtatttaatacaaaattaaaaattaccgtacccaaaattaggaccatttgctcagcctaaatcttgggtttcaaattgtcggtgtgtttattattttttccatcctcgcaaccgttttgcgggattggtacctaaaattttgtgggacgggaccccgcgcgattaatccagcaaattacgcattttccaaaaaaaaaaaaatacgggattgcggacagggatcccgcaaaggtcttttagcctcccatatcctttatcccactttctcccaaataccgcttcctcctcctcctcctggcatcacacatgtataatgtctgtgatggaaacggcatttctcttttctcatctcggcaccgattttttgacttagatactcgcagattccgtagaataaccgcaaagaagcagatttttccaactcggtaccgatgtttcacgtgatccccttactgcagttatttacctaataaatttttttgaattctgttttcggtatatcaacgattagatagtgactagaagaggaacagggagggggggatgatactcgggagaaacggcggagaacgatattcgggagaataacggtacccggggaaacggcggggaacggtaccgggggaaaaagcgattatatcaaatcaaatccattctattattatatataatatataaaatataatatttcttttacataaaaatgtataaaaaaaaatcaattttcatcaattgcatcattcgcgcacatttgcctgtaaaatggatttttttgattaatccacatttatttgcccaaattgctggccaatttcattggcagagagggcaatatatttttttaaagctctgtgccgtaaggcccaaatatttggccccttcccattgacatggaaaattggtgccaattcattggcagggctaaattttggtggccgttacaatcaatcaattagcaattcttcacaaatatccatgcatatccacatgaaaatgatcttgccaaaagcatagaatggcattgccaaaaaattggccaatttctcctcctgtttctcaatgtacctaatgccaaaaaaaaattggcaaacccaattttcattgtcctgctaaaaacggccaatttctgcctccttgggagcagtaccaagccaaaatcgggcactttcttatgcgtgcgtcccattgtgttggcttctgctgttgccacggtggattttctgctttaaaagtccccgcaaaatccccacattttcactattatttgaaaaatcattttgcgcaaaaaaatttttatttttgtccgaaatgaaactcctttttaccccaatgtttttttctgtcattcttcaaacaattcttctcctgctgctggtccaacatgtaaatggaggaagagatcgagtgcaaggtaaaaagaaatgaaaaatttttacaaaaatttttaaacattttttgaaaaattaaaattgcgccatgctcattaacccttaggcaacatttatgtatgtaagttactttgagtgatctcttgcgaggttttgtcttatttgtaacactggaccaggctcgaccaattgttttttccggggccaaaaccgaagcggccgaatcaaaaaaaaacagtgggcctggccagcggagcggcggcctaactcgaagataatttttttttaatttcaacaaattggtgccatctgattcaatggccctacacattttcaagcaactaatttgcgatgctaataattagggctggcaattttatgtaaatacacatattttttcctggattctccatgctctaattagtaggaaaaacagtttctttttgtgtgtatgcgaacaaaagttgggacttttatttacatattttatacatttttagtacatattttggagtttttagcattttttctaaatttttttaagaatttataaaaatttcatgtgaagttaaaaatttttttttttgaaaatgtacccctaaaaccgttttgttttgtttttcaaaaaagagataccaacaattaatttttaaatatacaaaaatgtgcttctaaggactcttatttgttaggtcacttttaaggtattttgtgcctatttcaccctttaataagaatttttccaaaaaataaccatttaaaaaattttatttacatatttcggtatttttcttacatatttatgtaatcatattctgaaaccactttttgtacatatttttgccagccctact

SEQ ID NO: 10815 - DNA, 3632 bp, Heterodera glycines
tctagagtcaagaaggaaaaacgtgaggacaaatggggaaaaaaggtaatctttatgaaacaaggaaaaaaggagaaagaaatggaaaacggatcaaaagcagcaaaaatcagctgataaggaaaaggggaaaacatgagagaaaagagagagaagtgatcgaccaatttgatcagagttcacttttggcagtgaaaaattattctctggatgaaataaattcttttttttggtccataaaacattcattgtttttgccaaaacaacaattatgtcaatttgtcacccattcaaatgatccaatggagaagaaaatacccaaatggccgcttattttttgtaaagtttccgtcaataaaacctctccgttaagggtcattcatttttcgggaatgggcaatgaatgatggaataattgtcccatccgtccgtccgtctccccccccccccccgggcgtttctgccgattgactcattcattccctttaaaagcggtgattttgttgtttcttcagtgacattttcattcttccgccctttgatccgctgcttttgctttgattgtataaaaaaaattacttcggataaattattattattttaataatattaatgggcataatatgcaataataaattaaaaataggagacaaaagtgcaacaaattggggaatcaaagggaattgttattaaggtaggcctagcccgggtacccgatagggtcaaggccggggatacatggcttttttaagaaccgggcccggaattgaacccagttttttgaaaacccaataaccggtatccgacccgcggtgggaccgggtccaagaatgttttgatgtttcttacatattctatcaaaaaatgaacaagtgtcattttttgagtccattatttagtttataaggtggaggtcgatccagcggtgccggtaggtgccgcctggttttttttaaatcttatatgaaactttgcgaaaatgctttaactaattgaatttattgtaaatttcttcaaaaaatatttggcattcgctctttgaatttcaaaaaattcagtgcggattcccgcggaatcccacaaaaaataaatctgagggtcctgctgtcaaaatttttgcggtacaggtcccgcagggactaatcccgcaaaatggctagtcatctgaggaaaagtctgccgagaataactcatttatagcataaatcagctgaagacaaacttcatgatattgcccagatgaaatttattcagccgacggaatttctgttattgtggcgcaccttttatcgtccaatcaaaaaagcatatcaattaaaccaaaatataattggtttgtctatctggaacaaggccggagaatattccgtcgcgaattttcagtcttgagccacgtatcagaaaaacattactactccgaaattggccgatttttcatagaaaggcaagtaaaaattttactggtcactttccatttatgattcaccttcaattcccgtgctagagaattctccgagtcaaaggtgcactgttgcgcatcatgcctacttttttgcaactgaactttttatttaaaactatattgttttttattttattatcactaattttgcaaaaaattttacccagtttttacagttgtaggtaaagaggcagtattctgcggcttcgccacttatccgcagaaactcgcgcgtcacgtcgtccgggtgggtgttgacacagcagagtttgtgccatatatacaaagctcatcatttgatttcgttggcaattccggcaccaaatctccaaaacgcacacataatattcgaccgcaatttgctcataaatttcgtcatcattcacattttgatatactgaaagtatttattataccaaaaaatcagtctattatcactcgcttttaactaatatatttaattgtttaagctaaacacaccttctcgattggccggccgacgaaaactcaaacgtctcaggattacgcagattgcattcttggcaaaaccatgtgagacgaagggcgttgtgcgtcgcccaagccatgatcgaggtgtcccacattttgtgtcggaagattctgagctgagtagctcgcaggtgctgcagggcgcagggacattgcgtcccatgcacaaaatttgaaacttcgtcggtgtctggcctggagtcggccgatgcgggagatgaagatcgggacatgattgtcctgaacaaaaaataagagggccccattaaaaatagcgaatatatatatatatatatatatatatatgttatataaaatttgttcaatgcgcagcggtgcgccggtggactcggagaattatcgtgccacggaattgaaattgagtcatacatggaacgtgaccagtaaaatttttattctttctttactatgaaaacccgaccaaattcgaggtcgtttacgtgggaaaatattgatcatatggcccagaacccaaaatggtcaaaatatacaccaattgatagctctcggtctgtaatgaaaggatacgaaagaatttttttgcggaaaccaatccctgaagagttaatacccgggactgaaatggccaaatggctttgggactgaaccgtccaaacccttaaacgcatggaattgcgataaaatgcaacaaaagttataggtcccctcaaaaccggttcagtcaaaaaataacaaaaattcgtcaaatttgaaaaattgaagtgctttacgtttttttggctcacctaaattaatttttaatcaaagtcattttttgaggtttttgaggacccataacttttgtcaatttcttttttatccaaaaattataactttcaaagagcatttttttactatgctaaaaactagggttcgagccccgcccccgtccccggggacgggacaggtttttggggctcacccccgcccccgcccttttttatttctgtttttgcttcaatgagaatttttaatttctactttctacattatttgttggtacctatttggttttgctttttttcacttttgttttgccagttgttgtaaaaagcacatttttaaaattctccttttttttaattttttttttttgtgaattgatttgtctctgatacagatatgtaaaagattttgtttatgaaaagtgtgatgattattaaaaaattaaatagtttttgtttgtgtaatggtacttattatatatgtatcttcccagtgactggaattctggtggattgagtcccagtgactggaatgcttttggagtcccggcgattggaatgctggtggattgtgtcccagtgactggaatgctggtggattgtgtcccagtgattggaatgctggtggattgtgtcccagtgactggaattctggtggattgagtcccagtgactggaatgcttttggagtcccggcgattggaatgctggtggattgtgtcccagtgactggaatgctggtggattgtgtcccagtgattggaatgctggtggattgagtcccagtgattggaatgctttaggttgtgacccagcgattggaatgctggtggattgagtcccagtgattggaatgctggtggattgagtcccagcgattggaatgctggtggattgagtcccagtgattggaa

SEQ ID NO: 10816 - DNA, 791 bp, Heterodera glycines
tatcgatgagttgcttatggatgatttgggtttggatgagttgcgtatggatgcgttgggtatggatgagttgggtatgcatgagttgggtctatggatgagttgggtatgcatgagttgggtctatggatgagttgggtatggatgagttgggtttggatgagttgggtatgggatgagtttgggtatggatgagttgggtatatggatgagttgggtatggatgagttgggtatggatgagttgggtatggatgagttgggtatggatgagttgggtctatggatgagttgggtatggatgagttgggtctatggatgagttgggtatggatgagttgggtatggatgagttgggtctatggatgagttgggtatggatgagttgggtatggatgagttgggtatatggatgagttgggtatggatgagttgggtatggatgagttgggtatggatgagttgggtatggatgagttgggttatggatgagttgggtatggatgagttgggtctatggatgagttgggtatggatgagttgggtctatggatgagttgggtatggatgagttgggtatggatgagttgggtatggatgagttgggtatggatgagttgggtatggatgagttgggtatggatgagttgggtatggatgagttgggtatatggatgagttgggtatggatgagttgggtctatggatgagttgggtatggatgagttgggtctatggatgagttgggtatggatgagttgggtctatggataatttgtgtctatgtatgag

SEQ ID NO: 10817 - DNA, 4200 bp, Heterodera glycines
cgtggctgagttcgtggccaagcacaacgccgattgcgttttatatcactgcttcgggccattcggtgtcaaaaaagggctgcgccaggatggaggcgggcacagtgatggaattcagctcgggttggtaccacgcattcgtctgaccattgcattaataattaacccactaattaatcagttagtggcctcttacaaggatgatttggccattgaattccgttctgtccgtcccctttctcttcagcaaatgcgcccattgctgcgcataagaaaatttcatcgttttgtcccaaataatcaaaaaattgtctttgtcggtgaaacgcagttgttcgtagtactgctccaatttgctgttgttgaccatggtttgaggccatccgatgttggccgtgattttgtcaagtttcgcgtgggccgatgccttcgcccggggggacatccacgaaatctgttggaccatcgagcggaaactcagcaaaatactgtataggaataagcgatggatgaacccaaaaagcctccgtttttgttcgccccacctgtccaccaatctttgggccccttttctcagattgtgtcgactttcttcgtttggcatcgtttggtcaagccaaagacgacctccgaccaagtccatcatggccaagctgtacgaggcgcacagaaactccgaataatcctgtccaaagtaacagtttggcatttggtcaaagtgccaaagggtacttacgatttgggcattgattttctgcaatttcttttcctcaaatatttccattcgcctcggttttccaattgatggtctgtagaagaagtaatccctgttgctgatgggctttattatgtggccagatttggcagcccgttttggccaattttgcgtaatcggaacattcagagttgctaatcgtttttaaaagtgtgttcattttgagattattcgctttaatttgagtttcttttaccattttttcctgtgaatgcctgtgggatatatggtgaataaaacagtatcatccggaagtacaaataattaagcagctgattggccgtcaaattgtgcttattccctgggcccaagtcgtctcccaatttggccaaaagtgtcggctcggcaattgcaaaacggaaattcggctgccgcaatttctcttggacaatttgcggggcattttgggccaattcgcggaggaaaagcgaccagttgagaaaggggaagcgaagctgagcatcggaaacggtgaacaaattgaaacgcgagcccaagtcattttcacggatggcatcgctgacgaggaaattattggccaaaagtcgctcaaaagcgatcacttcctgatcaaagggaaatagaagagtgatcagttgggagagggaaagggtgccaaaagcgattgatcacttctgacaaaaaggggggggatttaccaaatcctctcattataatgaatttgaaataatttgtaaatgctttggcatttgttttggcgtggtgttcgtttttctttgttacgcattgtctcctttccacttttgccagcattcacctgaacggcggcgtttaaatcttttcttgcgtattccacgcccaaataattggccatttcggtcagaacttcgtccacaattcgtctaaaatgtttgctcttttttcattttcaatttctccaaatccccactccatctggtgactaacgatcggaaacacttccggggaataataataagggtcaaatgccaaagttggctggtcgacgaacaacgcataaggctgaatttgaaatgccacaaattgatttggggggggggggtgccatttgaccatctcttcagagtttgggtcggcccaattggtgtcgacgaaaaagctgatcaaagtgtcgaccataacggagccgcttaatgcgcccaaagccttggacaattcctctcggcttggccaatccatcgtttggccagcaaaaacggggaaatcctaaaacattgtcaacacttttagcattggttgtgagagtaaaacggaccaatctgctctttttctggaacaagaagaacttctccctgggcaagtcggcttggacgatcacttggttttgatgatgcatcagaaaagtgcacttttcaaaggccaatttggccttttggatgggctcaatctgaaagttggggaagctttgttttccattttgtggcatcatatccaaattaaaatcttttcactccaacttttacaacatcgtaatcattggcacaaagtccaaagggatttgctttctcgtgtctgttccccgttcgactttctcgtgtctgtccccgttcgactttctcgtgtctgtccccgttcgactttctcgtgtctgtcccccgttttacctgttggtgtacattgttcgctctcaattcagttgccaaagtgatcagattctgaatgctgattctgtcgaaatgagtgatctcatcgaaagcattgcacgcgtattcgtagaaattgttgcacgggtcctgcgctatgtccacggatttttcaaaatattcggaagcttcgcggaatttcggtgtcaattcactttctttttggggaatgttaagcgaaggcggcggcggaagaaagttatcgccgttcactgaacaaataagtcgtaaaacattaacataaattgaaataattttattttttaggctttctgaatactaacaaaagctcattttatattctaaaaattaattggagatgattaatttcaagaaatttttttatttcagaaactgtccgaaagtgtccgtccgttgcgcattaattgaaattagtcccctattaacaaaaagccatgcgaatgaatcacttcaattaatttccttccctcaaattccattggcttttcccattcacttgccctgcttcacttcgctgatccacacgtcacagtgttctttaggtgcgtataaactgtccttggggcagttaaatgcgttttggaaagcggggaaattttggagagagccgaggacgcggaatttgggcggggggtgcgggtcgagaagaaggcgccgggacgttttggcggggtcctcggccgattggcaccaaatttgggcgaatgccaaaaagaacagctggtcgtggtcgtactggctgagcagtgggccgggcagtgtcaactcggccccccgcagttccatcgcattttgataggctcgataagcggcacgaatcccttggatgccaaactctcacttttaattcggtgccattaagcacctccattgtctgccacattttccctttggctgagaatgccatcgacacaatttgcagttccatcctgcgcaggcaaaggacaaaatcggccgtactgtcgaatcacacattggaccatcgcgtcgaacgcggccttcgaactcggctccatccattggcgaagcttaccgaaagcatcgaattgagtgccgaccgaatctaagcggagcgatcagtgatatccgccgaactgattattaagtcgatgctttccttaccgaatgcgtgggtcaattcgtggccaacaatggcacccaaaattccgtaattaagtgccgttggattgttttggtggaaaaagggcggggagagaattgccaggggaagagtgatcgagttcagctcgggttggtaccaggcattcacctgggattttccaatttaatctgtcgactcttttcggcggttgttgcgaattaccatcattgggagtccgttgaaatttgtgcgatttgttggccctttcaaagtcaaaagttcgagggactctcgcagcaagaaattggaaactcggaactgcgtctcgatcaaattgtcctctgagttcagtggaaatcgttcgcaataagcggccaatttgtggtcatccacgagccaatcggggaaggcgatgttgcgcaccttacagtaccattatattaattacggtacatgtcatgtcattaattaccaatgccaatgccttttcatttttggcatttcccactcaccaaattgtccactttctccgctgcgtttttcttcgacttttcgttcatccattccaattggtccaacatcgaatcaaagcccaccacaacattctcgaccatttcgttcactgactttcgcaaattctgccgagcgcgctccttcaaaagcaccaaatccaaataaagacgtgaactgtgatgggg

SEQ ID NO: 10818 - DNA, 1599 bp, Heterodera glycines
  unsure (1)..(1599): unsure at all n locations
tgaaagttgaaggttcggtgggcagtcaaattaaaagnccatttgcccctctcacaaaaatnggattcatttcggacgattgtgctgcttcttcggccgtgaagaattcgtcgaggtcgaaaatgggctcgtcccaacgggggccttccaattggcggacgaatgaatcgttcggaggaaacacttcggaacaattgggagccgagaggggagtcactctcgaagaacggggacagagtgaggagcagacgaaagttcagataattgaacaaatgggcggggacgaagccgaagggatttccaggctaaacaaaaagcattcggaagggcatttaatttgagcttaattttctaaatgccctcatttttggccaattccgcttctccccaatccctcatcattaattactctgaatgcgttgcttctcttctccattatctccggctccatcaccacaatcgtattccgttgttgcaacattcggtcaaaaacttcccaactggcagaagtgaaaagcatctccaaaatgtaactttgcaggtcaacccaagccaaagattcgtcatccattttcataaactgaaagggcaaaagcatagcaaaacattcattatgaactaattgctccctttttctttttctttgatactttctccaccagcagatccaagtggattcccttttcaatttaaaatcaaagtaaatatttgcttatcaatgctttctgtttcaattcctttgagctcaaatcaattctttgacatggttttgaccgttggctaatgtcactttttaaaaatttaagtgagattggcctagcaaaatcacgaaatcttaacttaaaattaattttaatgtttaaaaagttatttcgaaacataaaacatttaagcatccgccgaaagtgttcaataaatttgtttacaaattaaaatgttttagatgacctcttcttcaattcatgaaaataattaatttaatttaattttaattctcaagtaataagcaaattgaaagttttaaaattaaaaaaaaattttgattattaattattaacgaatccaaactttaaaattttttcgctttaaaaaattggattgaatttgaaaaagaattaaaaatatattattttttattttcattgaaaataaaaaaataactttttctgctgtgtcatcaaattgaaacacttttttgacatcaacaaaaaattaatttgacgtcaaaagtttaaattaaaacagatggccaaggggcgtcaattccttgacgatgttatttgaagtcatttcttcgattttttaaaattgaaacagaaaaatacggtaattgaaaaggccccgccccttctgctgatcgcttcctgctttttctgtctgctctgactgatcactttccctctgcttctttctccccccccccctcccgttttttctctctctctctctctctccctctgatcactttccctctgcttctttctcccccacgcgttttctctctctctctctctctccctgtgatcactttccctctgcttctttctcccccccccctcacggttttctctcccacttttgttttctcaccgtcactgg

SEQ ID NO: 10819 - DNA, 5113 bp, Heterodera glycines
cggtcagaagagttcaaaaaaccaaatctttccaactttcttcggccataaattcgttcaaaatcgaccaatttttttgaatttcgcagtctaatagagcacgttaagagctttcgaacgataccaacaacgttgaatttggttgacaaagaaaaaagttatgccaaaaagccgctggggccgaactgagccggtccgatctacccactatgggtcaagcccagtgttagacaaaattgctcataacgtcaaatagcgtaattggcgtaaattattgcgcgctaattcaaaatgtacactggaaaatgccttttttgtattttttattttgatctgccataactcgcttcattcccaactaaactgaacaaatttggtatctaaaaaaagtttttgaaaaggagaatctttttctaagcgaatgctaagcaatttgacatctcagaaaaaaacccgtactcaaacaaaaccgtttttcaataaattcatactttatacttcagctcaattaatgctgaaaaataacttattaatccgtggcaaatccgtccttttctcgttgccgttgagggctttttccctgtccgctcagtgcgccaacggtgagcccattcgtcgcgtcgttctgatccccggcgatggcattgggcccgaaatttcttccgcggtgcaaaagattttcgaggcggccaaaaccccgattgactgggtttgttgttgtcacatctctcaattttaaccgcccttttgaaggatcccgtcgatgtcacaccggtgcagggccgggacggcattttccgcattccgaacaaatgcattgagctgatgcacaagaacaaagtgggactgaaggggccgctggagacgccgattggaaaggggcaccgttcactgaatttggcggtccgaaagtcagtcaatttccaattaaaaaaagctgattccgttgcccccagggagtttaatttgtacgccaatgttcggccgtgccgttcgttggagggccacaaaacgctgtacgacaatgtggacgtggtgaccattcgggagaataccgaaggcgaatattcaggcattgaacacgaggttttgaaggggagagggggaaagaaagtgccatcaatttattcgtttgaataaaatgcccattcggcaagcattcgttctatttttgtaacgttcagattgtctctggtgttgtgcagagcatcaaactgatcactgaacaggcgtcccgacgcgtcgcccgttttgcgtttgaatacgcacgacaaaacggacgaaaagaggtcaccgctgtgcacaaagccaacattatgaggtatttgtcccttatttttcgcttttctcaaattgcaaattcctttcgcagaatgtcggacggactgtttctgaaaatgtgtcgcgaacaagcgcaggaattcacggacattaaggcaattttggggacaatattagatattcgtataatccgtcgccatttcaaaattttaatacgtttttttcagttcagagaggcctatttggacacggtttgtctgaatatggtgcaggacccggggcactatgacgtgttggtcagtcaaaatgccgctttttgacgcaacatccaaaaccgagtctgtctttgtctaggtgatgcccaacctttacggtgacattctgtccgatttgtgtgccggacttatcggtggacttggtgtcaccccgtccggaaatattggcgaaggggcggcagtgtttgaaagtgaggatctttttattgttggaatgggattgatgaacataatcctgtcaaaaggtgtgcacgggacggcgccggacattgcgggacaggacaaggccaaccctaccgcccttctgctgtccggcgtgatgatgctccgctacatgggcttggagtcgtacgccaacaaaatcgagaaggtcggcactgacggggaatgcctttgctgtcgcattagcatactttcctccaatcccgttggttcaggcttgtttcgacgcgatttcgcacggggaccacaaaacgcgcgacttgggcggcacgggcacatgttcatcattcacggcggacatttgcgcgagaataaagagcatgtgaacgggcgaagagggaaggaatcgctgatcgagactgatttgtcctgtcttatttgtttcccattctttgcccggtcgtaaacttaggcttttttgtttttttgcatctgtctccgttgctctctctctctctctcttttctcatttgtctgttaagaaatcgtctgcgtaataatttgtcagtgcatacgaaacggccatttctcccatttttgaaccacaaaagacagtctctagtcgaagcaaatacaaaagcaattgtttaggcatttgaatgattgaccgagtaaaccatcgtttgttatttctttacaccattgacttttaaatgttcatctcataaacaataaattgttcaccataataaagcaatttgtttgtgatttctggcatattattccgaacaagaaaatatttacaataatttaaaatattttgcaaagaaatataaaaatgaatgaggaaatgactgggagaggacaataaacaaataaccgagctgccaattccaaaaatggaagtgaaatgagtaaagagaagcaatgagtcacatgtgaagcaggaaaaggagattgattgcggggagaggtgtaagacggtgtcatttggcgaaacaattttgtaggaatttggtcagcattgtgtacaggtgccaacggacgccactcaaattgtgcgattcgtcggtgtacacctaagaaaatgagtatgtaaaaagtggttcatcgatgtgcacgaaacaaaagcaattaactcgactgaccattagcctaaattggatgttttcgtcagtgagtgcgcgaataaattccgccgagttctgatagtgcacattatcttaaatggaagacagtgtttaatataaatggaaagacatttgataaaaggggcccattttgcaattccaaatttaccgtcggccgacccgtgggccaacataaatgacacattgcggaacgggcgcacatcggtgctcaggtcggtgcgttcgtacgcctcgggccccgcctcgcccatgtaacgctccacataagtggcatctgtgggggaaagggagaaagaagtccacgagaaaacggaaaacaaaaaggcaccataaagtttaaagttggagacgggggcgacactgaaaaagaggaaaaatggtggaaggaatcgggaaaaagagcagtcaattacctcgccgcacaagagaaagtccgattgacggccaaatccctttggacggcgcgcgcagtgacaaaaccgccataggactgacaatgaagggggaattggttcagtgaaaggcttttgccgcactttagcacaccaagaatttacgagcccattgtccatttttaagtttatataaatgtgccattaccgcctttgttttgaaatgttcgatgtaattgttttgaaccttagaaatgcccttttgccttcactgacccatccccaaatgccgactctcttctcatccagcaatgggtactttcggagcagtgccctgcaaaatataatttggaaaggaaaaatttcaaattccgacctcatcgtcatgatttggtcatccacctccaccgtgccaaagttgccgtacaatggttgcttctgaagccatccctggtggcctgagccgcgtccgtcgatgaacacgacaatgaattcctagggggaaggacggattggcacaacgccaaaaacatgagaagaaatggaactcacgagtttggaaacgaagaaaatgtcgagccaattggcggacgcccactcctccgtcactttctgtgtgccgggaccggcgtatctgagagaaatggcatcaaaatgccaatgggtttcaatggcagttggcaaaatgccatgccacaactcacacgtcgacgagcaccgggtatttgtgttcaggccgcttttcattcagtgaaacgccgtaggggaccaacactttagcggaagtttctgaaaaaggcacacacggtattgactgaatacacagccaatgaagcgcaaaaaaatggggaccaaccgacgccgttgtccaattggaagcgctcaaaatggacagtgggcaatcggtgggtgtgcaacgctttctcaagcgcgtcgtttcgcccaaattccaacactgacaaagaaaaagggaatatacaaagtgatcagacaaaatgtaacagtcagataaactcaggaaccgattgattttaaaatcttttcatttccaatagagatcaatcaaatgtttcgacctccgctctgtttgtacaaattgacaattcacttaatgagtccgcccctccccacccaaaggacgaaaaacagtgaaaaaaggtcgtcgcccgagggggagggggtacccccgcccaagctgaaaccctgggatcgtcaacccagggaagtctatgtcccacccgtctccaatcggtcgtccgctgtgttcagtcgtgccaccagcacaaacggcgtgcccggccctttgcagctcaaatacacaaaacgtccgtccgatgcgctgccgtcgctttggtcggccagcgaactgtcgtggaaagagcaattggaggaaatgttgcaggacaaacagatgggctccaccagtccattgtcaaatgtctgaagaaaaagggggtggtgccaaagtcacataaattgggaaaggaaaaaacgtacggaaacggagggactgacgaagagatgcctttgggagggcgaaggggcggcggcggtgtaaaaactgcagagaaaagggcacaaaatgagcgaaacacagagaagaaaatggtggaaatggcaataatggaagttacatttttcggcgttttctgtccattccgttgatcttcagcacatcgaagtcgcccatggcgaggaacgctttgaaaatgaatggtgaaattgacaaaacataatttttaaaaatttaacggtgacgcctatcagaagcaccaaaggactttttaaaattttcaaattaataatttaccgaaaaaattattaacaaataaaaagttattacccaattaaa

SEQ ID NO: 10820 - DNA, 1125 bp, Heterodera glycines
agcgcaaaaagaacctccgcaaaatgcgtcgcccgccccattgtgtccacaatttatccacagagatgacggggaattcctttattgtcccattttgtgccacaattagcggcttttcccctcgtgtaatcagcacaattcggccccccgttttcctccgttggcctaaaacaaaaaagaaaaacaattgcttatccaaataattattaattatttattccttttaatttctgtcaaaaacaatgcaatttgatgcaaatgatcagttgggttgagttcatttgcctttgcataagcaaatgcttccatttcattagctaaattgggggaaactattaaatttaaacataaaacaaaaaagtttatcagttaattttgagtttttgataaatgaaaacttgccaaaaagaatgtccacaaatggcataatttcgttcaattcctttttgaattttccaggaatataatcggcactcaaattgaataaaaaaggcctctccaattcatttgcttttgtggccaaatgtttaattgcctcggggcaaaccgtaaaaaaatgggccttaataattttaattatattagttttattttattttttgaatcacagatgaataaaaaaattttgctgtatcgattaatttcgcattttcgggcaaatgcaaaaaatccaaagagaaaaaagaagcagcgccaaggcaagcgcaaagcgaactaaaattgggaaaaatacaattaaaattaataaaattaattaattgaccgatttgtggcattaatcagtgagacgcatttcccggtccgaaccccctcaatccgttggaatttcgcttcgacacccgtctcaacggtcttctcgagtagcatttccgcttcggaatcatcgccaaccgaaccgaaaaatattgcacgatcagccttatgaaactatgagctaattaagtgattaatcgcatcattaaacttttttttgcccattgattccgttcaaaacccattggaacaccgctaatttgtgttaagtgctgaaccgccggggtaaaaaatggccgaagtccaaattgagaatttccccctcccttaaatgcccttttatggaaaaaaagagtttaattggattttgct

SEQ ID NO: 10821 - DNA, 3324 bp, Heterodera glycines
tgccaaagccgaaaaaacagccgacgaaccaactgaagaggtggagagagccgaaagcggtgcttatttttggcagaatgacctgaagaagcagacaattacaaaagggtcaaaattgggatggaatgccgtggcaattgccaatgcgccgccaatggcagtcgcccccaacgcatttgggttgaatccgttgctgaaccaatagcgcccgtccacgtccctgctgtacaaatcgggcacccaaaccttctgtttgctcgccttcatttgtggcattttacaatgcccgcggggtaaataaactcttacgatgaaatagccagacaccaaaatgccatgcaaaggcccaattaaagcgccgagaatcccgagagcaaaatgaatggctgcgggattgttataccttaaggggcagaaagattttaaaaatcatttagacaattaccaattccacggggttaataaaactgaagcgatcgctgtgatcattccgccgcctctccatgagatataattaggagccaaatttgaaaaatcaaaagcaggagaaataaaattggccacaatgttaatgccaactgtggcgatctgaatgcgtaggaatttgtgtttttataacagaaaatatttttaattaatttttcatttttgccattttgttgaacattgacagaccacaaaagtcgcccctccgacagagacaacggtcagtccgacccaatcagaggatgatctgttcccaatttgctcaacaacttcgatcggatcagtgatcaatcggccgaagacgggaaaagtggcagaagtgatcagaacggtgagcagagagaagaaaaggaaatttatgggcaaacctaagggaagcgggttaatcaccaataattgactcaataaatttatttttcacccaatttttacctaaaaaatttcccaattttacagctttccaagatttggcataacgcgaaaaatcgccaaaattaagcattgggcccgaaaaataagaaacaaccaacgcaacggcagaaaacattgacgggagagagtcgacaaagggcaaagggtcgccttcggtttaaaattatgttcggtttttgaagtgccaatgccacaccaaccgaccgctgaggttcaaactcaaattgtgaacgccggcgttagcaaccaaataaacggcgagcagaagcatcgccacgtacaccgccgggccggcccagtcgatgaactttctgatggcctccattcccatccaaaaaagaacggcttgggcaagtgacatgaagccgaagcagcaccagccgagcggagagagaccgacaaagccatgggactgaaaatgacggggagaaatggacggggaggagcaaaaagaagacattgtgcaagaagaccagtgatgggaagaacttgagcaaaacaacgataagggcacgggaagccaagaaagtttgtacaccgtaccaagcgatggcaatggaaccacggagcaaagcgggcacgttggcaccgcgaatgccgaaaatggcacgattgatgaccgggtaaggcacgccagtgacctgttgaagaaaagtggaagtgaaaaagacggagaaaggcaacttggctgggcttggccacccaattgcagcaaaaatggacaattagtattccgaggatgagggcaattagcacataaaaaggaaaaaagtaattaaaaggaaaatgaaaaataaataatttgaaaatgactacagcactcactattctgaattctgattgtgagcttaaataataatcatttacttgccatccggacaaacggagggcgaaaagacttccggctgtcagataaccggccacactgtgaacatctgacaaaattaatgttcattctcttttttcattttaatttttgttaattaccggtcatccaaacagcgaaaatgttataagtattccaatgttgactttgcaatggtttcaaatcatcattacaaagggacggatctaacgaagggacgcaatttgcaccctccggcggagaattcgttttacattttgccatttcaatgggtcggattttatcggtgccatttttggaagaagccatcgaaaaaagaatgaaagaatattattttattttcatatatgatttattttaaagtacaagcaaatcattttaagttttgtaagcagagaaataatttaaaaagacacggaaaatggcgaaaagcaaactttgaaagagcaaacaaaaaatgtgaaaggacagaaaaaagaaagaagaaatacattaaaaattcacttttaatgatcaaaaaagtaaagaaagaatttgttattcgattaaaacatctgttgttaaaaaacgatcaaatgaattggaaaacaaaaatttcttttgacatttcgacgtaatttgataactaattacctaaatggaatgttttgttaaatcgattgtctttttttaaaattttctatgaattgggcaaatccaaaactttgggcccgatgatcgattaccgtcgtgtgggaaaactgaacacaaattgcataacacaaatgagaattagtaattcgaactatcatttttataagattattttcatatatttttttttattaataattcgctatttttttaatttaaaatcaaattataattcaaaataaaattaaaaaaggcataaaaaattagctttgaaaaagaaattttattggcaaaaataaaaatgtctgtttttgttcacaggaatggactcaaaaagaatgaaaggcgaggcgaatgaaagcgcataaaataaaaaatgaaatgcgaatgaattcgattaatctctccgattaattcaaatccctccgtcggttttcgttgtttttggttcgttcggttcggtcttcatttatttgctgcttttcttcctttgcttcttcacattagcattgccaaacgtcgttctgccggcgtcggcggttgtggccgcggcctttcgcgaagcgcctccaaccaaaggccttttgtggccgcgtcgggacagctgaacacgtagtcgcgggcctggctggacactttgaacgcgttcctaagggaagcgccggtgatcggctctaaaggggggggggggggggaattagccgaacagaattcaaatttgagggtcattagcagtctctgcttctgccgaccttttccgtcgtgcagctcctgcacagtgactccgttcagtgccattctctccttaaacaccaattggtgcctcctcagcacgtcccttcggcacagcacaatcgtctggtcgaacagataagcgtgcacacttttcgcccattgcatttgcgcgc

SEQ ID NO: 10822 - DNA, 1387 bp, Heterodera glycines
cgtcaaatgccgaggaagtggaagatgaagcggacgagtccaatcgctctgttgtccgttttgcttccgcttttttcgttccgccttcgtccgtgcagcagtcctcgtcgatgaagtcgttcagttccgttcggttgtgctgcggttggcctttgctttgtcctcctattgccaattcgcggctccgtgcgcccggctgagagcgcgaacgacgcttatgcgaagcggagaaggcggacggagcggagcagcagtcgccgctgtgttggttcagctgcggacgcgagtcgtccgcgtcgacctgccaaacggaaataaataaaagacggacatcagcagaaaaaatggaaatgatcaaaggaattgagaaacaattgaagtaaattcacttatttataagtcaatcagagaatgattaatggcttatttatttactaatttaatattcgatttttgtttctattaattttttgttttatgctaatccaatcgattgacagtcacaacaattcgataatcgacgggaatttttcgttggacggaagagttttcgataatggatgtggatgttgagctgctgatcaacagagaaaggcgggagagaccgctgctgtgccgattggatgcccgcccattaatcgtccacctgatggaccgggaatttcccggggcggagatgggccggcggcggagggagtcgcgacggccgaggcatgtccaacagaagcagaaggtcggacggaggtgcggaggaggagggagaagaagcagggcactcccggaagggctgccgaaagtgaagcccaggggaaagacgacggggcgaacaatgggaagggtcgtcgacgaaaaaatagttggaatcctaggggaggggagggaaggaattggaaaaacgaagaaaaatggggaaaatgttaaaaatttggggaaaactggccggaaaaaagggacacaaaagaagcccatcattaattaaatgtttaattaataaattataaatgagctccatatgttcacatttcgctctctttgatttttttgtgatcgaaacgaaaatcgaaaatcccatcgaaaacggacaaaacgaaggaacgaaaacggagaagcgaatgaggcgaagatcggcgcgggagagacaatggcacgacggaatgaataaatgatcaagtgggaggagggcgacgaacacttttatagtgaaaacgccgaaggcgaagagaaagaaatttggaggggggagaaaagaatttattgcttgagacattctttttttattaaccgttttatgaccaaaattatttgtataaacggaaagtcaattcgaatggaaggacatttgatcaatggaaaaagcaattttaaataaaaatgaaaaatttaacaa

SEQ ID NO: 10823 - DNA, 2878 bp, Heterodera glycines
ctgcctcccatgcccgtaaacctgaaaaaatttgatgggaaatcagcgaacttttttgagctttaccatagaaaaaacgaatcaggcggtgacggtaaatgctgccgagaaaaatttaaataaattttgtcaaggggttttttggtgattgttttggatttttgttctatgttcatgattttaagaaccatcgaatgtatcgttacgctaaattggctcacactgatttcattgacattacaacatttgaaggtttgtttttccgcgttcgtctatgttttaaaaaataaaatctcaacttaaggccatcaatgggtgttttgtgatgcgttagatggcgaattaaactcacttaatccgggaggggttaagaaattcattgcttccattcaccaaaattcgcatcgacggcgccttagagtcagcgcaatttcttcggtggaaggtaaagtttcgaaaatattttatacaaacatcttaacaattgaatggttcctatcatttttataggattgactttgaaacgcgtaattttacgacttttggcatcaaaaatttttgaccattggaattccaccgattgttgcgattgccggtcaattggactttttcttgaaactcttcgcctcccggtctgcattcaggtatttgtcacattggattcaaatgattgtgatttaagaaattttgttcctcattttttgatttaggttcaattggccaattttctcatctcttgtattctctaccaattcaaatttgactccaaccgttctaacattggtcaaaaacatttatttgatggacttgtaaattttattcgatcgaaaactcaaatttattatgagaattaaacgtatgcttgagattggccaactgtaatttcgcaattgtaattaactaaagtgtccattattagtcccttttattcaatgtttgtatcattttacttgtgtaaaaagttttagcttcccttccaaaaattaaattaagtgccttaaaactaattggttaaatacctactaaattaaagcctttaatccactttcttttttcttttactgctctttttatgttgaatccgtctgtcaacaaaattcacttctccaaaggtaaattcagttgtttttcgttttcattgagttcgttcggtttattttcttttccccagtgaaaatttcagaaaataaaatacctaatttcttgtgaagttctcaaagacccattttgctttatgggatgctcattgtcatctgctataatcttttaattcgttttttggcagatgaattggacaagattttgagggatgctgacgagcagagggattttcccgcgttgctccgttcgcttggccaattggcttttcgtcccaccgatggcttttccttcccttcgtccgctctctcccaaatggcttcccatttcgcttcgcttagccctttctccgcttttcactgggccaatggactcttcgctttgctcccatcagcagaaaaccatgccaattccgagtcggttttccttttctccattaataggccctatcatcctgaaagatttcggggaagcaccagcggacaaaacgagcttttttgtcaagattcctccctccggaattttctccgttcttcagagtgctcattgtttcgcttcttcgctcgttggttgacaatgtgccccttctgaatgccaataaattgcgtgcctttgtcaaaactgaaatttcgcggcaatgcgtctcattttggcaaattgggaaagcgcatttggcatccgcactcactttatgtgtgctacgaatcttgctgatggaattgtcctatttggaggcaattcaaaacggagtctgtcgtgccgatttaatcgccgaagcgcagaacatttggtcgcaaatgctttctgctgatgaacttttggtcgtttgtcacttttccggtgcgattaactgacggaaaacttttcagaaggtcgacccgggtgccttccttcgactttcttcgtcgcttttccattcggcacttggcttggattatccactgacaaattcattagaagcaaatatcgttgtttgccttaagaaatgctcaaatgaaatgggaagtcaaaatggctgcgattcgctttactgtgcatcggtcggtgttcttttgcggatgtccggacaatccgtcataaaacttaattttaggaattcgccaagaattgtaccaaatatccttggaatggcattcctagtaatttggcggattgtccgggcgccgaaaatgcgatggctcaaacattccgccttaaacctcgtcgttcagctctttgatctcctttcggcacatttggcgaccttttgccaaattcttcctggcgatgtctgtcgtgcgatgtttgaatttttaatcgcccattctgaaaggcatttttgaagagacttcatttgttagcaataattaatttttgcagagataatttggagattttgctgaagcaattgactaaaaattcagccattcgttgcggcgaatgttgcgagaaagtcttccgatcactttatgatttgccgatgccttcgccttcttttaatttggaggaaatttggagcattgaaacgaaaatcagcggaaagaaagaaactcaggcgcaaaagattggttggcatttgggttggtcattgcttttatcttttggcacagatgagtcgcagctgagttgggcttcgctgctttccctttccgacgaatgtttggccaattcgctcgtcggcgtttcgaatgccaaagttagcaactcaaatgcactgattgtctctttttctcgctcagattgaaagcattgtcctttctgccgattttgctgttttccaaccagagattgtctccgtctc

SEQ ID NO: 10824 - DNA, 1736 bp, Heterodera glycines
  unsure (1)..(1736): unsure at all n locations
ttatcattccttcccataaatttgtttgttttcccatttcagtcgaatttctaccgacggactctgagggaatggcccgagtcgcgttttgccgatcgtttggagcattcgctggcattgctttgcagagaaatagtgcgaaggaagaaatgtttcaataaggtgagaggcccatgcttatgatctttgtacgttccttcccatccttttgttatggccctgttttgtgtccattggtacgccctcgtggtccaaccccccccccccccctcttattgtcgtccaattctcccatcctgggtaatccccccccttatcgtggtccaattcccccatcctggctaatccccccncccccttatcgtcgtccaattcccccatcctgggtaatccccccccttatcgtggtccaattcccccatcctggctaatcccccccccttatcgtcgtccaattcccccatcctgggtaatcccccccttatcgtggtccaattcccccatcctgggtaatcccccccttatcgtggtccaattcccccatcctggctaattctcccccccccctccgtttgtttggctatgccccctaaatcgcccctttcgactaaaagccttcgtgtttcagcttctccccttcgtcatttcgagttctttaaccggcgatcgtgagctttgttttccgatgtatttacttttttctgcacttgacgagaatgacttggcattgctcagcagcaatttgagtgccgctgaaaaactcaaattcagccgactaaaagtgcaattctatgcgagcaacaaaatcatcggctgacaccacttcgccttgtccactcatttcttcgcttgttattttaccgtttatttgttacttcggatttgcatatttccaaatattttatgacaagcaacaaacattttctgctctttgatcatactgttgaagggcaacgaccagtaactgaacagtcacactttattttatcccttttttgtgcccatttcgccttcgttactcacacgtccggtggcaaaggttcgtctttgaaaagtgtgcgtttcgtctttctgtacactgtctccaccttttgctgtgtttggaccaattttcgcacatctctaaaaattaattttgaattgttgcagcggtgggaaattcacctgtcgaagacgtaaatggtggcgaagacgccgagggagcggagatttatgccgtcctaagcaagtaattattccgttcggtcttttgtttccgttcggcttttcctacctctgtctgaattaggcttttgaacgtttctttggtcagcccttggctcttgagcatttcctccgcgttcggcaggcaaaagaccaattccatgttttcgtatgtccctgggctcagttcctgcccgcaactgatcgactttccgtccaccagcagttgtgccttcagtcctctgttctcttccaatgtttggcatgcgtcgcaatacaaactgaaaattccgtcttgaagaatcatcgaaattggctggtgaccacgagccgaagccgccgcatccgtcgtctttgcgattgtggcacggttctggcacctgctttttgttggccgagctgcgcagttccaagtaaatgctgaactcgcccttgaattcggagaacaccgtaaccttggaaaggaattggtttcgcggcaaagagttacggtaccttccctccgatactgtagcactgaaaaggggtgggga

SEQ ID NO: 10825 - DNA, 1032 bp, Heterodera glycines
  unsure (1)..(1032): unsure at all n locations
aacantttgccaaaaacattgccaaacaggcgcataccaaaacaggcggaatgttttgggctaatgtttgggcatctctatcccggtttttagcgttttagccgatgttcggcaatgtttgtgtctgtttctggtagtgtatttgtcaatgtttgggaatgttctgtccatgtttttgtttcatattttctggatgatttagcagatattaccaatgtttgcgcctgtttcttattactcgaaaacattgacagagagagattcccaacatttgccaaaaacattgccaggcgcataccaaaaacaggcggaatgttttgggctaatgtttgggcatctctatcccggtttttagcgttttagccgatgttcggcaatgtttgtgtctgtttctggtagtgtatttgtcaatgtttgggaatgttctgtccatgtttttgtttcatattttctggatgatttagcagatattaccaatgtttgcgcttgtttcttattactcgaaaacattgacagagagagattcccaacatttgccaaaaacattgccaggcgcataccaaaaacaggcggaatgttttgggctaatgtttgggcatctctatcccggtttttagcgttttagccgatgttcggcaatgtttgtgtctgtttctggtagtgtatttgtcaatgtttcggaatgttctgcccatgtttttgtttcatattttctggatgatttagcaaatattgccaatgtttgcgcctgtttcttataactcgaaaactaactcgaaaatattgacagagagagattcccaacatttgccaaaaacattgccaaaacaggcgcataccaaaaacaggcggaatgttttgggcatctctatcctggtttttagcgttttagccgatgttcggcaatgtttgtgtctgtttctggtagtgtatttgtcaatgtttgggaatgttctgtccatgtttttgtttcatattttctggatgatttagcaaattattgcccaatgtttgctccctgtttcttataac

SEQ ID NO: 10826 - DNA, 3292 bp, Heterodera glycines
aaacattgacagagagagattcccaacatttgccaaaaaacattgccaaaccagccgcataccaaaacaggcggaatgttttgggctaatgtttgggcatctctatcccgttttttagcgttttagccgatgttcggcaatgtttgtgtctgtttctggtagtgtatttgtcaatgtttgggaatgttctgtccatgttttcgtttcatattttctggatgatttagcaaatattgccaatgtttgcgcctgtttcttataactcgaaaactaactcgaaaatattgacagagagagattcccaacatttgccaaaaacattgccaaaacaggcgcataccaaaaacaggcggaatgttttgggctaatgtttgggcatctctatcccggtttttagcgttttagccgatgttcggcaatgtttgtgtctgtttctggtagtgtatttgtcaatgtttgggaatgttctgtccatgtttttgtttcatattttctggatgatttagcaaatattgccaatgtttgcgcctgtttcttataactcgaaaacattgacagagagagattcccaacatttgccaaaaacattgccaaaacaggcgcataccaaaaacaggcggaatgttttgggctaatgtttgggcatctctatcccggtttttagcgttttagccgatgttcggcaatgtttgtgtctgtttctggtagtgtatttgtcaatgtttgggaatgttctgtccatgtttttgtttcatattttctggatgatttagcagatattaccaatgtttgcgcctgtttcttattactcgaaaacattgacagagagagattcccaacatttgccaaaaacattgccacaggcgcataccaaaaacaggcggaatgttttgggctaatgtttgggcatctctatcccggtttttagcgttttagccgatgttcggcaatgtttgtgtctgtttctggtagtgtatttgtcaatgtttgggaatgttctgtccatgtttttgtttcatattttctggatgatttagcagatattgccaatgtttgcgcttgtttcttattactcgaaaacattgacagagagagattcccaacatttgccaaaaacattgccaggcgcataccaaaaacaggcggaatgttttgggctaatgtttgggcatctctatcccggtttttagcgttttagccgatgttcggcaatgtttgtgtctgtttctggtagtgtatttgtcaatgtttgggaatgttctgtccatgtttttgtttcatattttctggatgatttagcaaatattgccaatgtttgcgcctgtttaaaacaggctcaatatgttttgggctaatgatcgagtatcgctgccatgttttgcgagttttagccgataaaaaaattaagttcattaaccacttgatattttgtgctattgactacagcttgactttgattttaatatttttgtttgttatatttttgtgatcattgatcttctatagtttgtatgattgaggataacattgatctactaaaacctagttattttaaattaattaaccacatgttaaaaaagagatttactaggagtaattcactacaaatcccttgtgttttatgataggtggctgcccgagaaattggaggtatgggcgatgtttgtaatttaattatttaatttccaaataatttaattaaatattgataaaataaaaaaaaagaaaaaaagtaaaagcctttagttaaatacaatataattttgaagaaaaagctttttgtttaaacgcttatcgcttcattatttagtcagtggcccattcctagttagccattagatacaaaacacataattatggcagaatttggaattggaattcgattattcaccaacgtcggattcggtcctcttgttgtgcgtgataagatgaggcaaaattgttagccatgtcaagcctattaagtttggattcactttttaaaatttaaataattgatttatgttgattaaacaaaatattaaaaaaatgaccagcgcatgagcggaatgtccacggaacggtcattgacgcccgtctcagagccgagcagagagttcccatttttattgaccaatcgaatgtttccatcctcccattttatgcctgaaatgcaatgtttttccttttaaaactcattaatttttggacccctctcgttccatttccctcccccgacaaatcccaaaaagggattgtccggcgccattttctctctgactacaaatcggtcgaaattgttcggtccccccgtgtcaatttgggctcgtccttcctcaaccgctttcttttccacctgttaaaatctcggtgttaaaaattcaaattcactcaaaaattattaactccaaaaaattggctcaacggctccaaaattggatttgcgcgagtgtccacttgttttggctgttgttcttggcgcaaaaaagacagccacggcattggggcactatttaaataataattaataattccgagtaattagtttatatgtatatatttcacagcttttgatacaatttcatattgttacatattttaagctttttgaaattgtttataaattttttatgaaaattttttgtgttattttgcatattcacgcttttttacattaagaatttattgtcaaaaaattacttttacaaaatttatttgcaaattttgtgcttatttaggacttttttttacagatttcatatacattttggcacttttgtatttttcgggttttcttacataaaatgacatcccttttctaatgtgcaactaaattcaattaattaaaattcgcccgattattttccaatttcattgaatttattcctttctaaaatttaaaaaggatcttagacatattctaattatatgtattaataattagggctgggatttttatgttttaacatatttttttgtggcttagttatggcgagagaagcccaaaaatagcattttctccgaacaatttttgatttagagcgacttataaaaacataaaaacacatattttggcgttttggcacataaaaacatatcgcacatatttggactattttggatttttagcacatattttggcatttttgagaaaaatcataagaaaaatacaagaaaatctgaaaatgcaccctaaaaattgactcctttacgtttcttaagcatttagaaaatttctttatatatttaaatgcctaaagcagccaaatcggaaggcgtgttaaatcgtcgtcactggatttcaaagttcccg

SEQ ID NO: 10827 - DNA, 1824 bp, Heterodera glycines
tcccgaagaccaccatcgcttttttcccatttggggccggaaactcatttcgtccccagaccatctcggacaaatcatcttcggttcccggaaatacatcttcactcatcccgacggaagaagtaggacgaaaaaaatctctaatttaatctctaatcactagatttcgggatagctcactttaaatctcgaacaaatcgtttttcttcatctcctctcgtaaatcgtacacttaggggcccaaccgttcgcagtgattacgccatcttcttttcactaacgttcagccaaattcgatcgtatagcgatttgaattatttaaataattaattaattacaggtactcacttcgaatatttcggtttaccatttacatcctactcggcaatcgaaattcgaattaaaggacaatttcgaaaaaaacaggctaatttattgaaaataaaattatttattatttttttgttgtaaaataaattttcaaaaattagtttaataaatcgaaaatttttattatttgaaacttaatgaaaaagcttaaaatttttaaatgttagaaaattaattaatatttatttatcacaattagacttaactattatttttgtgtataattaatttagtgtcggcataattctacgaaatgcttacaaattggcaatacaaaacattggtgctgatgatgtgttcaagaacaacgaaaaacccattgatgaacaagtggacacattaatggtaactaaaaatctcgaaatagctcaataagtgcaagggcttctcagccaaagggccattcgatggacgattaagatagggtgctgtctcgggaccattttttcatacgaccgtcccaattttggtgcgctttttccaaaaaaattgggaaatggggaagggatccaaaggtgcagaccggcaacgccgggaagaatttaattttgcgagaaatttgttaatagattttgtacaaaaatgacggcaaaactaaacatttattgtaatttgacggcaattatttattaaatataaaaattgagaaactgcattcgggtgcatgatggaccaggtgatggaatttgaagtcgaacagtggcggcgaaagtgctccagcatgtggacacggaattggtcagcagtggcgcggaaatcagcaatttgatcagcagaaagcaaatcggccacggcaaatgattggagttttgccagaagtttaagcgtcattagaatgttgtcgcggcgaggtgactgtggcaaaaattccgtgacatgcattggcccgccatcgcgtaaaatattcctaaaaatctcgatatctaacaaaaatgcaatttccaaactgaccgtacgtgatacccgctgtattcctggcaccatgcatttttgtaagcccccaaagcttgcaaccgcatctccagctgtttggcgtgtgcaaaggtgtcgcaattctgtgaaaatcccgaaaaaaactccttggcatgcgacgatgtgcagcgacggtggaattgtcattgaaggctcaatgttgaaaaaagggctgaaaaacattcaaaattttgtaaaaatcaaaataaaggcgaactcaaattgcattcctgcacattgtttgctcatttgtgtcacatttgtcccattttgaacgccttcttgaaattgagcagcttgtttcctcatccatacaagtgtccgttggcgccccaggtcagatggcaaattctttgcttcacagcaaaaacaaggattagcactggctgctccacggtgtccaaagattttggagatgaacatcaggtcgccggtgagggaaattggacagggagaccatca

SEQ ID NO: 10828 - DNA, 4240 bp, Heterodera glycines
  unsure (1)..(4240): unsure at all n locations
agtgtcggcataattctacgaaatgcttacaaatggcaaatacaaaccattggtgctgatgatgtgtttaagaacaacgaaaaacccattgatgaacaagtggacacattaatggtaactaaaaatctcgaaatagctcaataagtgcaagggcttctcagccaaagggccattcgatgaacgattaagacagggtgctgtctcgggaccatttttcatacgaccgtcncaattntggtgcgctttttccaaaaaaattgtgaaatggggaagggatccaaaggtgcagaccggcaacgccgggaagaatttaattttgcgagaaatttgttaatagattttgtacaaaaatgaccagattttgagaaaaatttcagaaattttcctcttttacaccacctccacctcttttacaccgacccccttaagacgaaccatggacgataaaaacgaaaaaattgccaaaatataattggcgtaaaaaacaaaacgccaacacactcaaattaaaaacaaagtatatttgatttgatcaaatgttttaaaatcgtcaaaactcattagaaatcatagttattgagggcaaaactaaacatttattgtaatttgacggcaattatttattaaatataaaaattgagaaactgcattcgggtgcatgatggaccaggtgatggaatttgaagtcgaacagtggcggcgaaagtgatccagcatgtggacacggaattggtcagcagtggcgcggaaatcagcaatttgatcagcagaaagcaaatcggccacggcaaatgattggagttttgccaggagtttaagcgtcattagaatgttgtcgcggcgaggtgactgtggcaaaaattgcgtgacatgcattggcccgccatcgcgtaaaatattctaaaaatctcgatatctaacaaaaatgcaatttccaaactgaccgtacgtgatacccgctgtattcctggcaccatgcatttttgtaagcccccaaagcttgcaaccgcatctccagctgttcttcgtactctgtcccatggcgtgtgcaaaggtgtcgcaattctggtaaaatcccgaaaaaaactccttggcatgcgacgatgtgcagcgacggtggaattgtcattgaaggctcaatgttgaaaaaagggctgaaaaacattcaaaattttgtaaaaatcaaaataaaggcgaactcaaattgcattcctgcacattgtttgctcatttgtgtcacatttgtcccattttgaacgccttcttgaaattgagcagcttgttgcctcatccatacaagtgtccgttggcgccccaggtcagatggcaaattctttgcttcacagcaaaaacaaggattagcactggctgctccacggtgtccaaagattttggagatgaacatcaggtcgccggtgaggaaaatttggacagggagaccatcaatttctctgatgtttgccagttgccgtgccacgtccgaaaaagcaacccatatgccaacacttgtttcggcacctaaaaattgtacttgtaacctttagaagattcaactgttcaaaatatacccctgtagcatccgagcaaagtgaaatttgaagctgccgcatggatggtccaaccggtttgggttgaggcttccattgtcggcgtcgcgcattaaactcccacttctgctgttgcgtcccatgccggcggaagttggtcatcaatggtcaaattctgcgacatttggacataattgtccaactgaaagtcgaagtccactaaaaattgaatatttgatatttttttataaataaaatgattgaaactcacttgcatggtcgtaagtctcttccacctgctccgcttggcccatttcttgctgctccatctcggcttctccttcctcgtcgtcaatttgttggtattggactgctgaaattagtttgaaatattttaggacctaaaaatccgttgaaaaacatacttttcttagccagataggcttgtctcgccttctccgtctgagcttttctttcctctcgcctttttttcagttgttcagcacctcttctgccttgaagcttaagcaataatttttttagccataataaaaaatttaaaaaatttcagataaatgcgaattaaataactttctaggccaaaatttttactcaaaacactgaaagtttgcacattttccttttctctatcgatatgtaaaatttggtgtggatttaacaagcagaaaaaaagttaaacaagatgaagtacctaaatgttgttcattacattattaaaaacgaagagatagtacataaaattgagagaaataaagataaaaagtaaatatgacagaaggccaatttttttctataattattcataaaaaatattttttgccaatttttttttcttttttaccatccatggaacgaggcaggggcgttttttgttgcttttcacttacttttatgcgacgcatttttcaagaaaaaaatttgaggaacagggggtccgcggtttttgaaaattctggtccgtttttttttttttttgcccctatttccttcccagttgacttttgttcattttctagcgaatcggatttgcacttttaaaaaatgttcagggctcggcgaaagaatttgttacgccaaccatatttttccacacagtgcagcagaaaggtgggcaaatggacaagcctttaaatgcttcagcaattgtaatccgttggaatggagcccagaatatttatttttcacgaaaacgaaacatgaaacgaaaattaaaaaactcgaaaacgaaacgaatttttttcttggacgaaaacgaaacacgaaaacgaaactcaaaaagtgatcaaaaaagggacgacatgaaaacgacacggaatttcgcacacccctgctccggatgatgaaaatttaaaaatatttcgacattttggttgtggttaccttattttgggctttcttctcatgtgtttttttaatccacaactttcaattgaattttccattttaattattattttttgctttccccaggaatgagtgttgtcactttggccaacgaaattgctcgacgcgttcgcattttctgttggattttgaccggcaaacagaaccaccaaaagcgggccattcacgtgaaggcgacttgggcaaaacggtgcaataaatttgtgttcatgtcatcggaggacgatccaacattgcccgctgtgaatttgaacatttccgagggcaggtggcgtatttaaaaaaatatttcaaaaaatttgtttatgcgtaccagaattgtttcgggtcactcgaaacccaatatttttctcgtcccgaatcccaacccgatgattttgggcgggattcgggacaaaaaagaatttatattaaattttttgaaacgattgtgttcaatttccgagggcaagtggcgtatttttaaacaaaatattacaaaaaactcatttaggcgtcaattaatcctttcaatgtcaaagtgtggaaactggaattgaaggtctttgtaatgaaaaattttaattgcctttttcatgcctttttcgggattttcgttacttttcatggcttttttcaattatttggtgcttattatagtgccttttcgcgcctttttttgcggtctctagttatgacctaacggagggcaaattatagtctatatgaaagggctcctgatgtcccttttacagattgagagaagaacttttctctaactctattcaaatgaacacaaatacaatttaccttaaatttacacgatttaattgaattgaaaactccgagctgacttgaatgtaaatcaacaagtgcaaacaatgaatgtgggccaggtttttatattttataatcgataaggggatgagcaaataacgtggaaaagataagcacaaacgaaacaaaaaattgatgactcagagaaaatggatgaaaaaagaatagtgattatgagatgaacgagagaaacattatcgacaaaaataaatacaaattagattttaagaaatttgagtcgctttccgcaacatcacttctgttgtcttcctccatatgattcttttcactatctgctggttcattggatgtcgccgaaccgcaagttgaggacggttctccaggtgtcaatccgctcattgngctcggtgacatcagaagaatgaaagtcatccctcctccggtgntctcaagacagctcnntgactcgntgtctgatgctaattaacttg

SEQ ID NO: 10829 - DNA, 813 bp, Heterodera glycines
gttcaatgcctatattggccataatttgacgccgctcctcactgttcgaattgttgctaaaatttcgaccaaattggactgattttgtccttggcctcccttttcacctgtcctccccagccgttgtcccattgttgccaatcgtcgtaatttacaatttccccaaaatcatgagttgccggttggccagcaccataaatgtccattcgagcacggcgaccggatttcctccctcgacgtcgctttcgtcctattttttgctgttaaaaatctgacagttgttcaatttgaaataaatttaaaagcactttttaaaattaaaaatgacaattagtaggttttcatagtcgctaatcagaatcaagcatccttttcgcaccccggatcaaaatccgaacaaaaggtgaattttttttattctcgaaggcgaaaaaacctctaaggaatgaaagatcactgtcatatccttatgaacgaatcccataaattttctattttctacttattcattactcgttttttatttagaaatatgaaaaaatggaggtctaaaggtaaatatgtattttatgaagtaccatttcgaatgagtcttcgtagcaaacgacatcaccatctaaaaagtcttggaataagacatcgtggtactagtgcagttggtacgccacaaatttttttttgtttaaagccatataaaaaatgttcctagggttttcgagggcgctgattatgaatccgacctccatttcgaccaattctgagtcccggactcaaactcgaacatttggtcgataagtcaaaaattctcaaaaa

SEQ ID NO: 10830 - DNA, 4521 bp, Heterodera glycines
agttgccctatattgttgattatatttatttgataaaaaacatttttttgggaattttagacttttcgacaaaattttagaatttgagtacggggctcagaattggtcgaaatggaggcacggattcataatcatgcaacctggaaaaccctagaaacatgttttatacgactttaaaaaaaaattattgtggcgtaccatctgcactagtgttcccccctcgtttaactgaaaagatctgacaaaaaagttatatataaaaatgaatgattatctttcaaaattaatttggaattacctcgttctggtagaaaatgacccgagccaagcggaacaaaatttgcattcgaattgtcagagaaactgagttgtgcgtgctgactgattgtgtgcgggaaagggcgaccagagccaagtgggacaaaattagaattggatgaagaagcggcgggttgctgatttggatagtcaaaataagcattgtatccaccaccgttggggcttaaagtcgggtccgcatcatacgaataaaagttgccaatttgctgttgcgggtggtcactgctaacccatccactgctgcttatgttgctgtacattgtgaaaagactctaaattaccattaattcagttttatgtgaacattaaaaaataaaataaaaagatttaatgcaaccgaaaagaatggtcggaacggagctaacctaactttaaattatccgaacttttggcgttttgtaggcatcgtttttttttgaacaaacaccaaaatacctgcgcacgtacttacacactagcttcgaaattagctatttacataacttcttttaagaatacttcatatttgattataactctttttttgtctcttcttcaatgtcaaaatcagttgcatcaaaaactggcagcacaacaaaggtaattggactcgaatagtttactcgtttttaatatagaaaattaagcggaaaagaaaggccgacggaggagggaccaatgaattggcatctgacgaaatcaaaatggggaggaaaaatgtgaaaaccgccaaaaaggagccgactacttcaagcgcagacgacaacgtattacttaaaacggaggagacagaattggaccggaatgaccgggccgaatcttcgccctcaaccgcaacacaaccggcaatgatgccaaaagaaatgtacaacttttgtaaggtctggcagaaacaaattcaaaataaacaaaagcagatcatgaaatatgttttgtttctgtttcagtcgattttggaaatcgaagagaaaggcaatgtcaacttaactcgtctaaagggcaacaccaaatttagccaacttttgcgggacaatccgatgtttgacgacagcgttgacattaggtaatttgaactaaattcgacaaacaaatgcctgaaatggaatttattatttacaatcggatccaagcaattttaagcatttgggttcacaatcatcagtagatgtttttttcttgtttgttaacagattaaccttcattttagtgcgtttcaaaattcatttacgcacttttatcgctgggctaccattttgtcagacgtttcgttgtcgaaagcactgcacacggtgatggaatatgcccaaagtgaacacatggtgttcaggtggttctcgctggataaaaattcattgaaaaacttctatcaggcacccaaactacccaaagcgaccgcaaaatgcattcactcgttttgcgcaactgaccggctccaaccccttcaagtcgaacgggcaaacgagtgctgattataagaacgaccaagtgattggggtggaatggagcagagggaacttcaattgaatgataatgaagttaccaaaacaagcaattttaaggatccgcgggtggtgaaagcgaagcaggaatatgcaaaggatcgcgaacgctatctgtttgattttcttccatttgcaagaattgttttttattattatttcatattttagagccaaacttcgagaatttctcaatagccacacggatgagcttttcgaggggcaaattcaatatttgcacaaggaaatcaaaaacacgcaaaagtccatagaacagaaggtgaaatcgcattaaaaaatatttttgttaattgttaaggcatctttttttaggcagaaaaaatcgcaaaataggattatataggcacaaaaataggtaaaaaaaaaatttaatttattaacactagtagcagaactcgtaataaaatatttaattttggggccaaatttttgagagaaaaaaaattcaattcttacattagtggtatactttcttaggggtgtatttttcgtttttattgcatttttgttaaggattttttcgaaatcctgaaaataggcacagtgcaaaattttaggcatctgcctaaaaaggaagctcggaaaatattcataaaacaaatcagagtcattcttttaaggaaccaccgagaaggcgaaaaagcaatggcattaaacagccgcagaaacaattgccaaccgcgttcgatttgtacaagcgatcgaaagggcaaaagtgagattatttattacaaattcattttgagatctttgttgggtgtgtttacatgaaaacacttctttagttccttcccctaatgttgttttataatccacaaaaccttttagcaggtacgaacatttatcctcggaagaacgagaggccaaattgcgtcgtcacttcgaaaaacttagtgctgaacagcgtgaaatttacgaatctatcgcggcttcattacaatgatcgattattttgagttgaaatttggtggtcatttttaagttcccaaaaataaatgatttttttttaccaataataccaaaatttgcttccgttttccttcattttgcctgccaatttgctgatcatgaaacttacctcttttgttattttctcgtttaattgtagcaaaaacataaaaaaatcattgtatcatcggcgtcactaacaaagtatcattaattaataataaaccctccttaaccttcccaatagaatccattggattttcctgatctgatttatttaattataggtaaatttaggcgtttctttgcgcagttattctctcaatcgatgacctaaaaattcttcaggcgaaggggggtggggcgatggcgaactttgagaacgaatccatccgtcagcccaacgacggacggaccatcgctttgccccttcccattccaaatgtttctttctttctttcatttgcgattggttcggtatagcagagggacaccaaatgatttgtggtcaatctttgcttttatttttgcctttattcgtttttctccaacacttcgattcatcggcgggaggagaacaacggagttggaaggacgaggacggagtggaagtggaaatcatcaaaaagatcccgggttggtgaatgaaatgggaaggggggatggagggagggaagggccgaaaatgacaacgaaacgaacagattcaaagtgcaaagtgaagagcgaggcgggcgacgagttggagcagtacttcaagctgacggacaaagagggcaaactgatcggatccaatttcggacagaaaccgtaagacaggaaaaaagggaggagggggggggggggggttacgaggacaattggtggtaattgacccatttagctataaatttgtgcttggccatgggcaggccatccgtccgatggacaacgcaatgcgcggaatgtgcgtgggcgaacagcgccgggtgaccattccggcggaagcgttggcggaaaacgaacggccccagggggtgggcgaggaacaagcgatgcattactttgtggagctgaagtccatctttcgcgcagtgcccggcgagaaatggatggaggacgacggacttagcattgaggcaggaaatattggaagaaatgggggggggggacaattcgacacaattttaagtcccaaggaccaaccaatgctttttctttgttaggtcactcacaaaatagaggaagacaaatgtcgacgagcggagcccggcgacttcataaagcagcactacaccgtccacctgcaggacggctcctacgtggactcgagccacgaccgcggggcgaccttcgatttcaccctggggatggggcaggtgataaaaggcacgaaaagcaatcaatcacattttgaaatcaccatctttttttgttccgtcccccacttcgatcgctcttttttattgcagcaaaaggaaaagaaaatgggatcgaattcgccatggacaaataagagactcatttaggcatggaccgggcaatgaccggaatgtgtgagggcgaacgccgaaaactgatcattccgcccacgctcggtatttcccattttttggcatgacacagaattggaaatcattttcagcctatggcgaaaatggacggcccccggccattccgcccaactctcaattgcacttccaaatcgaactgcaaaagctggtcaagaaggacgaagagaaggaactgtaatagg

SEQ ID NO: 10831 - DNA, 2309 bp, Heterodera glycines
atatttattgaaaatgtgaatttttttggtacaaattctgtaaacaaattagttaaaatcacaaaatttggtcatttttttgaataaatctgttaacaatacagaaataaattttcaaaatttttcccggcggcgcctatcggcatcaccggaccaccccactgttcccgaaaagttttttggaaaaagcgcaccgcaaaaaagtggtttaaataataaaaaaaattggtcaattaataaagcgtttatttgtaaaacattatatttttcatgctttttaaaagtaaaagtatttattttcatgaaaatttttttgaaaaaatggattttttatgaatttttcaatacccggttttaccgggtacccggacccagacccggtttaaaaacttggacccggacccggcttttctggacccggaaatacccggacccggtttttgaccaaatacccggacccgtctaaccctagtaaaaacgttccgtttgccgcattccataaaaatgtaatagtcccgacaaaggaaattgctattgccccaccgactcctcggcttcggctcatcaagtctctcgaacaaaaccaaatttatgaagcttcggtttaagaaatccccctaaagtcagaagtgccttttatcacgccgtatatatagacaaataataaatactgacaatgggaatagaatttaaaagatacaacaacagacaaataattaacaaaaacaattcgaaagcttcggcaaaagggcagtgtttgtcatttgtcaaccgacggcgtccttttctgtctcgtcgagtcgcccctccccgccggaggcgaattttgccgtttcctccgcaaggagtggcgttggttctgtcctcgtgtgccagacaaaaacttttgtgcaattgttggctttcgcttcaaattcgtctatcgttacattcagcgaaatcagaaaatgtgactcctgaaaagcgaatgacaacgaattattctgagtttaaaaaaataaaatcaaaaaacccaccaaataacccctcggggtttggtaactgaagccaccgcctgcgttagtcagaattcgtgaaatgttcacggcgaagctggccatgtcaattggaaatggccgttggcgtttccattttgaattgaagccgaaaacttttgctacaaaaaatattattaatttaattggcctctgaggaatgccaattacagtacaattactgccaattagagggtattcggtgatcatttggtccacaattcccaccggccaaatgccaatttggctgatcgatcgcatctcagcgaaaaggcgccaatcgtacgcactgaaacaaataagatttaataagaattggttttaaaatgagcttcacttgtcgtcgtctccgaagtaaacgacgccccttttctctgctgctttattctcccttaatttgtcaattcttttcgctttttctcggcttttgctcttccttttcaccttagccaattgagtgccgcgtttcgttgtgcgactcccttcggaaatttgtttttccattcgctgggcgttgtcgccgccaaatgaatgccgacaatgccaagtcggcccatcatttggccaatgaatggcgacggatgctcagaatcctaatgacgcgttgccaagaaaaatcaaatcgccaaatttgaatgacctcgacaatgatccaaaacagattcgcaacgggcaccaaagtttggccaagacgggtcaaatccgccttttgcgcgactcggcgagaggtcggagtgatgaagaaaatgggagggagggacaaaggcgacggaatgggaggggaggacagcgtaaaatgcattctgaaaaggcatttaattttaaatgagtggaggggagggggacaaagcgattagcatcagcagaatggtcaattaaaataattaattatggattgggccaatacatgttgcactccatctcccacccctaattacccatttacctacttaattttgctaattatggtcattagctgccccctcccctcctccaccttcttctgccgctttgccctctctccgcacttttgctgctgaccaaattgtcaatttcgccctgcagcgcttcccttttccgcctcatggaaaatatttccgcctccaattggcgacttgtggcagacaattccattattttggtggtataaaaacagaattggaacagtgtcagaatgcaaagtgtgataaccatggaacacttttcgattgtcatttctaaaaggtcgaaatgaatttccattacgaaaaggaaaaaatcgttcgaacattgaca

SEQ ID NO: 10832 - DNA, 1487 bp, Heterodera glycines
  unsure (1)..(1487): unsure at all n locations
tggggagtcgacggaaattttgcagaagtccggccatctaatcgccaacattttctaattctttaacaccccttctcgctgggaaagggtcttccattttggaaactttatgcgaaggtgaacccaatgtcatgtcaaaaataattggctttttcagtgtgatttgccctaaacaatcattcaaatgctacaaaaaactcacttcttccatctccctcatatacaccgcctttgcgctcaccacggccgcaagatgatttgcttcagcggtggcctaaaaaacaaaagcaattggcagtcataaggagggaaagcattaattagccttttcactaatcactcgggtcaataacaatacagaaatgaatgttcttttccacttacattgagaatggtttttggctcgggcagttcagccttgctgaacacctcgaaataagcctaaaaatttgaacttaaatatttcaattcgacgcgaaaaagggtacatttatgtagatggcaagctctcggcaagtgatgggctgaccgccaatttgtttgacgaccaaattgttggggtcgaacagatgcggcaccagcgaacggagctgtgccttgaacttggagtcaatttctaaagcagaatgaaaattgaatacaatgaacaaacaaaaagagcaaacaaacaataaaaaaaacacactgtcaagttcgcctcggaaatgctgatttgtggacacttcgaggccggggtgaggtagcaaaaagcagcgaatgttgtcgaaggacgagcgaatgtgacggcgcaactgctgaagttccgggtgttgacggggcgtaacctggcaaaaacaaatacatttaacaaatcaatggataagccgagaataaatgggggcacaggaattgattttacgaagaatcctagctaatggaaaatattttaaattttgagatggaatggaagaatataagaaaatcttcaatttatgcatgagattcatgatacattcatctgattgagtaccttcaatcgtttgtcaagaatgcgttgaccaccgattgggccgtactccgcgtcataagggaaactccagtcacggacaaggaacaaaagcgactgaaattgatgagagaaatggtcaaccaataaaaaaaagaattacctggaacggtttgctgttgttgtactcgtccagcgccagtcgggcgtactctgtgaacagttgcaagtgctgcagatggtcctcctggatggtcttgttgatgttgaaaatctgggaagcaaatgaatggaaaaatggatgcaattccttaaattttattcaaaaattctttcagtttaaaacctgaacagaggaaaccatcgtggacaacgcgaaaacggtggcgcaatttttaaaagtgctgacactgtcgaanatgccttgtgtgtccatgaggaggacaacaacctgaaaaatcatcctaataaagacagaccaatgaatttctagggaattaaa

SEQ ID NO: 10833 - DNA, 2710 bp, Heterodera glycines
cccccccccccccccaagagggggggactgtgttgtcgtcgtcgtcgccgaggagtctcgagccacagtgtgtcccttggctccttcattcaatacctcttcaacaaaatgccagatttaataagtcgaaatgaaagagtgaaaattatgaaattggcatagcaaagttgaaagttgaaaatttaaattgaactaatgaatgacaaatagtcagagacccgaaaatgaaaaaaaaacttttgaacgagtcgagcaacggcataaagccagtagagcccggaattttgaaaaaagcgggatttgagattggcatcaggccggcataagattactgaggattaccgggataaaataaagaccccccccccccgatttttgaaatgggaaatttaaaaaaatatatggtttctaaataaatttcgttagaattctcaaattgtactcggcggaagaatgtatcggcatcgcctggctctaactagtcaaaaattgaatatgtcagcaatttgggagttgttgtcaggaattgagacttaagagcgggccgagactgaagcgaagccaaagccccaaagtccatatttaaatgaggcgcggaatgaatgagcccaaattatgccaatgattggtgtcaaatgtccggtgggacggcggacgaatcgccataaatccgctgctaaattttcataatgagtaatccgtcccactcatttcactctcttcccagttcacagttttaattttaagcggatagacaaaaaacaaaattgtgtgagaaagtgtgtgtgtgtgtgtgtaaaatttctctctgtcgcccattcagcgccgtgtttttttcccgtgacggcattatgccaatgaagaaagttggcttaacataggtatgtatttgatatttatttgtgcctgacccagacacagttaggcgcgtcatttggcaacggatcagacagacagaaaaagaaaaaaaagtgagcagatggggtgggatggaaggagctacctaattgaaaggaattaaagttattagaaaatttattttgtttttctgcattttcagaggttgagccatgaaatatgggctagaacggtaccattcggtaattagcggttttttggtacccgttttttcaaaattagaattaccggtttttctagtaccgggcggtaccgttagtaaaccgtaaaaatttacactgctgatagaaacgggaatccgagttgaaattattttgaaaatttgggaaaactgaaatgaatctgcattttcaaaacgaatgaaacatttcgtcattattttgctatcaatttttgaaataaccaatggatcaaaattgctcagacagaattcggagtttgtcgaaatggataatgtcagaatcagttttacgaccctaaaaacaagtttatctcaaacaaaatttggttttagtttttttgaaaatctacggtcagataatagaaaaatatcaaaaattcgacagtaaaatttcattgaacatacaacgaaaacaaacaacatgattatgtatgtatgacaatgggactaattttcctatggaaaacgatgggagaaggggaagggtacggcatatttacagggggaatgattatccagcaaacacaattcacccataataaaatatcatctgatcactgatcatcgttctggccaaacatctgatgatcgttctggcgttgctgctgatcatcgttcaggccgaagaatgcgcggatcacaaaacggagatgagcgcgctcacgttcaatccacagccacagattgttcaaagtgtatggcgacgcttcgaagttgcacagacgccctctgcgaaaacgactgttcaaaatgttgagctcaatgattgaagaacaaaacaggacgatgttgagcagctaaatttggcaaagaaatgatcagaaatgctgaatgatgaaagttgtaaaaactcaccaaagtgaacaacggcgcattcgatggttcaaaatgcaggttgatacagagcccatgaagcacagccgtacagctccacaccgaatacgagacgagcgccgaaatgaaaatgatggcagatgcagtacgacgacggaaaatggctttgacctgaaaaaaagttgacaataattaatgctaaacataagcccagcaaagcgttaacaaaattgcaacagacaaaacaaaacagtttttattctctgagattcaactgaaaacacaaaaaatttggattcataagacattagcaagttgcaattttgtgctacacgtccaaaactcacagaattcggcacagacgcccgccttgtgaaccacaatccaacggcttcatttgacaacaaaatcatcaccaaaacgaattgtgcgaagagagagtggccgaccatttgaagaagatttccatttgtgttcagcggtgtctcgaaaaacggcatctgaattcaaattgtcaaattagtttttgtttgtgggactcttttctgctggtctaccttcatttgaaggcaaatgcgctcagccggatccgccacgtgtaaatgctggccattgctccatttgtcttcgctaaccacatgttcacaaaacgccggaacaccaaccttaaaattggaaattttgtgttaaaattttaaagtgattgaatttaatttgattgaaacgacaaaatccgcgggggagttgcgagcaatttgccacatgggtgaccatgaa

SEQ ID NO: 10834 - DNA, 1193 bp, Heterodera glycines
  unsure (1)..(1193): unsure at all n locations
ccaaaancggaggcacaacccaacgaattgactatcgaaagagcgaaggaagaggagagaatcagcacaagcaaagtgatcatttggaaaggcagaagaaggaactgaaggggggggggattaaaagagaaaaaattggacacaaaaaccaaaaatgctttaaaacctttaaaaaataatccatcaatcagcgtaaatacctaacggaccaaccgaaagagacaaattcggcagaatcagtgccgcattatttcgcgccaggccaaatattgcggaaatgaccgaaagtgaccagctgaggttgacaaatagcgaaacgaacacaacaagcctaagaaaacgcaaaaataaatgaagaaaaccaatagtcagtccaattttatagaataaaatgatcggttaagcgattgtttttgatggcactgatcggaagaaccgaccgatcactccaaaacattgcctggatgtttcgtagtgaaaggccgacggatggagggcgaggaggagggaagagttgtggaagacttggctgagagaaagggacaattggaggatgagaagggcaaggcacagtttgtgaatggccaacgaatttggggcattggacggaggcaaaaaggaggcaaaacgaacggaacgatcattgcaaagtttggccattttgggaaaacaaatgaatgagtcgggggggggggaattcatttatagggggagaataaacatttgagcagaaaagggtgacggattgacttacacttccacggggaaacaaaagcaggagaaaggcaccccagggaatttcattcaattaaaaaatattgaaaatggcctatggaaataaaaatgatttactgccaccttttagaaatagctcactttcagcagcagtcgaagcgattattaacgcaacaattaatggaatattttgaatttgactgtcaaaaaaggcgatagcagcgaatttgaaggtaaaaggccttaacaatttgaaaatcattaaatgcttttaaagaaaagaccagcatggaaattgcttggaaggtaatcgccgaggtgaaaatgatcagccaatccaagtcgagtgactgatcagcactgatccaccagtcggagagccaattggccacggagagagtgtgaaagacgcagacgacgcccgaggcgcaaataatgggcaaaagaaaaatcggacg

SEQ ID NO: 10835 - DNA, 1888 bp, Heterodera glycines
ctcgtactccctcgtcttcccccccccctttcccccctcttcgtcctcctccctctgctgtctgtcccccatcatttccaacattttttcggttggccaaatgattcgtccgcccctttctttgccccccccccccgcttcagctccgttttttgtttgtcttcgtcggtcattcggtgtccctttggtcatctccgccttttcttacgttttatttttgtcctccgccgttttttgctttttcgcccattcatcacaaagcacacgcacaccaaagacaaaaaggaccatttgattcagttttggtactcatcataagcagcagtagacgaggtcatttcgtccgcttttttgctttcgtattaaaaattaattaattgtcaattaagtcaattaattaccatggccaaatgaaaaaggaattattaaatgtttggccattcattatccaccaataagcttttgtgagatgtttcttccgctaattcagcttacttactctttttttcttattactccgatcacctttgtcgaatgcattttatcgatgcgccccctccgagttacgaccaaatcgcagcccaaacgaccaatgccgtcgcgagggactcagtcggctacgacctatcggaaaaaattgcagaacaatcgacggtaataagagtccaggaattggagattggggagctgaggcgagacttgggacggatgaaagagcaaatggaacgcatggaacagagggaggacgagggacagccggggggcacaggcggaaaaacaacgccaattccgcccaaattggagcaaacgctggtccaagtggtcaccgaggaagaggaggaacggcggatgaaaagaagtgggagacgaaatggggagggggatttataggggagagggagacaaaatggcaaaatgggagagagaaaccgtggcaagccttggggccctctcctttcaattgccatttaagggggcagaaagtgcgacatcattggcggattggtctgtttcgtggcactgatggccgtcctcggattgggcatttacattgtgctgaacaaacctgcaaatactttggccaacaatctgatcacaaatgatcagccgaagatggaaaaggaaatgaattcttccatagtcgcagcacccaaaacgacaccaacagaagaagaagaggggacaatcgtacggcactttcgcattatcggaaaaggttggaggaaatgctttttatgtaaaaagcatcaaatgggaaattttgacaaaaattattgtcgtgcggcttaatagaaaatgccaatgattttgccccattaagcgaatggtgacaatttgtgttgggcccgtgccgtgctttcttcttcttcctcctcttcctcttcttcttcctcctcttcctctgatcaaattcgtcccaatcattgctttgtattccgccgctctttggatgatcggcgccttttctgctcattttccctcggccatttcgtttcgccttctttcgctgctttttctcaaaatgggcaatttgcgctgccggcgatgcgccgaggaaaggccatgattttgttgaaaagtaatcgaaaattaaaataataattagagagggaaaattaattaaaaagtcccattgtcattcatttatccatcaaatcaattaattaatggattaattaataatctgattaatgatgatcacttaattacgaaattctttagattttttagatcggcaaagactgcgcaccttcagaaaagacatcgacacttttcacacgcacacattaagcattgaagaagcgacccaagccagggccatttgcacagaacagttttcgctgttccgcaggttggaggaaaacgacgcgaattcgcaggggacgga

SEQ ID NO: 10836 - DNA, 1075 bp, Heterodera glycines
  unsure (1)..(1075): unsure at all n locations
acctgctgaatcagtcactacaaatggactgatcagtcatgcaatgggtgacgaacagttgggtactgactgatctgttgagccttactgtccttctgatcactttggcccctccgcgtgtcaattttctactgcgttttctttttttaaaacaattgatttttctcatcagtcgatgataagaaaacattgaatgttttcttatggttttcttttgtaaagtgatgcaattcaaaagaaagaaaataaaataaaaaaggaggagaagaggaagcggaaagaagaagaggaagaagaatgaatggccaaagaaagaggaatcaccgacgaaagcccaaccaaagcaaatttggcatggaaggagctaagggaaaacaatagccgactttttgaaccaattcgactttaatccaattcaatctgacatttattttttaaattttaattatcttcttttctgctctttggcttatcgttcgtccccacatgcgtcgctctctctctctctcgctctctctcttttctctctctctttccccatatgataatcaacaaaaaggaatgcgtcgtcggactgatcactgctctgctgataaggtcatccatgcccactgatcatcaccatccttcattcaccccctgcacttcccccccccccgccctccatcggttgcttaaccctccgccgtttgtcccactcatttttcagtttcgtttctttttcatttctcccactcattgataaaaatgataaattataaatacccattagcttcaccaacgcttaattgattctcaggatatattaattcatctgttttttaaaaatcccaccgattggcactttcattccttggactttctctgcacttagaattatttaaatggataaattggttttaaaaatccgtgagctcctcgatgagaacgaagtaaattttggggaagtgcagcgaattttggaagagtataaaagtganccgaaggattggctacaagacacacattttgacgaacacaagtgaacggaccccgtttgagagtgaaagcaaagtgttttcagatacacgcgaaa

SEQ ID NO: 10837 - DNA, 4181 bp, Heterodera glycines
ccgccggccattccccgtgcttttgtcggcgcttccattttggactactgacactgtgcacgagcacagcgatcatccgccgttcccctcgggggatgatttgtcactgttttatttttggtgtccctttgtcccctcccccccccccaacctgacaatgagcagcagtaaatgcttcttcggttgctgatcattcgtcgtcacacattccatcgttatcattctgtgctttattttattgtccccagaaaataaaaatgatttacacataaaattataaattaattaatccattttatttttggcatttccaaatcgaattctttggcattttcattcaaattctctgggatttataatgctttggcatttccaaccgtggtatttcattcatcagaggttcatggcatttccaattaaattccttggaggacttttcaaatcaaatatttggcattttcattcaataggtgaaatttccaatcggttcgttggcatgttcaacaaaattctctggcatttctaaatgctttggcatttccaatcaaattccttggaggacttttcaaatcaaatatttggcattttcattcaataggtgaaatttccaatcggttcgttggcatgttcaacaaaattctctggcatttctaaatgctttggcatttccaatcaaattccttggaggacttttcaaatcaaatatttggcattttcattcaataggtgaaatttccaatcggttcgttggcatgttcaacaaaattctctggcatttctaaatgctttggcatttccaatcaaattccttggaggacttttcaaatcaaatatttggcattttctgctctgctgattgaaccctccttctctctttccttaaataaacctttcattttattgccatttgccccaattttcgccatttgcttttggtagcccaatttctcgcgcataatttatgtgttaaatttgctattcctcccaaacatttcctcccgcatttttgccgctccgataatttcgtcgatcgtggcgaaatacattaaataatcgccaccaccgcgagttccaaaacaaattaattaattgtgaaaacttatttgctaattcccttttggccaaattgaaattatgggactgatttggcacatttggccataatggcataaacattcaaattccatgttttgtgtatgtggtttttctttatgcaaattagagtccggcgggatcgggactcccgcgggattttacaggagtcccgttcgggactcccgtcccggaaattttgaactcccgctcccgctcccggaaatttttttttaccggactctaatgcaaatcaatggcattttttatcgaaacgatttcctattttagctccatttctgtcctctcaaaaatccttttaatttcccccgctttttgttctgctgcccaaatgcccgccgctcgggtcgccgaccgttcgccaatggcacatttgccgttgcgagaaagtgcccgaggggcccaacaacaacagcagcaaggaaaggaacaacaacaacagcagcagcagcagaaccaacaacagcagaaccaccacaaggagtgcgatggcgaggaggccgagcaggagcagaaccaacttcggaagaacaacaacaacggcaaattgatcgtcgtcggtgagttggccaaaattggcaaaaaaaagggggaaatgagtgcaaattgaagcggacaaatcggcagagcagtgccaaagggagagggaaatgtgcgcaaaattaatgcaaaggagggaccagctggaagagcagctgatcgcacgagtggacgagctgaaggacatttgtatcgcggaaggggtacgattgggcagaaggggggggggggggattgggcgatgcctgatcagtggtgatcagagtaggaatgatagtattggtctgactagggcctcctcattaggtgagatcaggctgggcctgatagtgctgatctgactgggcctcattagaggagatcagattgggcctgatcaaccaagaagagagaggaaagagaaagagtcttactgatcagcaccagctgatacttttgatcaggttgaaaaacttaccaggtctgatcaaaataaaaacagtttgaagaatttttcgaatcaattccgtaatgggagcttagaaaccatagaatgaatgagtgcattatgatcagcagaagttttaaattgaattaagaaattgttaaaattcgaggcaccattaaggattgattagacaaaatatgttccgatcaaaaaatgtgattgaaactgatcatttcaggacttggtcggacaattgcccaccgaaatttataagtgccttttgccgggggagattgagccgacggtgaagcgccgggttggcaccacgttcaaattccctcaagaagtgctgagaattcgacgacggaacagcaaagacagcgccagcggcggcggtgaaccaaatgtaattaattaattaggggttaattaaatataattagaataataattgaaatacaggaggaacgccaaatgacccaattggaggccgaaatcgagctgaaccggcgcattgtggcagcagcggaacggttggccaaggacaaaagcgtgaacaaaagtgtgcggaagaagcgccgcaaggatttgcatttggccgcgcaacggttacgaggcctcgagaagggtgaggggatttgaaaaatgaattccttggcattttggcctcgagaagggtgaggaaaagcggattttttttgatattttagcatcaagaaaagggtagaaaattggaaaagcggatttttaaaagattttggcctcgaaaaggttgaggaaaagcagattttggtgaaatttttacttcgagagggtagggcgatttgaaaaacggatttaatgaatcttttcaacaaacatttttaatttacgccccttttaggcctccatcggctacgcttgtccagctcgaagccggacgtcagcacaatggcggacggatgcggcggcgctgtgcccgccgcttccattggccatcagtcgggcagcggcttctccctgaacagtctcagtcagttgggcggcacacgctatttgagtaccactaatctgggccgaacgaaaatcatgaattgattagtaattatcaaaatgataaataccaaactgaacagcgactgatcggtccttcatgagatttaagcgacacttttgccaattttgcacttttaaatggcatctctgcattttcccattctccaaacaaaatccccacccctgtttagaagcttggcccaacttctaccacacttttcgcatgtcctccaacaccaagtcgtgccctgccaccccccgtggctctgtgcctgatttgacaatgccattggctgattctgccgcgacggctgttcccggggcgaacaatgccaacggcgcggaggcgggcaaaaatcggaggacgacgccgagcacggcaaaaaagttgcacaaaatgttgagtcggtaaggcagcaaattaattagcattaaaataatactttctgatcaatgtgatcagattaattccttcccccccccaatcactgatcactttctttggctctatccgatcactttcacatttcgcccaatcactgataaccttttttggctttatccgatcaccttcccctttcccccaatcagtgatcaccttttgtcgtcctcaaactcggcccatccgtcttccgtccctcccgcgtcttcccccgtcggccacccttcggaattgcctccctccccctcttcctcctcgtctctcagtggccatctccccgcttcttcctcctccccctcctccagtggcatttcttctgcgacgccttccctttcatcttcgtccaatttgatcagcttggcatctgcggcaccgccaggtcttttttttaattttccaaatttttctgaaattttctacccgaaaaaaaaattctaataaaacttcagtgccaagtcgtcgcgcgtcgtcggggggcggtgcatccgccggcggtagcgtccaatcaacgaattcagccacaacagcagctgatgatggagcggcaacaacagcggacagtaggacagcagaaatgccaagacaagactcaagcagccacttgtacgttttagggcatttacg

SEQ ID NO: 10838 - DNA, 1055 bp, Heterodera glycines
gaaaacgatctgctgatcagtctccgagcaagttctctccgaattttctgatctgatcatgctttagcgtcagaatagcctctgatgagtcgcctgatatgggctgatcggctggcattaatccccatcggctcactgctaaatctgaccaatctttgcctgattgtgaggtcaccttttaaatgtcgcttttaaaaaggtacgcaaacattggctaccagtcgtcgtctccgtacaaaagtgcttatcgacagtgccatttcccaactctgctccagcaaacgtcgccgcctctctccgcttatcaccagccaatgacgtcatcgaccagcttttccgttttggttcgctaatttttggctagctaaggaaatctcctcctccactctctttttctctcctctatgttcctccctgtctctatcctctctctctctctctttttctctctctttctctctctctctcgttattgcttaatttctctgatcatttgcccccccaccgcagaaggatttgtcgtcgagcagcagctgctccagcggtcgtccctcctgttgtgcttcctcctgctgctcctcctcgtcctccgtttcattggccgccgtcgcctccacccaattgggccaaattgtgcgtcggttggatgccgcgcgtccgttgcgccatccgctcgtcgtgcggcgaagcggcggcgacggtggcaccgcaccactgctcagcggaagtgtacacggacaagcgcactccaccggcagtttggacaggcgcctgagacgggtgccgacagcggaggagacggcatcaaagccattgaaaaagatggtatcgacgacggcaacgggcgcaatttggtgggcttttttttgtggggggagcggcaattagtgtgttgtacatttaattggaattcattcattgctttttcagtgctcccgcttttgtccaattgtccccgccgccgcggctgccccggacgagcgcagttgaacagcttgccaaccagcagctgatcaccactttcccggcatcggtcgccagtgccaatcggcgcg

SEQ ID NO: 10839 - DNA, 5968 bp, Heterodera glycines
  unsure (1)..(5968): unsure at all n locations
ttctaaataaattggtgacgcgtcgtggtagtcggttattacggcaacaaaattttaaaattcgaattagtacgaaaaggagaaaattaatttgtaaatattgcaataaaattatcaatcaaatggcaaaaggaagtcggttttgaattctttgctaatgaatatttttatgaaaagatatttttagtatgtttgggcattgaagcgactcattaatttcctgaggattttccatcataaatacatgctctttgggaaccgtacaatattcttttcttagaaatcctttgcctataacagtcaaatattcgaagtaggcatttaatcgaacggcttagagttaaaacccaatcaattatatcgcattgattttatcatcagattctaaaataaattggtgacgcgtcgtggtagtcggttattacggcaacaaaattttaaaattcgaattagtacgaaaaggagaaaattaatttgtaaatattgcaataaaattatcaatcaaatggcaaaaggaagtcggttttgaattctttgctaatgaatatttttatgaaaagatatatttaggatgtttggacattgaagcgactcattaattttctgaggattttccgtcataaatacatgctcgttgggaaccgtacaatattcttttcttagaaatcctttgcctataacagtcaaatattcgaagtaggcatttaatcgaacggcttagagttaaaacccaatcatttgtatcgcattaattttataatcagattctaaaataaattggtaacgcgtcgttgtagtcggttattacggcaacaaaattttaaaattcgaattagtactaaaaggagaaaattaatttgtaaatattgcaataaaattatcaatcaaatggcaaaaggaagtcggttttgaattctttgctaatgaatatttttatgaaaagatatttttagtatgtttgggcattgaagcgactcattaattttgtggcaaagaaaactcggccggcgctgacggctagggggtctgtgcgcgggagtttctctcccgtccctcgggcccaattcactcaatttcctgaaactgctactgctgccgttgggtccgtgcccaagggagtgaactggggagggggtggggaggacaaacaagatggggttggctgttgttgctgtaacggcaccaccgactttttgaagagctgccggcgctcccggttgaggttcgggagaagagttggacttccggccgcgaactgcgtcaaccgccgggaactggctcccgtccttgtttgctgctgctctgcgggggattgtcccccgcttcgattctcggggctttggctccccttggtcacttcgttcccgatttttcccccctttttttgccctctgaccctttcaacacttttccgacaaaatgtttattggtgatgatgatgataaaaatggtcaaaaataggtggatgattatatgcgagatgttgatggattatatggtgaaaattggaggaagggaagggcgataaggattattgagggggtcaaaaattgggaaagattcagcaaaaagaaaaagatggtgaggagtgaaaacgagtgaagagcaagaggtgaatgtgtgtgtgtgtaaaaaaatggaaaggaatgaaatggaatgaccccaaatagacgataaacaatacttaagtaccaaaaacaatttccccctgggggggggggcaaagattaagatgcaaaagagcgacgccgaagggtacaaaaatcggcggggagaaaaaatgccaaacaaagggaaaaaatgagatgaatgcaaaacggcccaatggaaatggcgatcggagaaagtgtgaacaaagggacaaagatcggaggcagatgtgaatggcagaaaaattggtgaagaaaaggcaaatggtgaagttgacgaaaaacattatgtaaatgagcaaaaatgaagggaaatgaaaagtttaaataaagagagaaataaagaggggtgaaaatgtcgtcgaatttaaaaaaatggatcgcttaacatggcaatggcccttatccgggaatgtcccctccggatttcctggtcagcgtcgtcctcctcggcgcttcttccctcctttgtttgggtcccgcggttgggcgggggggtggctgaagatccccccggcccactcattttcctcctcctctgacagttccctcgccgtgccgtcggcgttgaacaccaatattccgcttcgtcctcctctggccctctcgtcggcaacgaaattgccgacaagttggattaattcgcataatttcttttacctcatgttctttcagaaattttttaactttcacagttcgctgatccatcagttctgtaatttcattgctaatttcctccattcttgccgggctaacaaatgatcccgttccgacctgttaaataatgaaaggatttatttgttgaaaagagttacataaattacccaaattggtcccaatcgcgagaatccccacttagtgacataattttctgccaacttaaattgatttagagagtttcctatttttccatttgttttactttattcgccctctggaggtcattgctgcaaccggttgttactcgttccttattttcaagaaacaattcttctccaatataccccgctaatagatagtcaatttcattcaagacatcaattttcgacaccctcgtttcggcgccgctcgtttcggcgccagcccagtttttggactataacttttttctttgtcaaccaaatctaacattattggtatcattcgaaagccctaagtgttctctattagcctgctaagtttcaaaaaatttcgttaatgctcaaaaacattatgactagaagaattcaaaaaaccaggccacatgtgtacttttggccataactttgttcaaaattgatcaaattttttggaattatgcaaaataatagagcatcagaagggttctcgaatgatatcaacaatattagatttggtggaaaaagaaaaaagttatagtccaaaaactgggctggcgccgaaacgagcggcgccgaaacgaagtggaccccaaccgctcgtataattttaaaaggatgtcatttgtatgcatacaaaaaaataattattcaaatggaccaaattggcaaaatgtttatgttattaaaattttattttcctcaaatctcaactcaatcctctcaatttctcacccagacccccattcttaccagtgcttattttagtcccgccgggaccgggactagcaaaaccgggaccgggatttcaatttttccaaaaaccgggaccgtgacctgaaaaaaccgggatttccggcaccggtcccggtcccgctcagccctaattttaatgcataaattatattaaaaataattcacctctcttatgcttttcttaatttaaaatttaccacaaaaattggccgtttttagcgcaatctgttaagaagagcatttttggaattgataaaaaaattgcattatttttttttttcgtttccaataatatacaaatttaagctcttatattgcatttttttttaaatgtgcttattttgaatcaaaaatatttttttgatcagtgatttgcttattttttggaaactttttcgatggcacttctagtgaaaagagtggcaaaaaactgaggaatgtttttttctgtaatttttatatttttcccacaaaatcattaaatcgtctaataaattttattcaataaaataataatagaaaaatttaaaattattaaatttctcataaatttttgcactgtctctgctttgcttgctcaatgccaacctctgctacaattttcacaaattgcttcattttttcaaaaaaatcatgcacaaaattgtataggatggcccattccatttctaccgtagtgttgttgccaatctcttttaccgtatcctcagtttttcgtgacgaaatttggcgctcaatggcgccaaacagacggaaatacacgcgcaaattcaacaaaattttattctcattttcataacattgttttcgcgattcgaatgatcttgcgatgagatactgaaattcggaacccgtcagttgggccctcacgattgggccctgtttttagctataacttttttctttatcatccaaatccaacaatcttgtgtattactcgaaagcttaacatgtttagaagctatttctaagctatcgcttcgtgattagacaattgataagaaagttatagcatgaaaattgcggaaaggtcgaaattttgaaatttttcttaataacttttgcaaaagccataaaatctttttgttttttgtaaggctaatcgcgatcacgtgaaggagctttcgagtgataccaagattgttgccttttgatgacaaagaaaacaaagttatagtcaaaaacatgcaggggcccaaacgtgtagggcacaactgaccagtgcacccccaaaacggcgtcggcgccgaaacgttcgacgaaaaactttttgaaccataactttgttcattgtcaatcaaattaagcattggttggtgttgttcggtagctctgggtgtttattattaatttgcaaaatttcaaaaattttcgttaagtttcaaaaaaaaaaaaagttatggccagaaggaactcgaaaacctagtatttcgaacttttttttgcccttatttttttgtgcatgaataaaaatttttgaaaatttgcactttaatagcgtttttcaaatactttcgaataataccaagaatgtttaatttggttgagaaagaaaaaagttatggtccaaaaatccatccaacgacgtttcggccgacgacgttttgttctgctccgccaactgacgtagaccgccgaaataggcaattaaatagtcacaaaaataggcaaataaccaagaaaaaaaaagtatatacatattttagggttaaatgtttgggaaatttttttcaattcttagtgggtgtattttctgaaatttttgcggtgtctttttattgcattttctctccatttttatgatttttttttttgtaaattattgatggtttttttagcatttttagcaccgttacccaccttcatgcttctcatcaagccggatgtggtcacatcgtcaaacattttgtcctttagcaactctttttgggtccacatgacgtactccttcaaattgttgatcatccgatcagaactgatcagtgcgcacaacgctttgtctatgtcgaccaattcgaacaaatgccgatacaaaaggtcatcattagggttgtaaattatatggattaacatattttttctgcgcatatgctatgaagaaaggggctcaaaaatagcatttctgcattaaaattttacgatttggtgaaggtttttagtccatataaatccatattttaggggttttcgggaataaatccatatttcgccatttttgtgtttttagtccatattttggccatttttggcaaattttcacaagaaaaatgagaaaaaagcgaaaaatacacccctaaagtttgactttttggaaatttttaaaattagacccccaaaaatatgaaaaattttggtttttcatcgaccttttgacatttttaattaatattttcactattttttttgcgaacttttcctttttatttaatgcgaatttttttgaattggcaaacttggaggtgatggtacgataataaaaaaaatttccatttttaaattttaagtctatttttgtttgtttattgtattttttaagtttatttaagcaaatattgaatataaacaccaaattcgtaattttttatggtttaaagcatatattttggcagtttttagtccatattttgatccatatttagccaagttgagctttttagtccatatttcgggcttttttcctctcataggttatgtccagtatttagccttttttagtccantataatt

SEQ ID NO: 10840 - DNA, 1128 bp, Heterodera glycines
ttgcataatgcacaatgcgtaagtcctgatcaggccaatgtttccttgtattaccaaaacaagacgttctgtggtgtagtaacattatttggtgctctcattttttggcgccggatcttataaagtatctttgcataatgcacaatgcttaagtcctgatcaggccaattgttccttgtattaccaaaacaagacgttctgtggtgtagtaacattatttggtgctctcattttttggcgccggatcttataaagtatctttgcataatgcacaatgcttaagtcctgatcaggccaattgttccttgtattaccaaacgaagacgttctgtggtgtagtaacattatttggtgctctcattttttggcgccggatcttataaagtatctttgcataatgcacaatgcttaagtcctgatcaggccaattgttccttgtattaccaaacgaagacgttctgtggtgtagtaacattatttggtgctctcattttttggcgccggatcttataaagtatctttgcataatgcacaatgcttaagtcctgatcaggccaattgttccttgtattaccaaacgaagacgttctgtggtgtagtaacattatttggtgctctcattttttggcgccggatcttataaagtatctttgcataatgcacaatgcttatgtcctgatcaggccaattgttccttgtattaccaaacgaagacgttctgtggtgtagtaacattatttggtgctctcattttttggcgccggatcttataaagtatctttgcataatgcacaatgcttatgtcctgatcaggccaattgttccttgtattaccaaaacaagacgttctgtggtgtagtaacattatttggtgctctcattttttggcgccggatcttataaagtatctttgcataatgcacaatgcttatgtcctgatcaggccaattgttccttgtattaccaaacgaagacgttctgtggtgtagtaacattatttggtgctctcattttttggcgccggatcttataaagtatctttgcataatgcacaatgcttatgtcctgatcaggccaattgttccttgtattaccaaacgaagacgttctgtggtgtagtaacattat

SEQ ID NO: 10841 - DNA, 3979 bp, Heterodera glycines
agtcgcgttttataaaaccgccagtcgcgttttataaatccgccaaaatggaaagtcgcgttttataaaaaccgccacctagtcgcgttttataaatccgccaaaatggaaagtcgcgttttataaaaccgccagtcgcgttttataaatccgccaaaatggaaagtcgcgttttataaaaccgccagtcgcgttttataaatccgccacaatggaaagtcgcgttttataaaaccgccaatgtaaacaaaatattgtacatatgcgtgattatcaatttttatataatttaaatatagtaaaaataaataatcgagtaaaatgcaaacttttattgctctttaaaactttctccaaaaatatgaactgacaagcataacaaatcctaaacataataaatattaaaaaaatataaaacactggcaaacttttgtaatctttctttatgatcattaggtactattacctaaaactttacagtgactggcagcttttatttgagaatgtgaaataaaaagcattacacctaattctttatctctaaatcgcaaccaccttaaagtttttatttaataaatttacccaactaatgcttacatgtcttcttcggaaattttctttttaagaagcaattttattgaaccccgtttatttagttgaagcctttctgggacattaaagggatcagaacaatcccctaggtgatttcttcttctacggtagtaagagcttcttacagattgccaattagggtagttaaatgaaattccagaaatatcttcaatttcaatatcctcagcaacatcgtgttctctagcccgataagaccccttaacaaaaaaaattctggttttaataaagagaaatacttctcgccacaaagatttagggtttatagaacattgcacaagatctcgtctttggctcctatctatttgttcagcagctagttgctcaagcggtactcctttacattgtttatcatgaattatttgataagttctgtctaataagccatcgcgtaatattgcactagctattaaacttaaatacacataactatataaaaattataattaaaattaaaactaacctgtcagaattgggttttttcaattttttgcaacacatacagtacaaataaattacgccttctctctcgtttgtttattgaattttcgatattcggattcatgcccaatgataaaaagaaatttgttatcaaattttgaaaaacattgcgatacttcggcattttccatatctactttgtttccttctgttgattttctattttttatttttgaaatatatctttccaagcttctcaagcttaggtcgactccgatttcagccagtttttccaataattctcctttagtctttatttcctttcgaagatattgatcaattaagggtttggcgtgattgtttgatgttaattcctcaaaactaattccatgaaaaagttttgagcagcagcatactagtaatatataagctaataaataaaatttagctttcatttataaaataaaaaataaaatgaaatgggtattaatttaaaatttaatgcttttatagaatataattgcaatactaacaaatatttttgtttttattcagctgtaatattggcaaatattattgcagtctgactggcacatattgtcacataaaaatatttttatcgatctatttagtattaaaaaaaaataaatttagtatttttgttggttatttgcatattgacaaatttataaaacgcgcaaacccattttggcggatttataaaacgcgactggcggatttataaaacgcgcctttccattttggcggatttataaaacgcgactggcggttttataaaacgcgaattgttaggtggcggatttataaaacgcgactggcggatttataaaacgcgactaggtggcggtttttataaaacgcgcaagcaccttgcgtaaataaagttagcaatagctgctcctacacgtttgaatatggcatgataaactaaattttgtataaacaaaacaatgtattaattatttttcaataaagttataaaaaactaaataaaaatttttacaattaaataaataaaagttaaaaacacgcctcatattgaaattatttcatagctttaatatattaaagcaggaacaaattttaaaataatttaaaagtattaaatgcaaaaacaagataaaaccgcgtccagtcatttgcggacggacgacatttgcggacggacatttgcagacggtttttgaatttaaaaaaaaattattttttagaaaaaaatttggaagagtgggcctcgtcagtacgttctctccggttaaaaagcaactaattacgtgtgtttcagccggcccaaccgtagacacactaacttaaaaagcgcacaccaacaaacaaaaaaagcaaagaaattaaattttctgattaattaatatttgaaatttattaatcgataaaatataaaatcattattcatggattaaattgtcaaatccattggatgctaagcgatattgaagggctcttaagtgattcacaatttggtatggttcggggtttgcaagtgcataaatctagtgagaagagtgtgtatggccacatcattattatagtatgtccttcgcctaggttgcaaattcaaagcgcttgtggggtctaactcataagtcctaactttgtcttgaggaattctttcttcctctttcgtaactaaaattatactggtcggttttttattcgaaattttttttcatcagagaaaatagtattcatttacatataattttttttattactttggctaatgtttttttgatatatttaaaaaactgcttatataaattttgaatatagaaactagattttgtatttgttcttagcatgagcttcataataaataaattaatttatgatattaataaaaaattttcctttatcgctttaatttctatattattattattattacttttcttgtcagtttatgtttttacacacgtttttacacacagaaatcagtgttcgattacactttacacgaacttgttaaaatgatggcctagagatgcttcggaatgaagtccaggttaaatttcaaatttatgccattatttatttaaatttttaaatattttattttcaatgtttatttttaatttactattaattttaaagctgaaattgcgagccgctttaacttatgtgaaaaatgattacttttgcgtaccaagaataaaagacaaaacactttgttaaaggagaaaaattagtaatgcttcaaagagtaattaaatattgtacactcacaatcaagatagaaataaagtaaactaatatcaaatttaaatactatattttaaactagccgtatcgaaccttaaccaagaaaaaagtaatcaaacaaagaaatgtgtagtaataaatctatcacgaaaaaatgctaaaaaagtaaattaaacccaaaataaatattcaatttttataacaaaattgatgattatcgaattttaaaaagttataaatcctttttcaatgacttatgtatatttttaatcgttatttttgttgaaatgacacatgaatgcatttgtgtgaattattattcaattacccagttttttcatgtcaaatttaaaaaattgtccaaaacaaatataatttaaattctttagttaattcaatagcattttatccttaaacaaatatttgggtttttaaaagattattcctattaatccgaaaacgtaattaatttgttgattgatttaatagattaagcacatataaatattggaatttcttaaaaatttataagacgaaaataatgaaattattaaaaatatcaaatactaaaaaaatatttttttccgtgtattcaattttattttgtgttgcaaaaaagctttaactctcataaaatatgtgtttcgacaatgattgatctcgacag

SEQ ID NO: 10842 - DNA, 1828 bp, Heterodera glycines
ccgctgacccacgaattgtccaagtctcgaaattgagttttttattatttttttattattcggatgggcctaaggttagacaaggcgtaatatacaggttatattcgtattcagcgacctcgaaacccctaaaaagcccaaattagactcattttgtttttataaattttgaaaaattttggacaattcgtggggttttactcttttggacaattcgtagcttggacactttgtggggatgccacaaaaacacataagaaattcatagccataacagcagaaaggtcgttttatcagcaacacaaccaaatttaaaaattatgaataaataattaagcgaaaaatttggaaaatttggcaagaaaaattttgaattatcgtaaaaaaattgttttttttttgttgttttttgtttgcacagttgttgctgttattgatttgttgttgttaatgtgttgtaagtgctgttgtgccccgtgccgtgccgagcacagcgcctctgccgccgccggaggctttagggctcccattcactgcattttaaaataaaatttaatatgcaataaaaagggtataaacattttcaaaatagtacacttttaaacacaccgagtcaattttgagcccctagttcaaaaagtaaatgcatatgtggctcagtggtttttgtaagatagtaaagggacaaaggggggaggttcgagtccgttgtgcaacatgaatatttttatttatttttgtccaaaatattaaaaaatcacgatatttggtaattatttttgaaggtttttgccaaccaaattggacaatcttggtatctttcgaaagttcttgatgagtagaagcttttcctaagcaaatgataagcatttttataagtttgaaaaaagatataagcgtttgaaattttattttttgaataattttagatcggagcgtaaaaaattaaaactcgagcgttaaaaatattcataatatttttctctatcgatatgtaaaatttggtgtggatttaacgtgcaggaaaaaagttaaacgtcacgaagtaaattcggtttttctctattaacagagataaagaaatagaacgccaaagcgagagatgtttttttctctgcactctctctttattgacacatgtctcgttttttgactcggtgtgtaaagtagcgcaaagcttgagcctaatcctaggcataagcaatagaacgttgcttagtacgacttttcaagacactccaggcccatacaattgtttattaaaaaattaccgaacctcttatgaagaattgacagtgacttcccctgtaaggttccggacaaaggcatcgccaacaatttttgggattttgatatccattattttggcacttgttcggtagttgtttgcaggtgtctgtgatgtacaaaagtaaacaatgtgctaattttctaattattctgtatattcagctaaccggggcagtatattttattgaggagtaaagtgtccttgaaagacagtctcggttgccccgctgttctttcataaaaccgattaaatgggatgatcctgttctcgctgaaacgaaaaagagcaattttagtttttaattctattaaacaggacagatttttggttaaacttatttccatttaaacaagggttcgggtcgaaaattttacaagaaaagaaacattaaggccaaaaataagatcttagtgtaaaaataaaaaactaccaacccgtccatttgtgttgtataatgcatgattgaagcgaagtcgtacggtaattgaaaattttcggtttttttcattggttcgtaattgtttttccaatccttaa

SEQ ID NO: 10843 - DNA, 3711 bp, Heterodera glycines
  unsure (1)..(3711): unsure at all n locations
ttagaatcaccaaattatggaagaaaaacggcattttccgattgatttactcaattatcaccctttttcaaaaattcaaagaatatccgaaaagtaatttcatatgattattacaaacaaaaataccaacttctgtgatattcagcgacattttttgccaaccgcctcttctgcccacaaatgaccacgtaccgccatcatcaattatcacaattccctccttgcttttgttgtcaaacttgaaagtgatgcaactttctgcgcttaaatgtttcagtttgttagtgtgaaagtatacccaaaaattcgggttgttggacccaaaggcgtaggcagtgggagctgaggggttaaacccccccccccccccgaaatccaaaaaagtaaaaaattcagtaaatttttttaattttaagcgattttcttaacaaaattgcattaaaactctcaaaaatttcccggcggcgcctatcggcaccgccggacccccattttaccatattttagaaaaatggaggccaagatgccaaaaattgttattttttggctaaaaacggcgaaaaattttgtaaatacacccccttaattcgggattgcaaaaaaagcaaaaatacatccctaaaaatcgactaaaaaacagaaaatacacccccaaaaatcgaacaccttatcaaattgattccgctgataatcgcctctttgtattggtcgatatttttcacttaaatttaattataagaacatacatcatgaaaaacgccaacattttttactgaatttgatcgaaatgggaaattttgtccatttccgtgctccttgaatacttgggctggcctgccgtttttgccgaatcgtcccaaagcacttttcacatgcttaaaatatttcctcagaatttagtttaattcacaactatccacgcattaccttctttgcgttggtcatacatttcttgggcatccatttttgagaacaaagtgtcgcctgcctttaatggatcaccagaggggatctgcacatgctcctataaaaagttgatatacatataagacgaatataatataaatgaattttaaattggatttatgtctttataattttttcgcggattagttattgcaaaagaaacccaaaaatattttttatccgaacttttgacttagagcgacttataaaaacataaaagcatatattttagcaaaaaaattttgaacttaacttttttcattgtaaaccaaaacttggtatcatttggtagccctatatgttcttcttttaacctgaaaaattgcgaaaaatttgtttaaggttcaaaaaatcccataacttctttgaacctcaaccaaatttttcgcaattttgcaggttaatagataacatatagggctatcgaatgataccaagaaagtggatttggttcccattttgagcatatattttcgcacattttttggttttagcacaaattgcatcatttttggcacatattctgttaaatatttcaggatttgtatcatataaagattcggtctctattttccgggactaaaaatgttataatttagtaaataaagttatttttacaagttcggatgggtgccggcatacgcatggagaacagcagcgaaccaaggcctccgcctttcgcaacaaatctctgaccggctcacaatcattgcccaaaatgtcacatcgtgatggggaggtctaaaaagaacccaaattatgaatttgcaatctcatgactaatgagttgaatttagcgaagtgtacacaagaaattgaggcattactttttctgcgtcttaaattttgaaaccgaaattttgtggtaaaaatttttcagttaaaaagtcaaaatttgactcttaaagtgccaaaggatggaaaattttggtactagttgcagttggtacgcccacaaaaaattgttttaaactcgtataaaaatatnttatagggtttttttacgtcaattgattagctanaaaatttaaagaacagctattccactgaaatggaccatnttaataatttcactgcttcaactttcatgaaaatttttttgattttcgaccaaatgttcgaatttgagtcaggaactctgaattagtagaaattgagatcggattcataatcaacgcccccggaaactctagaaacattttttatatgattttaaaaccattttttggcgtaccaactgtactagtgccaaatttttaattgtctgtcctattaagttttcagtaaagtttttacaatgtttggattgtttctgtatggctccagatcctcttcgcgcgtaattaattttgaataatgtagctcggaaacttggaaaaaaatttcgatgtatccattttcaggtgggataaaatgaagcgattttgccaatgtgccattccatgattcttccataattgaattcaaaacggaagaaagtgaatttttctaaatatatttattattattatcttttttgttgtttttacttttttggccaaattgatcgtgagctcttttcccgctcctcgaattgtgctcgcgcgatcagatgaaaaatcgatgaaaaaaattgggacaaaaagatgcgcttgcaaaaggtcttccattttgaatgaaaactttcggcaaactttgtacctggaatttatggaaacccattattcaattatatattcattctcaaaacgacttgagaaaggtaaatgaaaaatccaaaatggattgtatgatgatcaattgggccctggcatcccgacgcacgcaatggcgaattcgaaatccagccgaatttggctcattgctgaagtgtcttttgcagatttgtgaaatcgctttgttgagtaccaatgggggtcgtttgcttttgaaacaggcaaccaattcatacgaactgatgtgaaaaaatgcaattaaaacacattaacattaatgggaaaaattttttatgaaaatttaaaatatgttcaaccaaaattggaattttttttataatacatgaaataggtaggctcggggcgtaaaatgacaaattttttaaaaaattgtaacaacattaggccaaaccagtatcaaaagttcttcaacgaaaataaataaatttgagacaatttattggaaaaaaaatgctaccctaatataaactcataaaacaggcattaggcagctgagaagagctcagaaaaataggtaaaacctaaattgtatccccaagcaaaaactaataaaatcgcaaaataattttaaagccaaaatatttttaatgttttaattaaaattttttacttccgacatgtctccgatgttggcaccttttggcatgcatcgaactcatttctcttttgcgaataatttgttggcaaattgaaaaagtcaatttgcgtttccatttcgccacaaccgatttggtaaagtgatgcggagacattgagcgaaaatttggaagtgcaagtcggaatgttaatctccatccaattgatgccgaagtgttcgctggtggtggcatgtggggaaaaacgtgacggctgaaaatgaaaaaaaacattaattattttaacaaaaataattggataatgatgatgatacaattagtcgttgccgaggattgtggcacggttgtaagcctggagggccaatggaaagaaataagacgaaaaatttgacaatttgtctcattttccgctgaaagaatttttgatttattat

SEQ ID NO: 10844 - DNA, 2256 bp, Heterodera glycines
tattcctctcacctcctcaacccattcctgcactttctcatgcgtctccgggtcctgcagtgtttgcttggcgccgttgaacttttcgcgaaccgttggtcccgctttgtcgcgcagccaatcggcagcctgaaattagaataaatatatatcaactttatgaatattttattattggtaaattaatttttattaataaatatttttttttataattattttatcaattaatattttcactgcattgtgatatatatttataaattttatgttttaaatagagttgcacggtaatcggtaattgtaaaaaaaccggtaccggtactgaccggtaatgcaaaaaccggtaccggtaaaaaccggtaattttccaacgtaaaaatttttggacaaaatttttcaaatacaaaatttttattcagttttcgcgcgagtgcttttttagcattagaattgttcagaagtatatgtatattgagggtgaccaagtttttttttcaaattcaggataaagaacactaaaatccagatgtagacctcaaaattcagattattgcaaaacaagggatcagcggccaattttccaattttgcgaaggggtctccggccatgtaaagtaatgtaaatcaatgaccttttttgctctcacaccgcttttttctcggcacgtttttcttcaccaatttcctattcttttctcgaccagacccccattcttaccagtgcaaatttttaccggcggtaccggtactagacaaaccggtaccggtactttgatttttgaaaaaaccggtaccggtggcaaaaaaaccggtaattaccggccagtaccggtaccgtgcaactctagttttaaattggataattaaccatttgtttgatctttacttacaccaacaatcttttcatgcgcaccgttcacaaaattgtcccaccaatcacattcgctgtttgtgctcagcaaaagaagaaaaaagaggggaaacaaacggagacgggcaaaggatggcattggcattgtgccaaaggaaaaacgaaagaaaattgggggtttaaaaggctgctgaaatacaaaattgtgacaaacgaaaccgaagcctgcggttagtcaatgggaaggttaaaaattgtccgcttctgaacgagttccccacaaaatccccacaatcaatgcacatcgcccgccaaactccatccttttatccttttgctcccccggggcattcagtggaaatgaacgatttgcatcgaacgaattgccggatttgaagcaaaaagcacagaaaatccaaagcatagcatatttttatgtatctttgttcctttttcctacgagaaatgacgcattattagcagaacaacggcggacgagcaaaagggaaacggaggaaaagcatcactaattggctaattaagcagtttgtggggagaaaagcgaacggcagaaatttttgttattctgattaagagaacgaagatcagacaaatttataatttgggaacctttttcattaaaaaaataataataaaaattgaggagaccaaaggaatttttgatttagcggcgatggaaaatgatgatgagaacgaagtaaatgctgatgagagatgaccaaacaagcagccccctcccttcatcaacagcagaagaaatgagtcacccaaatggaaaagccaaaagtgactgagagataaggaaaagtggcgagacgagagagaggaagtggaaattggaaatataaaggggaatatgatcgatgagaatgggaaagaaagcgaaaaatggggggagaggggggggggggggcatcgacgccgctttatcggcaacagaagggtcgcaataggagacaatcaaacggggttggccctgaaggcatttgacgggaaattgcggaattcgccttaggctaaaatatttgcaaattttcactaatttcttaacattttttataaagtaaaatttgggaaacaatttcaatttatttaaacaaaggctttttaatgatcagcttttgctgtgttacaactgaataaaaatgagaaatattaccattcaagagttttcaatattctttcaaataaacgaatgaaatatttaaaacagatgaatttgaggcataaaatacaaataaaaaaagggacggaggaagaggcaaatgacacaaaattaattggttttgcgtcgtcgtcaattgatggccctttctctctctctctcttctctctttctctctctctctcttcactctcttc

SEQ ID NO: 10845 - DNA, 3416 bp, Heterodera glycines
cttcgctcagacaaatggccaaatcggtgccaaacgtcgactgcacccgctgcacatagacaaaggccaacgggacaagcagaacacttgcgatggtggcgcaagtgctgaaaggtgtctatcatcagatcagcggaaaggctacccaaaaggtgggtttgtcccaccaacccaagtgccacactgacaaatgacgtcactctgagcgtttcggcgtattcgaggcgtattttgtgcgactgccgcaattttttgcttttcaattcgccgctgtccattcgggagaagaaaatcggctgattggtgttggaagagaatggacaaaagtacgtttgatggatatgggaagaggaagaggacaggccgagcaaaacaaaaccagattattgggaaagaggaagagaagaaatggcggagaagggaagaaccaaaacaataatgggacgaggggggggggggggaaggcattcgaaggtggggaaatgggtcggcggaaggaagcaattgtggtgggatgacagaaaagcgatccatgggatcaattgaatgattgaagacaaaaacacttatcatgcacagtaatttatagttacggtatgattcaagaaaagggaactggtcatttatacagaatatagggaacaaaacgcgtagaaagaaaattctccagaacgtgccttagatcccggttcgtgccaacggcgagttggccgcggcgagttgggcggttccccttttatttttatatttttacatattctcggattttctatatatcaatatgtatatttttctcatattttgagcttcttcttcttttgattttttgtacatatttcgcaatttttgaggatttaaagtaaatttttcttaaatgcccaaataaaacccgcaatttttacctattccgtctcggtcacttttccaaaatcttcgggattgatcgggatcccaactctgacccctccgaccccagtttgtccagtctctacttttcaaggaggcaacgttccatctcgtgctccgttttctgggcgtgatgcaaatccatgtcaagacgttcaccaccgggaggaccatacccgcgatgacacacaccatcatggacatgaaagtcaaggtcatgcaaaagacctgtttcccaattgaccaacaaaatttgtacgatgcacccaatggaggtacaactactgtacttggtatgccgagattgtgttttacaaatattttacggagtcgtcttttggactggcgaactttggctgacagcggcgtggttgctggcacgcacctttatttgattaacgacacgcagccgtttacgaacaggtgacgggcggcccgccgcttcgttagaagaatgagttgatctcttttttggataaacaaattgatctgatcttttttaatgctcatttttttatgtttcgtttctctcaatcgcctcaaatacacgcagtcgtacaacgaggcgcgcataatatgcaaacggttgatcaaggtggacggcaaagtgcgcagtgagatacgctttccatgtggcataatgggtttgtggcatggagtcagtagaatggaattttaaattgtggagggtcaaattcctaaaaaaaacaataccgatagtattgcataagcctgactagctttttttcaaaccaagtggcaaactgagcctttgttaagtacagtatgcccagctgactgataaatggtatacagtatgtccacagaggagttattgtatgtcccattacgtgggtactttttcattacagtttgtgttccgatacggttgttattccctgctgcacagcgctacagtaaccaaaccaactaatctttgtgcaaaaaatattgataaaaccattaataatgaggtttatttggaaacctgctggcatcttccgccgggttgtccgatgggcctttgtcattgcactataccaactagggatggcattccgaggtctcaaaaattttcggaaatcggaattccgaccccaaaaacgtcgacaatcgggggccgtagtcaaagaaggtggttatgtaaaataaccactgccatcatggtttacccgtagcaaatgagcaaccacgggttcatggtcatctaacgccccggaagtaggaaatgggaaatttttgaaaaataaagattaatttacctaattttcaaaatattttaataggctaaattttaaattcttaaccaagtaaaaggtgatttcaaaaaagtttttggtatttttctatatttgcttgaaaaaattactcaatgattttcatcaaaatcttttacatatgtcattttctattgttttagaacatttttgggaaagggactccatatcttttttgcggtgcgcttttttcaaagaaaatttggtactgggggggggggtgtcctgaggtgccgataggcgccgccggcgggaaagttttgaaaattccagtgcaattttttaacagaattgtagaaaattatcaattttttggaaaaaaatttactaaaaaatttccgactttctatcaaaaaattcggaattccgacatccataattttttcggaaaccggaattccgtgccatccctggtacatacatactgtagggttaacaaaaaattgaaaattttggcgttatgtcttcaagtttttcttgacactatgggtcaagcccagtgttagacaaaagggaccaggtcgttttggcgccgacgttttggcgccgacgatttggcgccgacgttttggcgccgacgttttggcgccaagccaaaaatgaaaaaaaaggcaggaagaaattgtaaaaattataaaaaaaatgaaatttttcgttaaatataataaatttaacaaaatgaagaaatggaaacaaaaaatgaaatttttcgttaaatataataaacttaacaaaaaaaaaaaaaatggaaacaatttatgggttcatatgataattgcgcgaaattccacggagaaattctaaaataatgaggcgctcatcagccgcttggtatttcttagctttccgcggtggctcaagtccagcaagaaatgacgcatacttcccatcggtgcccttctgctcacggcggagaacgtcaatgaagtgccagatcgatggatgacggcagttgaaggcgccttgaagacggtgatgttctgcctctgcgtggttgttcgtcctttcttccccattcagtgtgcgagtgtagacgttccactgctctggtgggaagagtggttgagaccaagttccatttggccggggttgtccaatgtaattgttgagcaacctaaaaattgcacagaaattgaatgcatctgaataatataaccaaccagtcaatgagcggacggagtgcagccacgttcccgaactccgtgtctaatgcgatgactgcttataacgatt

SEQ ID NO: 10846 - DNA, 5135 bp, Heterodera glycines
gtaaggaatcgatgaaagtagtggtatttctctggcgcctggcggctcccacttatgctacacctctcatgattcttcacaaagtcagcctagagtcaagctcaacagggtcttctttccccgctaacttttccaagcccgttcccttggctgtggtttcgctagatagtagatagggacagtgggaatatcgttgctccattcgtgcgcgtcggtggttacccgccgaggcatttggctcccttaagagagtcatagttactgccgccgcttacccgcgcttaatcaagtttccttggcttaacaatcagagccttgggcagtgctcagtcacggtcagattaacacacacgagtgcatatattgtttcttctgggtttttaaggtcgttaatcacgcatctgtcatgtattttgaataatttctaatccctaacccgaactggaataaaaatcgaaattttgaatttttcataattatgattttttgttcaaatttagattaggaaatcggaattgatcaaaataattgaaggattcgtgatcggggaccccaaaaaccccagagaataaatttttatgactatcacaaaaaaaattttgcaaaacaaaagggtccccccttttgaaaaaattttcaaaaagggtaactttcaatatagcgccaaaaattgctatttataaacaaattataaagccataatttcgaaaaggagcttgtaaatttgagaaattagggcagggtcccgacaaaattcagggcttgaattaagttaaaacctatcagtcatttcgtccggaattctggcaagcaccttgcacagtgaaacagctctgaattaaaatgaacaataaaggctttatatttttacaaaaacctcattgacaaatattgaaattctgcaatgtgtgcaaattgtggcagttccagctcttctgtggccgcgtttgcatgcattcgaaggtacgattcctgcacattagttcctgcaacgcccgactcgatcagcaaaagttttgagaaatcataaagaaaggagggagaagcacggtcaatttgacgaaagacttcttgtaaatgcttaagtggtagaatataaagaaatcagttaaagatcctattcaaccaagaattaactcacatttaaagcatgtatggcttcacgattctattattggtaaatttttattatgaacaacatttgtatgtactttttaacctcagataaagcagttttcaaccgatctatcgaagttttgatgagacaggaatatgtccatggtgccaaataattaacgccttcctcatttccaaaaatgatgtcgttgttgctcattgacacattaaacagaatttagactttaaaataaaggcagttaggtaatgaatattatacactgtgtaacattagaataaggacaccctattttttgggagtttggtcacttcccatgaaccaatcgagttgaaattttaaaaagcagaaactcaggttgtactggatttgttttaatttgtttgccactaatttttagactcaaaagaatgccaaccactcaatgtttgaaatgttctaatggagatggtagcttttttcaactggaaaatacaaaagttgcaggatattgtctacaatgtttttcgaaaatgattagacagaaatttgctttttgtcttggcaaaaatcgcgtgtttaaagaccaacaaagggtaagtcgaattttgggcattagcaaatcgtttttgaattttattagaaaccaaaggaggatggtcgggttagggattaggaattagtcaaaatgggtgtcagatgcgtaatcacgacccggaaaacccacgggagcaaagtttcacgacttattatgtatcacaaaaaaaatttgcaaactaaaaggattaccccgttggtttttaatactattcaataaattggtttttaatactattcaataaatcatcgattacaatattagtgccgtgtttttactccttattcaaattttagcgtgatgttttaattgtttgttattcaaatgatattaaatcgcttcaattgcttcggttggtacgtgaggcaacaactgaccaaaatgtacacaaaagactacggttgaaagcacaggtaaaagcccttttaaaattcaaaataggtagttaacttaagattttgtacctttcaaatgccatttcattgtttaatttgactcaagacgccgaaaattgtcgattgtatatcacaaactttaccaaataattggatttggcattttgcacatgaatcagatattctcaatgaagacttcagaaacaaagaccaggtttttattaaatctgtatgcttctaaaaatgttagaatgataaaacaactaaacaaattgttcacggaaatcctaagaaattcactgctgcgatacaatgagttatttgcgttgtgtctatcaaattctgatcggaatgagttcaaacgactgcttcgtacgaaactgatatattggtaataaaaatcggacacaaataattaaaacatttattgcagtctttccgaaatggagttccattgttctacagttttgttgccagacactgccgatgagttagctaatgacgtacttaatgccctctgttttggtagaggtgcctatttttcttattactaatagcacaaggacatcattttaacacatttccagttgcttccttgtcacatatggcttcaatgttggatgatcgcttcaaacctatccaaatcgttcgtccctttcgcgacatttcctctcgcgagttagaagcaatgcataacattgagcgggatgaatgcagtgaacccgtcttggcgtcttgcagaaaagagagtggtgatgtgtagttaaatgcatccggtaacaattaatatatgacaatgtttagttgatgagtctaattgtaagaataaatgtgacggcagtcttcaagcgcttactgaggattttatatcggaacttcgcaccggtggattcccagcgacggtattagtataactatatcagtaagacacttccattttctttttaaatattgcaggtatcgactattttaagcgtctcgataaaaattgacaatagaacagtgggtcggaattgtggactttgttacgaacaattcgaaattggtctctcactttaacagtcccaattaaaatttattgcttttagatgaatattctgatgacgattggaaaacaactcatacatggaacgaaaaaatttgccaaatttgctctcaattgattgcgggctctggtccaaaattcaaggaaagcattcaatgcatcatttcagctttgttgtaatttttttttgtttcctcacattgttggaatacaataaagcaaaacttatgaagctaggcaactgtacagacactttcgcctaattgtaagccaaaaatctatccaaattttgtttgattttcaaaaataacacaatagattaaattaaagacttgtgcaaaaataaagcaaattgatttaatgttttattttcaatatgatacaaaatcgattaaacggttacaattgaaaattagaccaaatgatgaaaattattggaacaaaataagaccggatagaaaaagctcattgtagatcaaaaatttgcatagtcactgatctcactatgataggttggttcagtgcactgctccatttatgccagtcacgttccccgggttgttgcgagccaagttaaaccttaaacagtgacatgcacaacaatggtattgaaggaaagaattgctgctgttacattgagtaggctgactccatagttatctcacgctcaatttcgagaaaatcgggcaaacgcggctcaggatcaccaatagggcgcgtggtatatgtctggaaagttaatcgagctataaaaacatttttaacaatgttttttgtctataaaatatggcaaatatttaattgcctcgaggatcatcagctggttttcattgtacatcaacgctggaggaagaggtgcaatgtaaatgtccaggttaaaatactgggaaaggaaaagcatattcttttagcaatctagtgacttttgaaggtatccgatttaccacatttccgaagacaaaacacacacgtttcttgtgaattgattgacggcttctgtcaagaagtttcaagtagctctgatactcgcgcctgtccaactgcttccgtgtttcaaccggttggggaagtctatatttgcaaaagagaattttttttaaaggcgaagattacttcttgccatcagcgtcttcaaaggttcgggtcgtaagtgtgtacgtgtactttccattttggctacgcgagcgaagtcgaacctgcaaagataaacttgtagcccaggtgtagcacaaagggatggggacctacagtttccatgttttctggtaaaaatgcgcgaaaaatttaaacgataatgagaaacgcaaaacgattccagaaatgaaaattgtcaaagaaaatggtgacataaatttcacgctgtaataagtaaaatttacctgacttgaaccctccgtactgagataatcatcctcgattaaaaattcctccttcttcatttgcaagaaggcatgtcaacgattttgctgaccaaccatttgcggttccttggaattttagatttatggaaaccaaatttattataaaattcacttgctatttgaagccaaacgatccaaaatcggaatgtcaagacgctcacaaacatcagcaataagtttggagatcttttcttcaaacgaacaacagtttgaattatcgattattgatagacattgatgcccaatccatgccttaatttcggcattggatgctaataaaataataaaaatacttctctggtgtttttgtcaagctcaattgcttcctccattgcttcggttcgggcttggttattcgcaagttgataaaatgattgtgcaccatccgcagcggtgacgagatgataaatcttattgttagaaatggatattatttgtaaataatgagcgaaaatgtctcacttggtggtatctttcacgcaattgatcgttgttcacgccacattccaccaatacatttgaccaagattcctcgtcggtataagcacgtccatccatcgca

SEQ ID NO: 10847 - DNA, 1263 bp, Heterodera glycines
tgagcccatggtttgggtccttccaaatcccaaattcacgtgttgtttatccgtgtccaattggtttgacatcccaaatcccaaatccacgtgttgctgatccattccgattaggccagcggatgccgagcccatggattgggtccttccaaatcccaaattcacgtgttgtttatccatgccaatttgtccggcggatgctgagcccatggtttgggtccttccaaatcccaaatccatgagttgtttatccgtgtcgaattggtttgaccttccaaatcccaaatccacgtgttgctgatccattccgattaggccagcggatgccgagcccatggatttgatcctttcaaatgctaaattcatgtgccgttgatccgttccgaattggtttgaccttccaaatcccaaatccacgtgttgctgatccattccgattaggccagcggatgccgagcccatggatttggtcctttcaaatgctaaattcatgtgccgttgatccgttccaaattggtttgaccttccaaatcccaaatccacgtgttgctgatccattccgattaggccagcggatgccgagcccatggattgggtcctttcaaatgctaaattcatgtgccgttgatcatctgctaaaattttgctccaaaaatcagtcggccattcgcttgtcgaccctttgtccccatcaattgtcattattttttcatattcatcgacgcccccgcaaagttgggcaaattgaaaaagcattttgaataacacaaaaaatggcatcattgccgaaactgacgaaggcattcaaaaattggagaaaaaatattggaaaataatgaaaatttatggaaaacattccttttttatatcacccgagacataaaaaacataatatttttatgaaaaaaaccacgtttattccttcgtcatgtgtggaaacgtcgaaataaaaaataaataattaaatatgaaatgggctgactgaaatttatgttttgcaaaaaatgcgcaaaaagaaatttaaaaaaaaaattcgattttaaaataattgtttaaaaaatgtaaattattaaccgaaaaatagcggaaagcaaaatacaatcaactttctggtcttattttgacaaatgataagaaaattatgaacagaaatgaacaaaaaatcaggaaaagcagaaaaaaataattttcaaaaaaacccatgccgaggcattcattttcctatttttttaaaccatttttaacaatttttttgtttttttt

SEQ ID NO: 10848 - DNA, 1796 bp, Heterodera glycines
attagttttttaattaattctttttgaatatttttttctgcttttaccttttttctctgtatgttttaccgcgtcatcaaatgcgtattcaaaatgcttattgacagcggaacagtgccaaatgctgcgccaaaaatgattttaatcgctggcggctcaactggtcttaattttattttaaaaaattaatttttttatcattttaattttatatatatatcacaagtgtctaaacaaattattggattggtaaatttttaaaaattgtcaattaaaatttaagaattttcaaaaatatttccgaattaattgccgccatttgccaatctttgaaaaatttttcggcattttcattatttttatattttttgaattatggaaaaaccccaaacgagcactctcttcaaatccatgaccaaactgggcccacccttttttaattggctttcggttgccttaaaatgccaccgaattggcactttttgccttttgaaccattgaatttgattttttcgaattattttttacgatgcgttttttctattattttttgctaaattctcttcaaagagtcacaggaacgtggtgctctgaacacatgcgaactgttctcaattcccgacctttgtcctcagcccaattccccgccaatgaattcggcacgacgcgcgccggcacttttccaatttaaaaaagtaattagcaccattttcggcaactgaaatgatcaattaaatattcattcccccattgatttgtttgttcagaatgtttttgcggtcggtggttgttctggcccgggacaacatttggccaacgccgaatctgtccaatttgacggtcattaaattttaggcaaattaaattgccaaattcaggtaaaagcctgacagaatggaaaacatacgaatttgaagtgccaaatgctttttcctgcgcctcgttttgccaatttttggtcattagctaatgaatacactaattaatgctcaattaagccattcgtttttgcttctgttaaaggatggcaccgcctttgcgttcggtggctttgatggtgtccaatgctcgcgtcagtcgctgtgcatccgccccctcctacagtctctccctccaccgtaccctacagtattccaaccagagaatccgctaccgtatgctctgaaaaacggtgtcgccatcgcagtggcagaagaaggccaatggcatgaggaggaaagacaacgacgcatttggctggtgggcggttgggacggacatcggacattgaaaacggtgaaaatcaaatcaaataaaaaggcaataattatacataattaagtgttaattagtagttattgattacataattaattaaatggttttccttaagctgttcgaatattctttgcccgggggcgactgttcgctgattggtcttttgccctgtaaaataaatcccctcaggtgatttcctcattttaaaatgctttttcagacccaatcgaaggccattccgtagcaaagtcttcgctggtggccccccaaaaggcattcatttcgggcggattcgatggcattagggttggaaaatgaaaatcaaaaaagatttgtatttttgcatattttaaatttacaaaataaaattttattcgaaatcttttatttgccattgtcacttttgttttcttatttttagctccgttccgattttctcacgatcgatttgcagtccggcactgttcagcatttggccggggttgggctgagaacggcaagagagaatcactgctcagtgattttcggcgaggccaagg

SEQ ID NO: 10849 - DNA, 1448 bp, Heterodera glycines
  unsure (1)..(1448): unsure at all n locations
cccccccccccccccccgattttcgggctctaaattttctctggaataaatttgaaaaatataaaccttatgggagaaaaatgtactttntcgccataagattggtttgtanaattttaaggtcataaagagccaaataaagcccgcgacgaagaaagtgcgtctcaccgttccgcagatgaccacagccttgggaagctgttcggtggtgagcggtggttcaacagtcatcacgcctgaggaagtccgacggcgacttatggtggtcagttgtgggatgccaaatggaacaaacaatcaaatcattgcaacttaattgatttgtaggaaaaaaggaacgttcggagggaaaaactgcgggtcaaagggcaacagaacgcggtgcgcagggggcgccaacagaaccaggaactgatcagagagtacgcgggatgggaccaatattgacgacggactcactcatttccatttgttgattattttgtttttttcttaattgctgaatgtcttggaattttatctttttgtcgtggacaaaagtaaacagtgaaatgatggctaatttttgaacgaccattcaaagggaatggaagagaattgtctgctgctaattttatcggaagcattccaaaatttttgcaaatattttgcttcacttttttgccgtaaaaaatgaaatttcgaatgcaaaatattttagattttatttgttctaattaactatattaattgttgctattaaccgtttattctaatggagaatggcaatggaattgaaaagcgaggattggtcgttgaggacggtgacggagtggggcactttcatttcccttttctgtattttgagatgctttgtccttcctttagcaccccctttcgctttttgccgtgccgaattgttattgtgcggacttggattcggtgctcattccaaacggaatgattcacgacagaattcgacgaatggccgacgaaattcaaagcgcaattggcgacagagtttcttttaaaccaaatttgaattttgcgcctttttggcgttttgttcagcctctgactttggtctgtttgctaaagggcgcctaccgatttttcaccgctttggccgactgtttggcccaacttcggctctgttgcgcatctccgatgcaggaaaaggaccttctcatccccccatcccaaaatccccgctgatttgatcatttatttagaattttcccgaattttcgaatgtccctcgtcgtttttccgaatttttcctttttttcatttcacttctctcctcccctcaaatgactctcttctcccaaaaataatcggcccaatgcgtttcccttttttagatcgaattcattcgggcgcaaagctatttggaccaatcgtccacaggccaattgcgcagcgaaggtcgttcgtccattgacggaccgttgcggggggcggaagtg

SEQ ID NO: 10850 - DNA, 2540 bp, Heterodera glycines
aggaaacgcatgagtttggtttgttgggagtgtattgaatgaatgggcattgttcgaggagggggggggggggggggctaatgattgaacaaacaaatcatcgaattaatatgcaattagtcaaatgcaataaaaagaaaaaataattacattgtaaataaacatggaaattaatgggagggaaattgccataaatgacaatatttcactaattattttaattttaaaaataaaataagtaaaaaagagacaaaacttcgtcaatcactgttctgttccaaaaggggcgggcggaaaatgcgcaaagacagcgacggggcgagaagaaactgcccccggcggggggggggggaggggggaggcgtcgccggagggtttggcgccacgccctccggggattccctgccgcccattgcttttccgccgctgacagacgacccctcccccaaactgccaaactgttccgtctcggtgttcagtttaactcattttgtaaattcatttccggcacaccttttgtcctcccttccatttttcattttagtgagtgtccattccgtcttccgtccgtccgtcctcttcctcctccgttggcctttcttccttcccatgtttctcttccttctcccttttcccttctctctcctcgtgtcccctcttttccgcttcttcgtctccgtttggcccttcctccgacgcatttctccgcctttgtttttccttttgctcaatggcattgtgcccgttttgtcctccccttcctccgccgccatttcaaaattgacttcctccgcattttcatccgtgctcgacaacggtgtcattggtgtgggaaaagaaacacgagcattatttatttctttccaaaacaaaaaattcatcgctttatttgatgacattaaataccaaaaaaagaggcaaaatgagacgattaatttgggaatttaaaggtgacccgcaggtggactgtttggaagaccgcgtccgattgaccttccgaacgcagcgaccgttcacaggacgtaaaagcgatgagaaaagggagagaattggcagaatttattaaaaatgattaaggaatatttgtgaagggaatggtggagaacgacaaatgcgtgaacaattaccaacagaagggccaaacgaaggtgaaaaggcaaaagcaatactcaattaatgggggtggtaattggctaattcactcctaattaatctaattaatgagttcctaattaattaccccccccctctttttgcttgcttccattccccgcttttccttctcctcaggtggacttcgaattgaccaatggccagtgcaatatgcgccgctccagaaaggttgtttgattacgccgtgactagagaatgtttggcacttatcttttctgaaaaagatggcttaattctattaagccattcattaattgctttttcttttttttcttttccaattttggcattttctgaaactttcggatgttttttggaaagcatttgaacttttttttactacaataatatttacaaattgtttctcctccttaaaaataatcaggtcaccgccccaaccaaaaatagagagaattttgaatcggacgggcaacccaaagaaagaaatgaccacccaaaactcaccaaacatttatttctcttctcactttcaagtgccgaattctctctcgccttttgagaagaataaagcgaacagaaaaaaagaccttatgggaaaataaaaaaaaaagtttgaaaattcgggggggggggatttgggatttggtaagtccaatttgccattaattattgctttgaaccgtcacattttctgctgcttgacaaggtcacacaacaacagctgcaaattcatggcaaactgctgattatatatgtttttgtcttttttgtaatgagttgttttgagaaaggaaaggcgccccggggggagggaatggcgccggggggcttttgccaattctaatggatcggttcatcaaacccagcagaagtgccacttcgtatttcggcccttcaatttccgattgtccttttcagctcggccctgaacagcggggcgtggaacagtccgtcaccataatcatttcctttcacgacattttcatcacaaaggtcgatcgggcgtaccgttgcacctgcttttacatggtttagccaaacgaacattcaaatggcaaaggcttttcttttctcgcaggaagccgacaaagtggtgacgaaccgtttcgatgtgaggtaaaacgagtaaaagatcaatgcacataaaaagtgaattgaatgccgtcctttacgcagtatgatgccaacaacggaattggtggacaccgcgcgaatgccaatgtgcacttacaccgtacgcattcccactctctttggagttgctgttttaaatggggacggtcttcagaaacggaatttcccatgccaatttttggatttgtcctcatgccatttatgattagcttcggctttatcctccatgcttttctgctgtcttttgttttgaactgtgcatttgaccccaa

SEQ ID NO: 10851 - DNA, 1748 bp, Heterodera glycines
  unsure (1)..(1748): unsure at all n locations
cagtcagtccaacttggcctactcgaaagtggatgtgtcaaatttgcggacaaagtgaccacttattttcaggtgcgcaaatattccttaattgtttttaattgcgtttttcttttgacttagtgcgccgtctcaacttgtatgatttccgagggaatgtgttccggaaaaacagtgcctttttcgctttgtaaatgccaattttgcgttttttttaagccgccccgttgcggttcgggcgcgcgaagacggcgcaccattgacaaaaggaatgaaaatggcggggccaatggcacggcatttcctttcgctgccgacgaccctttcacaatggtgccaatgaaaaagcactcgcatttctttataagcagcagtgaaactcatttttattggaaaggatttggcagctgagaaaattgttgttttggatttggaagattcgacgcaaaaggaggaaaatcagcgcagtgaaagggccaaaggacggagtgagtgaatttggggggggggggggggggagtttgngacggagacaattccaaaacgatgggaaaaacgaaaaaaggcgaaggaaagtgataatctggggggtcaccattgacagttcatttccatgccatttgtcgtgccctttaagctgcgcttgccgctgcttctcgccttggccttcctcaatcgcctcagttcggttggttttccaacatttggacaaataaactttctgttttggataacatttttcccctttgacattggcatttttcatttcttccatagctttgctctatgacaattcggtcgtttgtctgagtcagccattcgttggtgttttgctctccaccgtggcattggctgtgattggcatggccattgcgtcggcacttttattacgccaccaacggaggaaatcaaaattggaaagcgatttttgaaaattcaatcaaataatttatttgtaaattatgcatttaaaattttaaacgtggaagaaaggcaccgttcgagaaaaagacatgaaaaaggcaaaaacgttaaaaaaaggcaccaaaattacaaaaaggcaaaagtttttactattaagcttcgaaataagtttgcaactcatttttcatgcgtattaggccatagaagttagcaaaatgccttaatccgcgctctacatactaaaaagtcaattttttaaatttaaatattttattttttgacgtaatgtttttgtaattttttgtttgtttgtttagctcctgtcctgcattttttaggcaaacaaccgggatccgggtcgcattttgatcatttcttaacaaattttcaatcaaaattattcagttttatgtaaaatacaattcttatcagtgtgtttttaccagggatggcagatctgaggctttagcctcattttgtggttttttgacaggtcaatgaggctaaattttcaaaatgaggctttgaggctttttgtggttttttgagaaaaaccgcaaaataaagaatttttaatgaaaatatggtcaaaattcttaatttttcccccggcggcgcctatcggcaccaccggaccgtaaaaatccttaatttacaagcaaaaatttgctcaaaatcgcaaaatttggtcatttttcggacaaaatctgttaacaaatcgcattgaaaattacaaagtgttttcccggggggcgcctattcgggaccggcggcccccccttggttccccaaaagtttttttggaaaaagcggccgcaaaaaaa

SEQ ID NO: 10852 - DNA, 4414 bp, Heterodera glycines
  unsure (1)..(4414): unsure at all n locations
tccctaaatttgaaactttttgacacctattttctcatttttagcaattattttgggggttttttagaacctaaaaattaactattttggcaattttagcacctaaaaatataagcccaattgatggttttgaaactcaggctgagtttatagtcaaaaattaatttgaaagtcaggatggttatttttgggttttattgtatttttaaaagatggaaaccaaatatatgtcaattaaataaaaattaaaaaatcataatccgcataacattctgtcaattattagccaatataatttgtaaaattttttttttattaccctaaagtgcactttataaaaatggatttatataaaaatcaatcaaatgcacttttcaaatattcaatcattcgttcaaaatcacattgtatctatatttttttatttaaaaaaatcgcacattattaaaaacgtaaatcataaatttttgtattattttttaaataaaataattaaattttccaacatttttaataaatttaaaattaagaaagaaaaaaaatgttcattttctgttttactctctgctgtttggtcagtttggcatttggcacactgctaaatgtgggcattgaaaatgtgccggaccaaattgtgatcaacgccaatcaattaacgccattaacataccatttgcttaaaattttggaaaatttgatgggcattgtgccaaaacgccatagttctatcaatttccgaattattccagcagttgacataccccttgtcgaaatggtgtacagcggtcgactgaatgtgcaaaaaattttgggagaaattgcggaaaattttgaaaaaaatgctgatttggcacaaattttcgagcattttttgatgtttgctgatggatattaccaacccgtacaaacaggtgatgtgaaccatcataaacaggaggagaatgcatcgcgaccaagggagttggaattccattacattttgttagaagcctagtttcaaccctataaagtcccttcaacactttatttattactttttggctcatttaaaatatttcctggaatagagccacccctcctgaaataaagcccccgttttgatcgggagggggggggggtctattttaggaaaaatgttacattaattttttttttaataaaataataaaagtaatcaataaatgttttttgaaacggtgaaaattgtcgtttttaaatacgcggtacgcaaatgctcgattcgtggcagtggaatttctgtccacgctccacccttaacataaaataaatttaattttttaatttttttaggaaatgctgaaaaaaagaaagcagaatttttattatattgtatttattcatttgtgaataaaattacacaaaaatgtttgcaattttttgacaatgatcctttggaggcaacaaagctttgggctgacattagtaaaaggcaaaaactttaataaaaaattaattaattaattaagtttaagctttatttctcaagtaacgcccgttccccactcaaaacttcgtgcagttttttcccaattttgcattggccaatcagatggatttaagccagttttgggtgaatggacaactaattgggctacaaataatttcaatcaaaatttggatcaaaaaattcatatcaaattttcgacaggtaatttattttatttattaattattacgttggtaaatattttttaagaagtgatgactctcaattatatcaaatctgacgaaaacaaggcggtgaaaataattttgatcactcgtcatcgcgtaaaattaaattttaaaaatttccaaattaaattttcttaaaatttagagaggctttacgtttcggaagaaaaagaaatttttcaatttagtcattgatgggacgggtaaccaccacatttgatacacaaaaataaattgtgtgctgctttcttcattttcatatttttaagaaattgtcaacacagatggtgggatatttttgacaaaaattgataaactttggcctcaaagaacattcaaaaagtaaatttttaattatttttttttgaaaaaataaattttaatttagaaaacgaattttttgtggcgctttaaatgttagtgccgcgaaaattcaagaaattttggaccaacttgcagcatcaacagaatatgcatataattcaattaaatcgccggatggaaacaatgcttttactaaaatgttgatgcataagttagcgtctgttgccggtgatcatcagttgaacataagccaaattcaatggttttctgggaaaaagttggtaccgaattttgccagatgcaaaatttaaatgtatttattgtaacgattacttttatgtaccgtatttcataaaatagaacccaatccttgctaaattaaaacaaagccccccttccgcgagcggggttgaaaattgagcctcaacccttaaattagacccccctgaaattaaaccgccgctccccttccgaggggggttgaaaataaagcccccaggggttctataaaagaaatcccccagtggtctattttttaaatactgtatgtaatttgtttaagtgatcaattttttgcttcttcttttatttctcatgttttttccgggttatttgaaatccaatactcgcagtcgattttctcgattagatacacgaaaacccgctgttttaaagacctgagatattcctttcacaagaatgtatttatgtttaattgtttttcttactttttttccattcaaaccttaattgggtaacaacaaaacttataataggaatttcttactaaaaaacagtattaaagaaagaaaaaaatattttttttactcgaatatagaataaaaatacgtattatcagactttaaggaatgctgaaagtttataagtttatatgaatttttggcttatatactttatccgttgtatgttttccattatattatcctaaagtatatatttggttatttgtatatattttgtcgttgcaattttatactttttttattttatattgttttagtcgtaaaaagctttagccgtaagtaaattcctttttttcaactgagaaaagaacaacttatgtttggcgtgggtgtgtagcacttagcaaaagcacataaattaaaatgtgctcattaagtcgcattgaaaagaatacatttttttgtgagtgggcataaaaattgtcctaacgttcaattgaaagccggtctctggatgctttaaaaatgaacaatttagattgttaaaaaaaaaataaataaaattattttctcaaaaatttaatttattcttttgggtaattaggcatggcccggggataaaagccgaaaagttatgtgcataatcaacagttttttacttttttaatctggaatggcacggcaaatggaaaagtaccctcaaaaagaggttacgtcaatgctttttcccccgcacaactatgtatttaccaaactacatcacaattagttgaataaatagaaaaacgattaaaaaatgtgactttttgtccaatttatttgtttacattttggccgtataaagtgtaaagatgaaaaacttttttttttcattggtcgagacatttttaaacagacttttgcttaacagaatgaagcaataaaaaaaatgtttcctgtcccgacaaattgaagatttgtataagaggaaaatttaattactaaatttttaagatttttgaaatattataatagaacgcaattagctaatctgtctctattatctttcaaataaatccaaaagaacaaattcaaaagaatgaatttttgtgtttaactaattgcaacatttgtaaaaattgtctaaattgcttaattttttgattgtcatgcatttttaaggattatttaatttctttagttaaaaaattacacaataaagtccaaatttcttaattatagaatttatgaaaaaataattatatggtaattatcctttcacaaaaatttatgtatttaatgcgaaaatttttacagaagggatccattttaatagctaaaaaaaatttatgcgtggaaaaaatttaaattatgtaaaaggataaattatttttcaattttttaatgccatttttgtatagccatagcaatttttttgataagattttttggcacaatttttttcaagctttcaactaacccaaattctcagattattattaatagttttttattacctaaagttaaaaggataaaatatttttctatgcctttttttctataacagtagccgtttttagtcagctttttggtacaaaaataatttttaaaaactttnaactaatcccaaattntcaaattaanatattcatcgttttttttaattttcaataaaaaagatatttatatttgggcagtgcacaaaaaaattt

SEQ ID NO: 10853 - DNA, 4254 bp, Heterodera glycines
  unsure (1)..(4254): unsure at all n locations
aaatctcaaggctcttaaaaaggattttgctgtcctcggacggtcgtcgggcaatggaaatggcaaagatttgtcatccatctgtacagatagtttcggttctggtcctttgtccttgctaatttcgatagttctccaaatagtcaattcgctttttccatcgaaatgtttgtccaccaacgcattgaaacgtggcgaaagaagtgccattttgaggccaagttgaggacggtcaaaagaggggaaaatgtccatccaaacatcgttgcaaatccaactgaaattatggaaaaacagtttagttaaataaatgacgaatttgtgtgacttttaaaattcattaccgtcggttcatttttgaggcaattagcacaatttggccaaattctgaatgatgtcaaacaaaagaacagaataataattcgttggaaactttatttttttaatgagtcaaagcggaaaacaaaagatttttatagtcatgaaaagggaattggtgaatattttttgtatatgaatagagagagctctgatttttttagatttttcctattttttacggattgtacttgatgaaagaaacacgaaaatcacattttattaaaacaatttttgaagttttttgccttaaatggggttggacaatgtttaaatgggaaacgaaaaatcattgacaaaaacggaagtgaaggaaacattttggcataaaatgaccgattggaagaggaagaaaaagggaacgcaacataagaggacccatcaaacaggagaatattttgcaaaattatgaccatttgccgggcgttttaccctaccctccaccaacaaatcaatcaaataaatcaatttgacggataatttttcatttgtaaaggttaaatccgcccttttcaaattttgaaaattggcaaacgttatgattagggatggtaattatatggaaatccatatttttttcctggaatgtgggaggcctgaaacgcacgaaaaacatgtttttagcttggtttgaagctaagatggatttctatatccatattttccatattttgcgatttatgtccatattttggcattttcccaaaaaaaacctctattagaacggcccccagcagctaaattagcctttttgagcccaaaacccgaaaaatttttcaaaaaatcattttttcgccaaaatttctcgagaatattgaataaatttaaattttcctaaaaattggttaatttatgtgaaagataagcaaaaaatggaaaatttcggttttttggtcgggtttttttgaaaatttacccctcaatttagaaaaatttatgtccatatttttgccattttatgtccatattttgagatttttaccattttatgtccatatttcgcgatttttagtccatattttatggccatatttcgcgattttatatccatatttttaccatccctagttatgaaaaagtcaaactatctaaacgattaaaatggaaaatcatacataattcgtgctatgccaactcgtaaggctccctgatgtttcgtcactgaaataaaaaaaataaaaataaacactatgccatatacttaataaaatttttgaacaaaaaagcattaaatttgtgttaagtggtgtgatatttcacatacataacacaccatcccgaaaatgagctcttgtaagagtttttggaaattggcaacaatttgaaaattttggtatcattcgaaagcaattgatgagaagaagctttttctcattaaatgctaaccgattggatgagttagaaaaaagatatgggcgttcgaaaattagttttttgaataaattttcaatgggtcttgtcccgcaggtttttgaatccggcaaagagttgttacaaattgttgtgttgcagataaatggactttcttaaggccttttcacataatcccgttgaccgttacattatagtaatcggatacaatgtgctgccagcgaccaaatctttaaacattcgcttaacaaatgcttaacactgggggtacttccttgttttgctacgcctccctccccaaaatattttaaaaaatcacagatattttgtccagtctatgaccaggtatgtaggtatcagcagatgtcaaaacaaacgccatattgatgatgatcagtgaccttgaaaagcccaaaaatattaatttttaaaatttttcgaggggggggggggggtagcaaaacaaggagtaccacactgggttaggttcaaggatatattttgtcatccctaaaatttcttgttaccacagtttaacacacttccagaactcaacattagccaagtgtcagaaataacccacaaataaccaccaaaacacgggggaggttaaaggttattctcatgatcgaaccaatttctaaaacaaattaatcggcctacgaatcagaaagttaaatatgtattagactagtgtttttcaaatagattatgtatctatgtatataatttttaatattttttccctttaaaattctttattttatttcagtgacgaaacgttcggccaccaactcgtaaagctcttttttcaaaaaatcaacaaatttggatgacaaatttgtgccatttccattgccggaccgtccgttgcccagcaaaatccgttttaattaccttcggattgagtacttaaaaaacagttttatggcaataaaagcattccttccatttttaggtacgttgatcattccgtcatcgcttttcttcgttccaatcaccaaattttcgacaaaagaggcacctatttatacttgcggattcaatcatcacacaccatggaagagcagccaatttgggatgtttttgttcgtgaaattaaagatggccaacccaagcgattgcgttgcgataattactacgaacaaacggacttagattggatcaacaatttcaaggaggtgtggccataatctcgaaaaatcactgatttttgtttcaaattgtttagcattttcttcgtgccaatgccatttcttccatcagttacgaaattcatttttatgtgcaagtgtcgtcaatgctaatgatgccatttgaatgtgtggtgaacgaatcgacaaaggaaaagctgacattgaccaaagcaaatgaaaataaattggacaaccgatggataatgaaacgatgcaaaattgggaataagaccgcggcggttcagcagcacaaagagggcgattgtaacaatgtgtttttttggctttttgctgacattaattacatttggtgagcaataaaaaaaaggcatttaattttgtttaaataattaaaattttgcttaatttaggccattgtctccgccacccggcccataactttttttctgaaactcggatcaaaaaattcccgctgtgagggcactccgcagaagtgtcctctataatccagtattttttattttttgatcagaccaaatcccggacctgtacagacacggagactcagttaattttttttcccacttcagtaccaggtgaataccacgtcagggtttggtctgagggagggggtgccagcgaacttattgtagagtttaatgagctcgatttttcaaaattttaaaatttcgaaaattttcaaaatttttcgagttaggcctaaaagtaggttttggggtttttgaattttaggattttttaacgaattttcctgggaaaacggagaccactttcaagcaacactttttcgagctctatcgactggtatttttttcggaaaaatttcgattttttcccggaaatagaaaaaaaatttggcctgagcgggacatttgagtcccgggtccataactcgttaggggttgattttatcgaaaaaacgccttagggcaaaattgtagagcttttaaaatgctatcgaatagtgtattatatggccggaaattttcaaaaattttcgagctaggccccctagaaattttcggaaattttttttgggttgaaaatgagggtgaaaaatttttttctgggtatttttaaggtgctgagtacgaatatgatgtctattttaagtttcagaatttttggaattttttanaaattcgaaaatatttggcaattttttggccctcgggattttggcctaatatttgaaattcatacaaatcgaaagggtgatcaattttacagaaataaagccttannaatagataaaaatcangagaattttatggacntttattagaatttctatnctaaaaaaggaaaaaagttattccagaatttc

SEQ ID NO: 10854 - DNA, 1026 bp, Heterodera glycines
agggctttttgtcggggcattgccgctgttcccttcggatggcattttaatcctcctatgcagttaatttccccctgtgatccattcgattccctacgagtaagtgtctctttcgtgggtaaggtacagttcaagcgctactttcaatatcagcagaaccttcaatgaggacttctacgtacgtcaaccgccgctcccatcgtccatcacccgcccgtctgaggcctcgaagctgccttaatagcccaacaaatttagaaacgggcgcgaagcacccgtataagcccaacaaaatttaaaaaacgggcgcaaagcgcccgttcgaggccgcgaagcggcctaaaagtcccagataattttttaaaaattccaaatctccacaaccagagctaatctaggtagcgaagctcccaaagcgcgaagcgctttttcccagctaaatagccgacggtttacgcacccgctagtttatctattatatacggtggctggtcattttgatcatcaaaacacgacggtcggcacaatgttcagcagacgtgccattctttccttctttcttccttccattgttcaggaggaacttagcagcagtgagacaatcattccgtagagaccgagcacctgaacagagcaaaaagaaaattcaaataaatttacccaacagtttcgaaacgaattgggacgactgagcaccgaccgactgaggccacgccagccagccggtttttgggtataaccccattcatacctgttcgaattgaatgaatttgaaatcattcgatagccctaagagttctcaatttccttgtaaatttttgaaaaatttagtttaattccaaaaaagttattgccaaaagacttaggatttgtttttccaaacattttttgaacacaacttttttaaaaacggaaattttttcaatttaaactttagcaaggtttataaagatttttaggcctatcggatgatatcaaatacattcaattcggacaattatgaaaggagttatagtcgaaaaacag

SEQ ID NO: 10855 - DNA, 5404 bp, Heterodera glycines
tcccccccccctttccccgtatatcaaggccttgctataaaattgcctcctcatgcgcttctaaatcattcactttcgcaaatgcctccaagcgaaaatttttcaaatatctcgctagatattaatgatttggaagctcgaccgctgcctgagccccaacaacccgaacaacaacaagctgaattattgattcagattgttgatgttgaggaggctttgcttttcaacgttcatgagggagaagaaagaagagaagaagaagaagaagatgaagaagatgaagaagaagaagaagaagaggattttgtgcaatttgaagaattgatgcgtttacatgccgagtatgtagcgcaaattttcaatgaaattgatgatgatgaaataaacaatgaatgatttttttgaataatcgaagatgaccgaaaaaatggattctgttataagctccgccccttttgctgtaaatttatttgttattccgcttcttcgttcgaatgaggtcattaacatttaaaatattttagcttatgggcggagcctaatttatttatctaagtccaccactaaattttctgtataaaagcacaccgctttgctcactttgttcattcgaacagaagaagaagccgaagaagcaacaacaacaaaaaataaattcggagccatcgactagcgcatccctttgaccaataaaaaaaaatatatttgttgtgtttttttgagtgtttaataaattttttattgttaccattattcaatcttttctcccattaagaattaaatggctaaccgaaatccattttctatcgagtctgtgcatgagatgcgcaataggccaaggaacactcggggagaagtggcccaagtgcgttttgtcccgcttgaacaagtccaacgaccggaccgcgtgttggaaatgcttgttgaacaattgtttgcgcgagtgcttggagatcggccaccgccctccttgattggcttacaattgcacccgcccacgtttgagaatccattcacaattgctcttcggcctcctgaacaaaacaatccggccgcaattgctgactatattcaacgtttgaacgatcaatcagcggcaggaatagacttaacagccgggacaacgcttaccaaagttttggctgtttggccaatgcatgatgatcgaacggaaaatggacgtgaaggtaaaagagaccacaatggatgttcattggatcatttctataggggcgtgttcatgggatcatgaacactccgttgttcacaccgtcaactcactagtccggattcggaatccgaacgacagattgtgcctagcaagagccgttttaattgggttgaaagaccatcgttcgcgccagtaccaaaacacccgagctggacaacaaatgtttaagaattatgttggccaacaacgatttcatgggcctgaagctcgccatctgttacggagagcgggaattaagacgaataaaaatatgtacacgctggatgacgtcagacagcttcagcaatgggttgatgaacgttacgaagaggcacagattcgtctaactgtttttgagaaagagcgacagtatcgaattgtttacaaaggggcgtctggccgtgctgctcgcttcaacctgtgcctattgttggagaacgcccattttcactatgttgggcgtattgaacaactgttccgttgcacgtcctattgcgttgattgtgaaaggcgggtgactcgttggtatcatccgcaagaatgcaaagttgtttgccgcctttgtctacgctacggtgcagactacccttgccaacaacaacaatttgccaacggaaggaacagcaaacatttctgtacacagtgccaattcgttttcccaaatttggactgctacaactatcatttgtccaatcgcgcaccggccaacttggatgggcgaagcgggcgcgcgttccgttcaatctgcgaatggaggcgtgtttgtcgaacatgtggggggatcgtctatatcaatttccaacatgtttgtccaccctcggtccgacaacaacaacaacagcagcagcaacagcaatttgcatcattgtgccaccagtgtgggggacctcatgcggaagatggtccatgttttattcagccaatggatggacgtcgtgtttttgggcaaacacgacgtcaacaaaaacaacaacaacaacagcaacaatcttcagttgaaaactgtttgaatggcaacgatgatgctgccgataaagaagatgataccgatgatgacaatgatgcagaaggcgagtcccagcatggggctggtggtggtggccaccgtcgccaagcttctcaaaaaacaattagatattgtttcttcgatgctgaaacatctcaggacaggccattacaacttcgaacacaaattgcacaaaaacatgttccgcttttgattattgctgaagtgatttgcgagcgctgcattgccgatggaattaccatttacggcggtattggaaagaaggcgaatggttgtgtttgtggcatgccatcagggccacggggccgtctttggtgtagcccgccctttcgtaacgcaccaaatgacgacactgagatgccaacaaacatcacatataatcctagacgtcttttcttccactgctttgaagacgcaaccaaaaacccagtggaccagtttcttgacttcctcatctcaacaggccctcgaaaatcgcacactatttgtttgtctcacaatggtggaaaatacgacatgcatctggttttggaggcactacatcatcgaaatttacccccaaaacgaatctgcacaacggggctaaaaatttactcaatgtcgcttaaaggaaatcttcagcgccaaataacctttaaagacacactcaattttttcttctgtgaacttgacgccctgccaagaacgttcaatttgccaaatgaaattgcaactgccaagccgtttttttccatatttatttattcgccaccaaaatttgaatgttcgcctccaagggctgccaaatgctgtattctatcaaccagaccacatgaaaacggccaaacgcgaacaatttttgagttggtatgcttatgaaggagcagtcgccaaatttcagctcagagaacaacttataatttattgtgcgaatgatgtagctatcctgcgtgaaagtgtgctgaaatttcgccaattgatcatggagaataccatgggcttggatctatttgttattgcatctacgggtgcagcacttgcgttggcaacctttcgacgttgttttctgtctcgcaataaactgatcaacacacctgagggcggttatttacgaggaagacgcgcatcggcagaatccgcacgatacattcgcatgtatgaactgatgaacccgggtgagcacgttcaatcggcgcaatggactgtgggggaagcgcatgttgaggattctggttatcgattggatggattacatgttcgtctacctcctctgcgaaatatagcgattgaatacatgggctgtttttatcatggtagtattaattgcgttaaatgcgtatgaaaaagaataataattctcagggtgtcccaaatgttttccaaacgatcgtcaacaaactttggctggcggtagatctgctgaagagttgtatgaacgtacacaacgccgcctttgggagctagaacacacgcacgggttcgagcttcacgttgtttggggatgtgagttgaagaaaagtttgcgggccaatccagtgcttcggcaaatgtacaatgacgccttcgttcctcgcccgttggatccacgtgaggatgccctgcgtggagggcgcacagagccatttactctccaacacatttgcactaacgatgaggaaattgttctcatcgatattgtttgtcaaacacaacagtgaagcaaacataatagcattttaattcaaggtgagtctctacccttacgtgatgaaggcatttgattttcctgttggaaatcctcgtgtgcttacacgtgaagtgcttttacaacctccggcatctccattaccatggcgaaacgcaaactgcaatacatttcgagggctgctgtttgtttctgttttgccgccagatccggttctaagccctcttcgtatcccgctgctaccatatcggacaaatgatgggcgcctgacttttcctctctgtgctcgttgtgctgataatcgccaacagcgcgcatgtgcacatacagatcatttacgttcttggaacgctgcgtatgaccccccccccccgctcatcgattggtttatacacttaggtacacacatgttgaactaaacaaagcacttgaactcggatataccgtaaccgatctgtttgaggtaactcgataaatttgaaaaaaagttgtaaaaaaaaatataggtttggcattatgatgaatgggatgctgaaatgtttcgtggttatatgaacacatttgtgggcatgaaagttcaagcaagtggatggcctactggttgtgaaagcgaagaacgtcgcgatgactatattgacgagtttgagcgtgccgaaggaatacgactcgaccgtggaaaaattgcaaataatcctggtcttcgaatggttgcggtaacatgccttgagcaatgatcctctatgctaattctactttagaaattgctggcaaattccctttggggcaagtttgcccaacgcgtgggaagaaccgaagttcgttacgcttcatcgccatctgagttccactgtttgctcgacgacccttcgatagaagtactcgactttcatcatgtttcacctcatcttgaccgtgttgttgtgaagacaaaagctgatttttcaaaagcaccagcgaccaactgtttgccgattgcaatttatgttacttcatacgcaagacttcacctttattcctacattgagaaagttgtacaacttggtcataaacttctctattgtggtcagctttttagcttgtttttttacattctagtgattagataccgattctatttattatgttgcaaaaaatggggagcgattggtgcctgaaggagaggctcttggtcaaatgaagcgagagcttcctgaacgtcgaatatatgaatttataagcggtggtccaaaaaattacggttttcgacattgtgatcgccatacccgagcggaagaaaaagcagagctaaaagtcagaagttttcgcctctcatattccactagccagctgctaaattttgaatcaatgaaagacattgttcttgagcactacgatcatgatggacaaatgtgagtgtgttaattagaccttcttacaatattaatctgctgctgattatttttagtgacgacgcactatattagaaggattatgatgacactttcgttttttctggctcatcgcg

SEQ ID NO: 10856 - DNA, 3168 bp, Heterodera glycines
ttgaaaaatttttcatttcttagggatgtatttttgaaaattttcgggtcgcttcttaggggtgtatttttcgtttttattgcatttttgttaataattttgggcaaaacgccaaaataggcaaaaataggttctttcaaaaatttttaggctttttaggcgctaaaaataaaaacctagaaaataggcagtaataactcgaaaagtagcttaacaacagcccaaaaaaacgtttttcgtgcgtttcaggccacggggagctcaggaagaaataggcttttgcctaaaaatgtgagctctactgattactgtccagtttatcaattttcagaaatggctaagtaattaaacttctcagctacatcgaacaagtgctgtctggcgccagtcctcgttttgatatggttgaattttctcaggacggctcttggtctttttgtcaatcacccgacacaatgttagacacggattcggaagacgaagaagctgatacaactgcgtcaccatccactgatgaaggattacaaaagcaaatgccgattgagaagataataattaaatgagggtgactatgcccgtggcaatgaagaagaatatgaggtctttatcgatatttcgaaacccctagttaattaagaagtaaaatccatgaaagaaaattgggatctcaaaaatagtcattttgtggataaaaagcttgaaaaatttcacgggcgaggcaattctgtcctcaaatattttggaaataaagcgaaacattttaagttcaaaatgagtaaaataaaccaagtgttcactttttattggttctggtagtcctatggtgactttatgcactttagaaattctatgaaatttaaaaaaaattctcacctccagctcccgatattttcaataatatttatgcttgttaattggaggatgacggatattattttttcagtttcatcttataatttatacatttattatgagtttgttcgtatgaagctttgttaatttcatctcggcgtgataagaagattgtatcattttatattatttttaactaaataaactttatttagtcggagataaataaaaacaatcaaaaattcgtatttctgattagggatctttgaaataattttttaacttatgtattatcaatattgggtcaacatggtaagaatctttaaaaattattctattttatatttttcttatttatttttgtgtgtttattgacaataaagacgataatcaaaataaataaataaataaataacgaagatgatagggacaaaataacaaaatagtgaagggtgatatctcccaaaaagtgaaaatggcgaaaacggtgaaaggtgtaatttttgttcagcaaatttatttcagagtttttatcgaaagtttcataaataagcacatctctggtaagattttggattcaaaagtaagcataatttgtaaagcgtagttcttattaatgattgctgaccggtcgcgccggagaaggatttggaaatattcactcaatttgtcagcagattttatccaaaaaataacacaaaatactcttccataatacataataatttttgtttagaatcaaaatccttcccaatcatcctctgttccatttgtctccgtttgtattgccaatttaacaaggccaacatttctgaaacaaaatagaaatttataattaaatatctttttttgttcaatgccaatccagagtataacgaattttatttttcattttactttcaaaattttttagcatttttatttttcaaagttttggatatcaaaatttttcgtttttacataattattatttttttccgtttcgaatattaaattttgtttttcttcccttcattaaattccaatttggggggtgtttttgagtttcaccagctctgatcacacaggatggaatggaaggctgttccaccccgaaattgtgaaaaatattcccggcccatttttacccgagttttattctttccttcgcagctgtaaagggtgtcattatcgttggttttgtagtacataaatccatcaccatattgtgggtctcccggcgggacattttgcacatctgctggagcaacataggaacaattctgttccgttacagcaacagtttttctacgagtcattttgcttggctgagggggcgtatttaagcaaagcaaaataaaaaacagaaaaaaatttttatggcaactcgtacaaaaagtcaacttatattagacaaaataaagcctaagcctagacccgagcaagcctaagcctggcctagcttaaagcttaggcctaagcctaagcctaaatcctaggcctaacctaagcaattttgtacgaatttgtacagcagtgtacgatttgtcatgacaccaaaattgttaaaaataaattatcataaattcaaaaattatagcaacagtatgggccccttctatggcctagaacctcactaaatttggtcattagaattcaaggaaaaattttcatttattcaaatctgatttttgaattaaaaactaattattgttcggattacaactaggttaggccaggcctgggtatttaggcaaaaatcaggcccgggtattaccgggtacagaaaaccgggctcggttccgggtagaaatttctaaaccgtgccttgatcaaaaagcctggcaccgggtcagggcctgctcggaaccgggctcggcctaccctaattataaccaatatggcttgtatgaagcatacctagcaccttaactttccggatttttctgtgttttttgtttcttaattcgattaaaaaattatggaggaaattaaaaaattgttttttatttgatgccaccttgaaatagttttttgatgttttgttggtattgttttgcaccttattttgatgcggaggttgagcagcaacttgttccacggcaccttgtatatctggaaactgtcgtgagctacctgcagccgagtggtacggtagctgccaaagccaacgtaagacattttccgagcgaagaagccaacccggatgatttatggctttttgcttttttctctgtggttcttgctataagaattttaattggtactctttcagtttaggtcccccttttgggtcgggattttttctaaatttttttttccttttttattatcaga

SEQ ID NO: 10857 - DNA, 2106 bp, Heterodera glycines
  unsure (1)..(2106): unsure at all n locations
cttgcatnngcctgcannggtctggaatattatattaaaaataaatatttaancatatgatcattagttggatagaaaaaatttaagtaatattgtaacctatgtatataattatttaatattcaaccgagaatattattccgtttttgaggtaattcccttttttggcattttcaaccgtagcgattgattaaaacaatttttactggcttaatatgcaatcataaaaaattgattttttaattttattcagagatatattttatagtactcccggacacattctttaggggtcacaaaaatttcatttgtcaattttttaataaaattatttaggggcctgatgtgcagaagtcttttggaaaatgcgcccggaataggtactctattttttaaattcctcaaattgattttcgaacaattatatttttcaaccgaaacaaaaatcttttttatattaaattaccatttgatgtattcgattttttcaaaaaagagatattaataattaaattaaaatgcctaagttttaatttagctatttacgcctttgtgcttattcacgcttttctatatgaatttttgtcctaaagtttttcataattggtgatttttgtgcacatttttatatattttggggtttttttcatattttcttatttatttttataattttcgttttttcttacatataattcccaaccctagtaattattgtggtaagcacaaataaaaaattgtttcacttatttaatgctctgtgtgtattagcataaagcttttgcaaatccaacaaaattacgctcgtttcttttccattattatacatatatcttttccttcttattttctttttttttcaagcattaatagtattgatacatttaaaaatcattgaaaatattattaaggcaatcaaataaataatcatttttgttttatataatataattttaattattttgaaaaaataaatttatatgaatttaacaaaaagttttttggttattttatcgtgtttattttatgcaaaagttgttgcatcaagagaaaggtatgcgaaacaatcaatcaattattgtataatgatttaattgctcaaaaaatatttttagatagcggaaatttcaaatttgcggattccgctgtggtttagaactcgaaatttttttgcaggacgggatcccgaaggattaagcccgtaaatccctgaatttaaattttcgtgatcccgcgcgagatagaactcaaattgtgggatgctctcacgggattaatcaagcgaaatccctaaatttcgtaaaaatgcgtcgcaaaaacctgcgtgggattctgtcccgcgccgtcctctaatattttattatcttttttttaatattataaattaatgaaatcaaatttaatttttattctttttatatttttttatcttttctacagaaaaacggttgaagaagtatcttcttctagtcaatcggatgataaaaatgatgttttttctgatgaagattgtaaattgatgagacaactggagaaattgagcctaaatcaaagttatgtattaaattaattttaaattaatcgatttttttttaaacttccaacaccaccttcgttgcccaaacatccttcgcgcaccaaacttcttaacacggatgatgaagaaccactgtgggtggacccacgacgaggctcacgtttatatggtaaaaattttgttaaaattttttagcataatggtatgcaccgcattttttctaatagagcctataccaaattctctaacgggttttgggtgcgaacagtgcccgtttgcgaaataaaaaaaaatccgaaatgcgaaattgaaaaaaacgcaaaattttttctacaatttttttaatagtcaaaatcataaggcaaaaatcagcatgaaaaagttggacctagaagtctaaaactagggctgccacctgaaaattttcaaaatcagcatttggccgacaaaaaatcagcatttggggacaaaattcatcattttgtaaaattctattccaaatttaaaaaatcaataaaaggcttttttgcggcgcgctttttccaaaaaagtttttgggaagagggggc

SEQ ID NO: 10858 - DNA, 2059 bp, Heterodera glycines
ttaatatagtcatagcatcaaggctaaatgccttgtcacattaatgctttagcataaatcaaaaataaaaaaagctacaatataaataaatagttgacactttattaaatgccctaaatatatatgccgaattttcctgctacaacattttttctcatcaactggcgagattgtgaagattattcacgggatcatatttcgtttaaatagtttaactattaaactttattaacaaagcaaaaaatttttatattactcaattaaaataaaatttttgaacttaatactgcataaaactaaaactaaatgaaaacatcacatttctgcaaaatatttatgctgaattaagaagaaaagatctagatttgtatttctaaaattatatatcaacaatattttagctgcttatatttttgagcgtcgggaatatttgtcaagagtcaatctgaccaaatgatataaatcataaatgaaaaaaaaattattattttattttaattatgcattactggataatttgtgtaaagctaattgtaatcatattaatcatggtgaaaaataaaagaatttttagattcaataaaaaattttaaaaataatgattttatataaatatcgcttaatgttatattaagcaataaataaagagctatattatttttcttcaaaaacttacgaagaatgaacaaaattcaatataaaaaaaaataaattattattatcgcaatagaataattattcattattaccatatatttcatttaacaaaatgcaaaattatcataaatcatcatgaagagaagaaaagattgggagcccttatcgagaaaacatatataatgcaaattaaataaacaaatttttctgaaaatgcaatttttaagcttaaaattaaaaaaacaaaagctttgtgaatttaaaaaaaaagaagtaaaataatttgctagcaatctaaaaattgtacaaattgacaaaattttaatcatctttaaaacaaaaataataagcttaattgacccataaaatcaaaatttctctacccataaaaagaaattataaaataaatgaaattattatttattgtataaggtttagttttaatctaaatttatattaaactagaacttactatatttatcgcattttcggacttaacccatctaaatgtacaaaaacttgaaatttgtttttaaaaatataataaaaatatatggtaattaccagtaatttcattcttaattctaacattcaagattaccatttgttaactcaaaaaggagttggcggataattccatgaaaaacattattcaaatgaatatttttaaaaaataaaatgtaaaatataaaaaatataatttaaaaataataagtttgttagaacagaataaataatcaagattaactattaacctcgggaaaatgaagctagctgagagcttgcatcacttgtattatcattaatataaacatcaaattatagttaaattcttaatatcactaattaaatcctctgtccgataagcgattggtttttgatttaattatattataaatttaaaaatttcttgtataaaatttggaaggtacccctttgcgaattttcctatttcttttgtaatttggaccaaatctccgatttcaaatttattatttttcgaatttcgaaattaataattgctagaattgtttatagaacatagccaggaattttaaatataccaggcctgggcttagataattaattgatcaggcacggtagtccggtaaaaaacctttttaactcggccacccggaccaatatttttcaatgattgttgaaaacttagatgatacaaatttaataatagttttatattcgctcccggcccttgggaatggatttttaattttttaaacggtataaaataaaattttaattaattttttttctaaaattgtgtatgccctcaaatgtcgggtcttcaaaagtcgggaatatccgcaaatgtcgggtcttcaaaagtcgggaatatccgcaaatgtcgggtcctcaaaagtcaggacctcaaatgtcgggt

SEQ ID NO: 10859 - DNA, 1245 bp, Heterodera glycines
ctgattgagggggtcccttcgggcggccgcagtcaaccgcctgtggcgctcgtcagactgcttcctccgccctccgtctcgccccactacttgctccgtcttccatgctcccttttgcgaagttcgaaagctgcaagtggtcttaagcgttttttggctcacttaaattggttttttttatcagtaatttttagagtttttgatgacccataacttttttcaatttcatttttatccgaaatttctttcggattcatgggttacataccgagaggaatggattggtatgtattttgttgcaattccatgcgcttaaggctttggacggttcagtcccaaagccatttggccatttcagtcccgggtttgtaactcttaagggattagtttccgcaaaaaaaattctttcatcatacattacagaccgatagctatcgcttggtgtatacttcgaccattttcggctctgtgacatatgataaatatttaccaaaaattaaattaatactttacataatcttcctcactttgccatttatttaagggatcactttcgtggcgtaattcaatgtcaaattgtgtaataccgcaacatttattggaaatttgaccaattataataaaaaaaaaacatcagtttttaaaagaaaaacaatattaaaaataaaaaattaaatgttccgttttattttataaagtaagaagtcagataatatttaattcaattaataatgcttctgatctctttaaattctttgaaattaaaagccaaaaataatatggcatctagttttaatgaactctttattggtattattgaataaagcatgcgttaaacataaagttaccataacaaaaaataattttaccatagttaagtattgttggaaacataacataatttgtctttaaaatttaacttaaaaaataacctataatttaaattttgtaaaatcttgacttaattaaactcttaggggaaaaatagaaaaaataaaaggaactgcaagaaaagattaatttttatttgaattaacttatattgttataataccatcaatatttttaacaaaattttttaatttcagacgctaaaataaaaaaagaccaagaataaaactaaataggaatttatatgcaaaacaaaaataattttaaaaaattaaaataaaaaatttcatgccagcctctagaacaatcgcactataacaaatcaaataaattaaattaaaatacactttaaaa

SEQ ID NO: 10860 - DNA, 4989 bp, Heterodera glycines
atgctttcacggcttatcgcgaattatccgcgaccccccttagatattttgattgcaaaaatttgcaccgaaactgaacgtttcacggcacaattttgcagtcacgaattgatcaacttcccgtcactgcaaccgaaatagcagaaatgactcaaaaagatgaaattctacaaaaagtggcaaaattctccaaggaagaatggtcacaaaagtgtaatgaccccgacctcgcaccattctttccaaaacggaacgaaattttgcaaatcgagaattgtctgctttatcaaaaccgagtcatcattccaacagtgttacgagacagaacgttgaaagcgcttcatatggcacacccaggaatagtgcgcatgaaagctctcgcacgccaacacgtatactggcctggaatggactcagctatcgagaaattggtaaaaagctgcgaagaatgccaaatcgcccacaaagcagcaccaaaaacattgctttctccttggaatgccactaaacggccattccaacgtgtgcacattgattttgccggcccatgccaagatggccatgcttatctactttactggattctttttcaaaatggcccgaagtttatcagatgaatacaatgacatcaaaagcaacgatcagtgttctccgattaatcatccatcgacttggcatcccagaagaaattgtctcggacaatggacgacaatttcgttcgtcagagttttccgaattttgtaaagaatttgggattcgacatacgttcacaccgccatttcatccacagtcaaatggccaagtcgaacggtttgtcgacacttttaaaagggcaatgcagaaatgttcgaaaaaggacaaaaattgggctgagaaaatgctcctgtcctatagaacaacaccgaattctgcaattaatggacattcaccggaccaattattctttggtagaaaactccgcactcaattgtttcttacacatccgacaggaaaagtcaatgagacgattgacaagaccatttttcatcagaaacaggaaaaataccgcacgaaaattgcacaaaattttaatgaaaagcatggagtcaagtcaaatgaatttttaccgactgatccagtgcttgttttgaattaccagcatggtaaggcatattggctccaaggtacagtcatcgaacgactcaacaattcgccaacttatcgggtaaatgtgccaagactcggacgaaacattcatcgaccggcacgccaaaatacgacaccgaaatgccaaaagcggaagcagcccgacgaaatccacccaactactgccaattcaccacccatggcattgagacgctctagtcgcaacaccaaaccgccgatccgcttctagccaggctgacgccgttcaagaattgaggagggagatgttgggtagtgaataatttgaatttatggcgatctgacttattgactttatttgttatttctatgtccatccgccccctccctcgtccataaaagtggatacctcctcccattatttgttctttcctttcatcattcatttatattttatttcccattttgccctacgaccgaatcaataaaattatttatttatttctttttctttgtgtgttctaagtggaagaacacaacactgatcaaagatagaatatggcatagtttcaaatttgagggaaaatcaacctaaattattcaatttctaaaagaagaaaaattaaatatctaaataaaattgtattcaaaataataaaataattgataaaaaacacctaattaaattagaaaatatttaaatataaatttaaaaattatatttttgtcattattttgttggccaataatttataaataaataacagaaaaaaatttttggggcaatttttgactgaaaattatttcactatatcttagttaactatttcagattttccgtcactaaatgtagcgaccctaaatattttgtacttaagacttgatcaatcttacccgaagtgttgcggtaacaaaaaatacccacaagtgaattaaaggaataaaaaattgtacgttaaaaaataaaatctaatttatttttttaatttcttatttacaacaataactaaacactggttattaatttttataattttaaaaattaaatgcaattcaaagacattcaatttaaattaaatcgtgccttgaattttttcaattttcaaaaactttaaaatcttgtgctccaaacggtaaataattttttaataaaaatcatgttgaaaatttaagaaacatttattccagaggaaatccgacagttttcggagacgagttctacaagtaaaaataggtattatagataaaatataattgaatcgttccaaaaaaagatcacttcaataacataaagctaatgaataaaaaatatttaaacttttcaaactataattttatgtgataataattttccgaaaagtttacaaaaaatcgctgaaaaatcgttgaaaagttaataaaattgtaaattaccacctgaactaaatgcgaattacaatagtacactaatatttcaaattattgggtttaaaaaattactgaaaaataggttaatttataataaatatcatttaactttaaactaagcaaattttttagggcatttaataggaaaaaatattttagatttttaatatatttagttgtaatacaaattatttatagagaattctattcttactatgtatatctatgttgtaaataatgcataaagaattaacaataaaatttgaaaaactgaaatattgggttgatgaaaaagttctgaccctttaagcacttcaacattaaacaattttttatttcacaaaaaacaaatgttcaatcaatgatgtactcaccattttgatcaatgatcctcctccatcgttcgggcaacatttcaatcccctttttataaaactgatcatttttcgatccaaaaagtcatccaatgcattttcgacctcgttttgatcagcaaattctttccctctcaagaagtgctccatagatcgaaacagatagtagtcacacgggctgatgtctgggctgtatggtggatgaggaagaaccgcccatcgaagttgctcaattttttgttgcgttgataacgcaacatgtgggcgtgcgttgtcatgtaggagtacgccgccgcggaattttgcagaaaatggaggacgacgaatttggtcatgaacccgctgcagttgttgctggtagatgtcggcgttgatggtttgcccagccggaacaagttcatagcggaccaaccctgatgaacaccaccagacgcacagcaataccttcggtgcatgttgaagacgcctgggggtcggctcgctcaattcgtttggcttcagccattgtttttgtgccgttttgttgttgagataaacccacctcatcacacgtgatcagctggcaaagctgcattccagcactcaaacgggcgagaagttcagtgcaggtgaccactcgctgatgcttttgttgttgggtcagtgtatggggaacttcggcaccctttttgttgatgaagccgagctgatggaggtaattgagcactgttgtctgatggaccccgaactctgctgcaagttggcgcgaactagaacacggatgctgctgaacgtgctgctccaagtcgtccgaatcgagagaaggtggtcgtccggagcggggttcatcttcgagctgctcattgccttcacgaaattttgtgaaccatcgcttaactgtagaaagagagagtgcatcattgccctcacttttacaaatatttcgaagagcttgggttggtgtagaattttttcggaattcgtaaagtaacagttgtcttaggcgaattttgtccattttttgaaaatcgttcgattttgcaaaagtaatggctatacaacaaatgcaaatggccagaagatggccaaccgtccgctgattcatcccaattgcctgcctccctttttcaatctctttagaattaaatatcattttttgcataatttgttttttcagagtgtcagaactttttcatcaacccaatagttaattaaagagggcaaggaaatgaaagtttttgcaaaattcaacgccttttatatgacttaaatttccaaaagaaattcattccaaaaaaagaatataaaagcaacaaatctcctccaatccctcactaatattcattttcgtctttctgccttttgctggccaacgacacacacatttccctcaacgaccttcgaccgactacggcacgacgcgtacgatgaacgaggaatactgcttctctacttcgactgttgttgcacagagctgggcccaaacaaactttcgaccagtggacgagcaaccgaacagccttgtggacacgctcatcgccaaactttcgtgcacgactttcgagcagttcacttccgaagtgagtgatgcgttcattttatccgtctttcatttcaactcttcaggtcagtgctcaggacattcacaagctttgcgatgtcaccgtcggtgttctccagcaacagtcaatgctcatccgtctgcagcctcctgtggtcctttgcggcgacatccatggccaatttcgggacttgctgagaatcttcaagacgatgggctttccgccggacaagaagtacctcttcctcggggattacgtcgaccgcggcacgcaaagcctggaaacaatggtcctgctcttctgctacaaagtgagtttgctgaggaggattgcgcgagaatcgttttaattgtccactttttaaggtgaaatatccggacagtgtcatccttctgcgcgggaaccacgagtgcagcaacatgaaccgagcgtgagtttggaattggacgaggcctgaggggaactaattttctgcttcctttagctatggcttcttcgaagaggttgaacgtcgctatgggcagatggatgcttacgctctttggaaccacttcaaccaaaca

SEQ ID NO: 10861 - DNA, 1481 bp, Heterodera glycines
agttaaatttttaaatttacaaaagattaaaaattgaacccccccagaggtaattttttcaacactcattaaattaaatttcttaatttacaaaaaaatttttaatttacaaaaattaaaaatttgggatagaaaaaatagataattttttcaactaccctcattaaattaaatttttaaatttacaaaagattaaaaatttttaatttacaaaaattaaaaatttgggatagaaaaaatagataattttttcaactaccctcattaagttaaatttttaaatttacaaaagattaaaaattgaataaaaaaataggtaattttttcaacactcattaaattaaatttttaaatttacaaaaaattaaaaatttttaatttacaaaaattaaaaatttgggatagaaaaaatagataattttttcaactaccctcattaagttaaatttttaaatttacaaaagattaaaaattgaataaaaaaataggtaattttttcaacactcattaaattaaatttttaaatttacaaaaaaatttttaatttacaaaaattaaaaatttgggatagaaaaaatagataattttttcaactaccctcattaaattaaaattttaaatttacaaaaaattaaaaattttaaatttacaaaaattaaaaattttggataaaaaatatattttttttcaatactcattcaattttaaatgtacagtaaattaaaaattttggataaaaaatagttaaatttttcagtggtgaattgattattacggtgaatattgttcatgaaaaacactatgaaaggttaaaaaaggttattgctcatggaggcgaattcattgaacgaatcgtttaccacacaaacaaggatttgacaaaaatgaacaacaacaacaacaacgtttttgagcaactttttgtagcgataatgaacgtaataatttattaataataattaggtatcggcattttgaaaaaagtaaatccaggtccaggaaaaatcaagattgccgaaaaatggcctggacctggacccaggaaaaacccaggcctggatccaggtccaggccgatttttaataaaaatagccagagctgagatattatgtaaaagagcgacgaaagcctcgaactttgcgttcgagaaaatcacgaaacattttttgggtttttgtgatgtcgcggtcaggaatatttgtaggccaattagtggactttttgagtctcgaaaatttagatttttcgagagttttggcctttgttgtgaaaaactcttgctactcttgctagttctcggttttttttagtgcgtctaggtcgggaatcttggggatgcattctcgatgtcgttttatgtatatcggcaaaatttcgtatttcattttttaacaaaaaataaaaaataaataattcaaaatgggagatttttttttaaaaagcaatttatcctaaatatttcataaaatgtaaaaatccat

SEQ ID NO: 10862 - DNA, 3925 bp, Heterodera glycines
ttttattatatatttttacatatttcattattttattcatatttggtacatattttggacttttttcttacattttttcattttttacatattttgaggatttttttatgaaaaatttttggaaaccctcaaaaaaagccaaaatttcggtaactttttcgttcatatttttatttttttaaatgtaccgctaaaaatcagtaaaaaaagaaatatcgaaaatttatttttaaaaactaaaatgtgattctaagcctatttaggtcaattttatgcaaatttatgcctatttcatcctttacgaggaattttttttccaaaaaataaccatttttaaacttttatttacatattttagtacatatttctgggtttttgcacatgtttatgtacatattttggccagtttttgtacatatttttgacacccattattaattaattttaatttctaattaccaccatatacaataatatcccttttaagctgaaattcagcgtctatgcatttgaaaattctatgatggcaatgggtgggaatatggccaactatggcatgatgccaacacaatatccgaacaatggcccaacattcggccacacaatggccaattatggcatggtgcttggcgccacgctagggaatatagcggaaaatgtgttcgagcgtggcaaggaattggtcgccaaaatgaacaacaatggcaaccaacacccatttagcggaatgccaggtaggaagaatcagtctaaagtcatttcataatttaccgcaactttgttggcatttcgtaaaagcgcgccaacattttaaaatttgaattttgactgctacttcttaaaaatagttcttatattaaaagagagacttgaaatttttcacaaaagtactttagcataaggactaactatctgtataaaaaatttcaaaaaaatcattttttaacttggaaagtaaaattgcattatttcctataaaacctaaaaaataagtgaggcatatgccatggaatttatttgaaatgatcaggaaagattattttcacttttgaatattataaaaattttaaattgatttgaatttgacttagttcataattttattaaaatttccaaaaattacatactctaaaatattccgaaatacttaatctcgaccggtccatgctctggatttagatgaaggcagtaggtcattcaaatgggggccggaatctttatttaaaaaatcttcaaaatgaaaatttttggtgaaaaattatttataaatttgctatcttttgatagcccttggtgttttctattagtcttttaaaaattttgttaagtttcaaaaaacggacacctaattattgaaatagagcacaaggtgctgctgccctattttcaactcattgtaggggacggggctctaattgataagtggggcatactgtaatgtctctcagtaaatatggtaattattaaaaaaataaaaaattgcaatttttcatttgctaattacacaggcataatggtggagaacaacaccaacaacaacagcaattatggcaacatgccatcattggtggtcggcgttgactccacagtagagtactctgtgaatgtgagaagtcgcatggtcgaagacattggcatcgaagtccaaggcgtggcacaatggccaaaaaaattgttggcaaaactgtttgaggaggaattgtttgagggcttactgtacaaaaagggcactggtgccaaccgtggcattgggccgagcatggccagaattccgcactgggaagccatgctgggcttgtcaccacaaacaaaagtaaatttaattgggtggttggcatttaaaaaaaaaattattacggaaattaaattagccactaaatgccaagcaaattcgtggaaaatttatgatgtacttaattcccgaaatgtggcaaaaatttttacgaatttctggggttcttatttcatcatcttaggaatgaaaagtcacaaaaatccaaaaaaggcatgaaaaaaggcatttaaattttttttattaaagcttttaaggagcaaaacacgtaaaacttaatcaaaaaacttaattttggtcatttaaatgattactaaattttgtataatgtttttcaaataagtaaattttaaacctaaaattttttatcaggaaaaaaaaatgaaattttggcgataaattattgagaaaaattttcaattattaggggtatattttctcgattttattgcattgtagaaaaaaaaaatgccaaaaagacaccaaaacggcaaaatgccaaaaaaggcattaaaagcaggaaactgccgaaaaaggcaaaaaaaaaaaaaggcataataaaagtcatagaagcctcaaaccaagtgggaaactgcgcttttctgcttaaatgcactaggaaattttcagacactcaaaaaacattgaaaaataatatattaaaaaattcttcgcaactgaaaatttttattttatttttttaaatccctaaaaaccgaaaaaattttgaaactgtgaattcctaaataaattttaaaaagttttgcaatcacatcccacccaccctgcaggcaattcttcaattttgtaaaaattcgacaactcttggacctggcctcaaatttcgctcacgcatcaaaacaaagccgggaaacgcttggcaacactttaaggaaacaatttcccagttggttgggtcgcaggagatatgcttttaaagaaaattgttgttgaggaggagaagcggtggaaaaaattcgattttcaaaaaaaatctttgttggaatttttgaaaaattttgtaaaattttgcggtaaacttttttttttttgcaatggtaacaattagtggtcggtgaatgacaagaattgtatgtggtaatggcattcgaaactggtgccatatttgcgtacatttggcaagtcgtacaaaaatttaaaaaaaaaattattgaaaattcattataacttttaatgtatgtttttttacatgtatttattatacttgttttcatgacccttttagaccatggttgtttaaatcagaaaaaatttttgtaagcaaatacagtttcttttatgaaattatagatttcctttctctctctcgctccactttttcccccactcccactccccccactctcttcttttctctttttctcactttttcctctcatctctctcaattcctcttttactcgtttctctctttccttttctattttctctcttccccctctctctctctctctctctagttgactttcccttctatttctcactttttacttattcctctgactcttttttctctgcctttttaccgttttctctctctctctctccctttatttctttctctcaatttctctccagttctctatattcctctcttgttctctcgctctctcctcttcttactcccgttctttaccttcataattttctcctttccttctctcttcttttcactgtttttctctctttcgctctcttctttctttctatataccaccctttctcacgttcatttctctcccacccccactcgcatttctctctctctctctttctctctactcccttttttcctcttccctcactctttctttctctttctctcgctttctttctcttcgtcgctattacttctgcctctccttccctctttcttttcctctttcctatatctcatttttgtatttatctcttctctttgcctttgtttttctctcactcactctctcatttctctatcttgctctctttcgttccctttctttctctccctttttttctctctctctccttctctctctcctttcttttacctatctctgatctctcatgctcatatagaaagaatatttaaaagataaaaccaatttaaatagaccgcaggcagcaagc

SEQ ID NO: 10863 - DNA, 1581 bp, Heterodera glycines
tttgattaaaatttgttgacagattttcaccaaaaaatcatcaaattttgggatttttgtatcatttttctaatgagaaataagagttttggcgcgccgctgagaacagtttttcatcaaattaccaaattttgtgattttgggccattttctaagaaaaaataggagttttgagggcgcggcggtgccgataggcgccgcccggggaaaaaaaattggaaattttgatcatttataaacagtttttcactgaaaattagccaatttataggtaaaattttgaaaaattttatgggaatttaatccaattcttaggggtgtaaaagtcgctttacgcgccaaaaagcgaaatgcgaaaagcgaaatgcgaaacgccaaaaaatgcgaataatgcgaaaggcgaaatgcgaaaagcgaaacctcggcccatccctgatagatacagtgagttacggccgcacatttttttgatcctctgaaattattcatttgatgtgccgttattataatgccgcaacgctaaggcgctccgaaatatataaaaaaaatttatctttcttttcggcgccataagaatttggctaataatttttatacaaaattgatattcattggtagtacaaaatattatatacaatgtaattttcaacatagatttacttttttctttcttaattattatttattattattgaacctaggcgaattgcctgcctacaaaaataagctatgaattctcaatatcatatcagcttacaaattagtccacccccaaagtgatgctcatttcccgggaatttccggttaaaactcaaattttcattgcaaacaatttgtaaaagaaaaattaaatatattaaaaataatttactttaatttttaattgcattaagcacggatgttgtcataatattgcaaattgaaaaacggcatctcaaagacctacaaaatatgatacggaatggacgtgaatttgcatccagaattatttattcaccatcatatgagttggaggaagaattttacgaatggttaattacggtaaaaattgaagaaaaaaacattttcatataatttaggtggggttagtcgttacttaaaaaaaccatcaaaataaacaacaatagcatataaatttgctgaaaaagcaaccaaaagttagtatgaaatttttttgaaattttgtaggctaattaggctaatagaaaacataaaggtaatcgaatgatatcatgattaagtttccaaaaagttatgacaataatgctggacaaaatcttgtttatatgaattcttctggccatgacttttttgaaagtcaacaaaagtttttttgaaattttacaagctaatagagaacacttagggctatcgaatgatctgaagaattagaatttttttacaccatacataattttttgcttcaaaatttttaaatttgatgatttttgagtaattaatgacccagcaccgtattttaacaaaacaaaaaataattttaaaattttaaaactaattataaatatttgaaaatagctaattgaaaatctgcattataaaatcaaataaatttcagtctgc

SEQ ID NO: 10864 - DNA, 2345 bp, Heterodera glycines
  unsure (1)..(2345): unsure at all n locations
cgcgatttgacggccgtggcctttctgatgtgatgctcgtatctgtgagggggcaaatgcacgccagccaaccgagcgccctctgaccggtcccccagccgggttacgagcgtctgttggattcgtaaatttgccgctggagggaattggggaataaccatttaaattagccagaattccatccacgcgcttaattttggtactttccatcatacgcaaatattcctaattgaaaattggcaccaattccttggctttctctacaaagcggccccaaactttacaccccattagtgtgttaaagtccgcaattaagcacatgccttctcttacacgtgaaagcgcgactgtagctctgtggctgtcttgaaagaatcctggcattatttccacttctcttgcttcccagcaaagctgttcgaatttcttaccccttgacatgtctaacattttcatgactaatgagatgtttggctatagcctttcaagaaatagctcacgtaattgtgcttccttttgtgagtcatccttcacatcggatacctttgctttgcggcgaatctaaatcagttcgcaaattagccaaagctaggtcaattgtggcctttcgattcggatccattttctccaaaattctttttggaacaccatccaaataaatgaccaacctgncaagcttgtccttttcatcgagttttcgaccaaatgcatccatgtattctctanaacgtttttgcccacctgtcaaatgtgaccacacagtcatccttgtagcctttcaagtgccatgggatacgcatcaatgatcatgttgacactttggaaggataatgcattgcgttgctgatcatcctcatcatcgctgctggagctttgttggttttgattaggtctctggcctgtttggtgtcccaattgctgtacaggaggatgagcatgatgagggacaagtggttgagtgacagccgtagcttgttgaatgtttttgtttgctgaattgaggttttcgagggactttaccttaccagcaacttttgaaatctcagcggtgaaggtctgaaagcctacgttgacttcattggcaagggtgccaagatgattttgcacattgttagccttgcggttaacttgtcggatggtgcggctgactccctcttcgagtcgtatgagttcaccgaaaactttttcaacatcctcaaaacggactgtactgtttggctgtttgccttgaaacagtgtcttatttacgattttaagagtcgactcatcatcagaaatgataggttgggctgtcgcccccgaagacaatactgaccctgaggtcgatgaaggcattgatgggttgggaggtttgaaggagtagtgaattgagtctagaattatctataaactaaggtgttagtctcaataagtacacactagtgattgatgcaaacgagttagcattgagtgagggacttagtatgggttagtaccagttagtgctttgatggggaactgtgatgagtgaacactgatggctgaagagcgaaggcttgtgatggataatgactgattagtgaatacataaggcttaagtattgctcatacatggtgtgaattcaagatcagaagagataggatgggcactgacattgtaatggtatgaaaacggaaggcctaatgtatgtgaaagctgattggcaaacaccgaatgccatgggacaggctgattgatgagagtcggcgatacagtttaatgatatggcttatggccattttcacgattgaataatgatgtaatgaatgagaaaaaattacaatttagagaaatatcggaaatatgctatggtacactgtaatgtgagaaagaagaaaaattacagtaagaatgagcattgagaatgaatgtttaactgtgatgggaaaaaggcataaagtccgaatgactgtacatttgtaagaagatgatattaaattacagtacgcttttggcagcccctttaccattgcaataggtttcggttccacaccctttgggtttttgttagaaataggccttagcccgaatactatacgacgaatggcatttgatgagtgccattgtttgaatttacgggaggagcactacatttgtgccacctcgtcctttggtatgccaaaaacctttgaatgaaaaacatttgactcaaatcagatttgtcaaagtatatcactgccggatgaatggaatatttaacgacgtatgggataattgcaaaaaaacaacaaaaaggattgcaatttggttgggctgggccgtggcccttattgagcgccaaatgagacagtgaaatagacataattaatacagtaccatgactgag

SEQ ID NO: 10865 - DNA, 2746 bp, Heterodera glycines
  unsure (1)..(2746): unsure at all n locations
tgacaattaatattaaaattaaatnagatnnaattatctaatcccacccgccccggctttgaaagatatagaaattatttttatatatccccaaaattaaagaaaactaaactaactaaatgaggagaagtcttggtcattaagatttgaatagaaacttaaattagtcttgaatgatacagaatgtaacattatagccgcaccccgtttttcatgagctttaatttactttatatatataaatatgaaattagtaaatcatttaagataacttacgattaataacttaattttttatggcatatgaacaaattcattttaataaataaatttaatacttatattagcttctttcaaaatagggtattttttaatgtttattcaacggttcttggtttgcaccctcagagaccttcagaacgagttgaagaacttgcgtagttcatccatgactgatttgagcgcccataaagagaaggagagaagggttaaaggaatgagggagacggagcaaaagcggcgcatctcgacatccggaacaaatgaccagtggaagtgaggatatggcttgaaatggtggccaatttataggcgccatagggatggccagcttagagcaagaagcgagagcgtcagttgttcattttgcgttaaatttaaatttgaatttcccgccaaatgcataaaggacaagtgtcacaagcgagaaagagagagagtagtgaatggagcggcttcgtgtaaagcattattttttctatttttttgtttagaaataaaatgaatatgttaaaaattgaattattttaaaaaaaaagctgatgcttattattanataagtgcatcgctctggtgttcgagatttcgagcggcatatgagcggtattatcttagtttttaatccggccggatttgttatgttgggctgtcgcccctgcgcagaatactccataaccaacaggcgccgcaatacaaaatgaaaatgtgcacatataatttatataataatgaaattgtacaatggggaaaaaaatggggtaaaatgaaaaaaaataaaaaataaatggtcgaccgtctcccgaatccatcccgaggtcagtggataggttgtcattcgacaaccatccggtgctaccagttaagctgtgccgggtttcgggattcggcctgcttagttccgacccctgagatcgatctcctccgtccaccgacggattgttggactgggccgtagcccccgcggaaaggctccgtcccatcggtcggcttagggggagggccagtagtgggagtgatgactggggaattgactgactgacctcgatggctgggagagccatcgcttaaaaggggaatcccggtgggcgttccaatggggaggagcctctcccctccaatcccaatcggtagccgagacccgagtcccggcttacaatataattaatcataaacattaaaaaacaagactagcttaataacgaaattgagaagattagatctaatgttaatgttatgagtagtggactattatgttaacaatttgataaacttatattaatgtgaaaaaataaaagaaacataaatttttaattattgtaataaagacagaatatagaaaaacgaaatattctaatatttaattatttaaattgtactagaattcaatacaaataaaaataggagttataaataaagtatatagacattaaatcaatgaaattgttttttacaaatttgcattgtttgatgttattttataaatattaaaacatatttatcaaggtaatttttgatgaaaattagacaaaattaaatttttatcatttcataaattaagttaatttgaaattaaaagtttacatttgaaatacttattatttagttcattaatactaaaggaaatttgggctcgcataaaaataattaggaaaagcatgttatggttatatataatttaaagaataaataaaaaaaattaaatagtgtttaaaatggagaaacttaaatgatcaacaaataaagaaaattaatttatatatttaatttatatactcaatttaataagctataaatcgtcgtttttatgtattattaacatatacctcagggatgggacgaagtttcgtttttcgcatttcgctttttggcataatgcgaaagttccacccctaagaacgaatattttaaaaatataaacttttaaaacgaatgcttcagtttattattattttggactgcaggattaaaaattccttttttttggtttccaaaaatttgaaaagttccatagtttgtttgtacgttgtttttggtggtctatataccaatgcaaattttattgattttaaatttttaattagaaaattaaaatttcaccattaaattttgagccggaaaattttatgaaaaatcctatttcctttttgattcaaataccacacccgccaccacgagaaccaacttttagattttctttatgccaaaatacagttgtaattttctctatccccatgactaaaaaggaatttcctcattttcgtaagtccatgactccgtgattagtaataaatctgtatttttgtttgtaaaagttagggtatttcttcaattttgttcatcataagaccaaaaattaattaaaccaccgccttaaaaccttttaaaaaattaacatccccttttactgtttggaaaaaaaaaaaattgttttatttttttataaaatttttctccctcccgaaaaaag

SEQ ID NO: 10866 - DNA, 1396 bp, Heterodera glycines
  unsure (1)..(1396): unsure at all n locations
ttatgtttatatatagtttaaaaaataattattagaaattaaatagttgtttaaaatgaganaaactatagatgaataatttgaataaaaaaaattaatgtatatatttaattgatatagtggagttaataagctataaatggtattttttatgtgttattgagatatacctcagggatgggacgaaggttcaattttcacatttcgcttgttggcatagtggcattgtaccgcccctaattaacgaatattttaatactataatcttttaatccgaatgcctcaaattattattattctgaactgcatgatgaatgataccttttttttgaattccaaagatttcaagagttccatatcttgattgtacgctgttcttgtcgttccatatacctctgcagacttttattgattatagatttttgaatcaaagaattaaaatttcgcaatgtagatttctcagccggaaaatcttatgaacaatcctatttcctttttgatcagaataccacaaccgccaccacgagaacaacttttagattttcgttatgcaaaaatacagttgtaattttctctagcccatggactaagaggaatttcctcattttcgttagtccatgactccgtgattagtaataaatctgtatttttgtttaaaaattgtttatttttttataaaaattttctaccaaccggaaaaagcaaaaactctttttgtaaaaatttatatgattttttgtgatttgacatgaaaatttaaaaatgtttacgaaatgtgtcaatgtcactgcgcaggatgacctgattcgcgtagataatccaatcttccgcgtcctcttttcttttctttgcgcactgctcaattaatttccggcgttcggccaattgctccttggtcatgctttgcctgatccgcgcgccatgtagagcattcaaagccagagccttgcctttcattttgagcacatgccgagccgcatgccttgtgggaaattccatttttagcggtctcgctctgttgggcgttcgcatgccgacatggaacaccactggggtttggtcgagttccactgtgtcctaaatcaaattgatcagtgctctgtccgcctccccacgctccgacgctttcccggattggaactccggcacattggtgatgacaacggtccgttgtctgcggtcctcctcaatcgcgtcattcgccgtcacttgagattgaaccagagacgacgcggtggccaacagcgagtgcaactgcttaataagcagttttgcgtagtcgggaatggcgctgtcgttgtcaatttcggggggaatttgaagctggtcaagggaagtcaagaatttttttggggcggtgtttaaaaatgaatttttccaaagaatttaacttcct

SEQ ID NO: 10867 - DNA, 3313 bp, Heterodera glycines
  unsure (1)..(3313): unsure at all n locations
ccccattcattcatttatccaccaaatccatcctcggccttctaaagcacacaaaattgggggattggcgggtcggaggttagggattgactctttacgcgttgtgttgtgttttgttgttgtttctgttctgtttttgtgtcccaaagccagtttccgtctgatcaatgccttttccttcttcttgttttcgtgtctctttctttgtttttccatttcaaatcggctcttttgactgatcacttcatctgatcagcatttatctgtggtggtccatatcctctaatttgggtaatgaaactgaattttttggaattcagcaaaatttcaaaacagagattaaactaaaaactaagccttactgaagactaaattggaaattgccaaacttaggcgccaaatgaaccgttcaaatcaatccctttgattgccgccgcctttcactttggtaatgcactctcgagagtctcgagtcttgtgacccatcaaagtttttgaataaaagtttgaatatctgtcccctttactcacgaaaaaaataaacttggggcttaatggcttaattttgaggggttttcgcccaaaatgggtcattcccacccctcccccccccccctctcgcgccttaagtgcccaccaattcaaagcccccaaaatctcacggtgacctcaccaaatccctcccccattttttggccctctcgaaatgtgtggatggagaggataagtgatcccattcgatgacgagagtatatcgcattcaaacagtgtttgttgaagtgtgctcccccggggggaaattcagtctgatgagagtaaactttcaaatttttcatttttcttagctcacaagcaaccgcttcaccccaatctaaatttcatttatcccatctcctttcttttccctattaagtaatagcacatttttaatgagggtaattaatgatttaattatgggcaatttaaaattattttttaaaattttttcttctaatttgaatagaaatattttaatgcgaaaccatttttttatgagaattatttattcattcactttttcccctattaagaagcagcacattttttaattgacaacgcaaagaatacctaatttataagaataccaaatttagttttttaatttgtgacataaaaaaagaaagtgaataaattacaaattcaatttcctttgcccataaaaagacgaaaagtcattcgaagaaaagcccaaagattttgagaatggtcagaaagtatattttttggaatttatgtaaattttgcttaaatatatttaatattattttaaatttaaaatggaaaagcaaaataagaaggaaaaagcggaagaaaggaaaaaaggagttgaaaagtaaggaagaaaaagggagagaaggagaaattcaacagaaagtgggaaaaaaagaaaataggaagagaaaaacggggaaaagtttaataaattagtgaaaaagacaatggaaggaggaaaagtttgataaatggagcagagacgaaggatgagaagatgaatggatgagttgcgcagaagagagagagacggaagaatgaaagatggacagaagacagagaagggcactttcttcccccattttcttcgtcacatttcggcaccaccgttccttccactgaatgtcggggcaaatttattgccaattcgctctccgcccccgtgccattgcactcggtcactgtgtgccatgctccccccccccccggggggtgctttttccggaggattctccgccccccccccgtcggcatcgcttctccgtccccttttaagcccgctcaaattccatcatccgttcatttttacggcttcttcatctgctggctgtttactgtctgtgccgttttattattttccttttcaaaaagcggtgaaaaaggtccgcccttttgatgctcatttgagtgcactaaaaataaaaaaaggaaacaccggccgaacgaatgaatgaatggaacattgaaaatgccaccggtgaaggcacttccatgtttgtgccatttttgcactaatttggcatttgttgtgttggttacggtcaacactttcccagtcttggcattttttgggatttggtcctagaaaaataaggcaaagccccatttcggcattaattaagtgggggtaataagcggactgcataatttaatggccaaatagctgaaaatgactctgccttttatcaagccttgtttttcggtgctttgccaaaaagccaatccaatggagaaaacgccattaaaccatcggcatcgttggcggatgtaatacaatatccaaccatccctacctttttgccaatgccattgtttgagtgtgcccgattttgttgctaaatggcgtgatggacaaagagaaaagagcgcacaaaattcagacacacacagcacaaaaatgcataaagcacaaccaacggcaacagaaagggccaaatttttatgatcccttcgaaaatggacgacgaaacaatgccaaaaagagaggggggcaaacataatgccaatgggaccaattcaaacaaaagaaaccccaccaaaatcacacagagtaaaagccctttgtttcaccactcattcttttgatgatgtcacaccattcttgacaaagcaaaagtcgctaaagtgatcgagagtagtgagtggagtgagtgaattgatgctgcgctttgaacttttgttttgtgtgcgtttatttgcccatttccccgccgccgcccctgggggtcatttggcattttattttctctttttcattgttttgtttctgcttcccccgcggggagggcttacaacaccaaagccatcgcggccggacgggtggagaagaagcggtcaccacaccgcgcgagagtggtctcgagaaaagaaagcggtggggcgggggcgggggcggcttaggcccttttaactcatccgtcttcgccccgccccgtccccccgggggtcagttttatatttatttgccttccccttccatcgatggatgaccaaaacatattccccatccatcacaccagcgaaagtcgcgggaattgaaaagaaaaagggcaaagttggagttggagttgttcctcctcctcctccttctgtccgttccattcattgtccattttcggagatgacaatgtttcttttgtggccaaaaatttaaatattttcgttgactttggagggaaataatgccaaaaatggattcattgggaggcggcaaattttaaanaatttcgctgatggggcttgaagaaaattgggcaaatagaaaaacccaggattaattgag

SEQ ID NO: 10868 - DNA, 1225 bp, Heterodera glycines
  unsure (1)..(1225): unsure at all n locations
aaaaatgggaaaataggtgccaaaaagttccgaatttaggggtgtaaaatcgaaaattttcatcaaaaagcaaaaatattttgccaagtcattaaggatatacataattttcaaaatcaaaaattatcgtcaagaaaataaaataaataaattttggagataaatttttgagaaatttttcatttcttaggggcgcatttttgaaaattttctggtcgattcttaggggtgtatttttcttttttattgcatttttgttaacaaattttgggcaaaacgccaaaataggtgaaaataagtttttttaaatttttttaggttttttaggtgctaaaaataaaaacctagaaaataggtgctaataactcgaaaagtagcttaacaacagcccaaaaaaacatgtttttcgtgcgtttcaggccacggggagctcaggaaaaaaatatgtaaaaacctaaaaatcgaagccctagtcaacactgtgatttgacactgcgattgggagcggactgaagattgctcaaatcagagcggtgctattgagactgaattgtccaaatctgtcagagcgaaagcattggactgaaatgacaaaatctgatctggccgagattcgtgccgcgcccaaatgggttggagactgaattggtcaaagctgtgatttacactgtgaaatgggaaggactgaaaattaattgatcaaatcagatcggagccatttcccgagcgcaaatttttgatggttcgccattttagtttttgtgtggggtggtgattagagcagaaaaatggacgggagaaggttaaatgcactgctgaatctgctgctcatttgggagcaactgaattcagtgaactgtgcgctgatcggacaatttgctgcgaaaaatttgtgtgggagtaagcgcagttttgggtggtgatcagtagagtgatcagaggacgatagtaaaaaagagagaaaggaattctaatggactttttgtaccgttgattagcgtgatcaaggaagaggaagaggacggaagaatggagctaaaaatgaattgatggtacaacactgatcaaaaagatgatcagacatttttagaccgtcgattagcgtgatgaaggaagagggaaggaagaaatgatttaaaaattaattgatggaaacagcactgttcnaagtgagtgattgatcagacatttttcatagtgcttatgccctctccctctctctctg

SEQ ID NO: 10869 - DNA, 3833 bp, Heterodera glycines
atgttgggtgatgatgcttgttttgttctttggcgccttttttttttgcattattttttaaaaggctttaacttttgagtggtcgtttcagccgtcactttgaggggaccgagttttgacatcaaagtcctggtcacagttgacaacatcgttttttggtgtcataccaagccatttaacacttatgtgcgctgagtcataaatcagcgcgtatttatgatgaattgaatcggacggatttggtcgttgctgatagtgcactgtcttggagtggaccacgccggacatcgctacgggccggtgcacttggaaatggcgcgtaaactcgcccccccccccccccagggcaccgccgtgtccgatcggcggcggctgatctccgatcagtcatcgttaaattccatgctcttttttgcgcagaaattaatgaatgaatgaatttgtgaaacgccgcgcggcggtgccgtcgcgccgcgctgtgtacacatacccttttggggagcgagcagtttttctggggcaaatggtcatcaagcacaaccttcagcagtagttggagcagcagcagtgcaaaaaaaaagggcagggcaaattgaagggcgtaaaatttgtgaaatttgttcgactgtttaaaaaaaaaatttttttttttaatttacaaaaaatgtattttaaatttcaaaaaatgaattttcaattcccaatgctttagctttcctaaattgaaaaaaaaaactttggtctttaccattgcaaaaaaaagttgtttaattctaaaaacttgagacctgatttatgaaaaaaatgcattaagtatttggtgcctaaaacccggtcgggaatttagaaaaattagaaaaaaaatttcttactcagatgtgacaagagctatggcgcaaaaattgttcggggcccagttgtcgggaatatttatttgactgatcaaaagtgaggaaagatgtttaaagtattaattttactgcaattttgcccttaatggactattaaatttttgctttggtttttatttgcaggaggcacttcgccaaagtggcgcgctgtttaaagtcgaagagaggaaatgggcggaggaaggtcaatgatcagagaagaaaagttgtgccttgcttaaaggtcgagatcgaaaatagcccaaattcaaagtttgtcctttagactcgagatcgacaacaataatctcgagtgaataaatttgaaagcatgaagaatgaaaaattggcaaaaatgttggactcgggtgggagaatcgaacccactcctccccacccagtgatccgtgagcagttttaccactgatctacccgtggatcagggatgtgacggagttttatccaattcttgctgctgggtcaacaatttaactgtaattcactaattgccaaggaaaacctgaaaaaaaagagctgaaaatttcttttcgaatattaataaacaaaatgccgatttcccatttcggcacggccctcaaatgggataattggcaaaaaatcggaagtccgccggtgttcaatcacaatttaatttgtttagccaaaaagcgctgaaaatctatgaaatttagagcattttgcagattttttccttgggaattgattgagttacaatcaaattgccgattcattaccaagaattggaaaaaatttcccgtcacatccctaacgtagacataaccgccgaggaacttatgccgagatatgggatcagtcactaataccgagatatgggatcagtcactaataccgagatatcggatcagccattctaaggctctcgaaaccaaagtaggcaaattttttagtaattttttagtttttgaaaaagacgaaaaagggcaaattcgattttagtccaaagcccgattaaaaatacagaaatcccaattaattattttgtaaattatattaaatttaaggaagttatttaatttttggaggacgcaatgtgcttcaaatcacttatatgagacaatggagaccgaaaactgatcagcccatcaccgaaaatattgttttaatttgtttaactaaaaagataaaataaaaagaaacaatcaaaagatgataaaagtgcaataaaaaaagaggagagaaattgaaataaaatttaaaaaataataattataaaaaatattcttccaatcgcaggtcaagattttttctcaatgattaaataacccaaaaacataggatttttaaaagccgagacgaaggttagcaattatattcggtaatagcttgatgaagagagattttatcggcattctcaatttcgggagaattttcaaacgtaaaattagcggtttttggttgtcaattgaaatcgtgccaaaatttgcttaattaatgcttgtgaattattctcgatggaatatgtcagaacattttcaatatcctacgtgataaccaaaatcccatttgctaattgatttactgtcctggaaaacaacaaacaaggaccaggaatacatagtattcaagaatttcaaggacggagttcggaccccgtccgaccatgagaaattccggtatttttgaatgatgctttttgagtgccaaagacaatgccgaaaacgaattttggccgaaatagtgaaccgcggtggcctctcattgagtcattttacttaactttttattattgtgacattggggcgtgtattttttttttaattttgcctgattaactaacacctctaaaaattttaattaaaaaatttgccatttttaagtccaaaagtttattttgttgttcaaaaatgaaaaaagaaagcacttttaatctctgctgctatgcatatatacttaaaagctcatgtgctgtgtggttgacgattgaaagtctatttttttcactggaaaaagtggcaaaagagaaaagtggcttaattgggtgtttaagaaagggacgaattattagcgaaaaaagggggaggacgattaaaattttgaaaattgcgaaatgaacaagtcggcaaaatatatattttttttgaaagttaaagataatatagaaaaaaattatttttaaaaacattgaaaaatagattgaaataataattgttttaggagacaaaaagaaaaaaaatcgtttcaaaatttgtaaaaaatacaaaatcatttaaaaatttataaaatggaatttgatgaataaatatatttttttaatgaaaatcattgcccctttattattgggaaaagaaatataaaattagtaattccgatttagcgagtcgatggacgttttggtgtgactagtaagtcgcgaccccaaattctcgggaacgaaggtaaaacgcttaaattttttttattattatttttgcattgaagaaaaactagcaggcctagagagagccctaactaactaagtctctaaacttgtcctattggctaccgtctaaagagaactatttcaaatattttgtatattctttggcatttcgcacacatttgtttaccaaaagaatttgtcctccgagggcccataatatatgaaagccccataaactatcatgcaattttcacttttctcctacaaaaaaatttaaaaaaaatttaatggtacacttaacgcgtgccggaaatgggaaatgaattctccccccccccccccccccgggggggggggaggggaggaagggatgatcaatgatcagaacagagtagcacacagttttctcgactcatccggaagttttggagacggacggatggacgggatgaagatcggagatgggatggaaattgcgatgccctcctccccccggcggggcggggagggacggcgacggaggtcgtccgcccttacccccc

SEQ ID NO: 10870 - DNA, 1139 bp, Heterodera glycines
ccccccccccccccccccgccggtcggacggggcactctttgttttgtctatgcccccgtccccctccgcttttccttttagcgcaaatgccgcgccggtggggcgagaggggcaaaaagcgcaggaagtaccaatcaacacaggaaaagcatgccggaggggatggaaaatttttttttcatttattttattgatttttgccccgtccgttgcaagagcagcagcaacagcagcagaacacacataattaattttaaatagtattaaaaatttgttgcttggtaaaaaaaaagtggcacgattaattaatgttcaattagcctatgggaatgcgatctcaaagtccaaaataggggctccaaggtttaaaaatatcatcaaaaaatggggcatttttctctgtggtggtgtcaaaaggtatcaccggaaaatttctcgaaattatagttcaatttcttaatagagagagatttaatccaaaaatttccaatttttttcttaatttttaagtcaaatttttggaaattttttaagcaaaatgagtattggattaattttaaattttaatgagatatatatatatatatatatatgcatatataacagttatttaaaaaattgtgaagtagcggataagaatccaaaaaaatttattcattcgggagacgagactcagttatccatcaggcattcaacaatggaactcaattggctcgaaaaatgattgttgggagatctttgaaaaaaagaggccgtttatgtcgtcccatttcagtgagggtcttcattaattaaggattattacgagacaaaacattcgttttataaagtgtcagggctatcccatccatcatcgattattggaaatgccataaatttcagaaaaaacatattagttatgatatacatatttggctttaacggtattatacggtaaaaattgtgcccaattcaaaaataaaaaatgagttccttatggagtcgagacatcgatcaatgtcaataattagcataaattgagaacaaacaattgagcattatgaaacaaacactttgctaaaagccaaaaattgaggaaaattcattcaaaaggatgggggcatagccaatgcatatgatatttgtgaataataataat

SEQ ID NO: 10871 - DNA, 1591 bp, Heterodera glycines
atgattccgggttgaagccctgctgctggggataatcctccgaggaatggacagattatgaaaagattttagaggacattatgccttaaataaaaggaaaaaagcaagtgtcaataataaaaacaattttttgaaaataagaataaataaaatgggaaatattttaaattcaattaaaaaaaaattaattaaaaagaaatatttgaaattacaaaaataaaaaataaaaagaaatatttttaaattcaaaattcttggcactaaaaattcggggatgaagttttaaaaaaaaaattaatactcgggaatggaaatttgtccaaaaacacggtgattaaaatttgtatcaagacatgacgaattttgtaccaagaaactcgggaatagaattttgtaacaggggctcgagatcgttgcaccaagaaccggagaatatgacaaatataagcaagactcgagattggaatttgattaccgaaaattgggagctcgagattgtgtaaatacgagaaatgataaaataaaaaagcaagaaaagtgctaaaagattaagaaaagatgacctattccagtgacgaaatcgcatgtactaatcacgcaattaagtgaagcaacagaatcttctcattaaagcagctaatgacagtaaaaagcaaatggcggcatgaaaatccgaacaacatccccaagggggggcggggggggggacgcaggcagcatcaattaattaattggcgaacgcgagaaaaaaaaacatctccctgggggaggggaacgcagcatcaattaaataactaattgatggatgggaaaaacatctcccgcttcccccgcccctaatcacaatcatcatcattaatggaagtgtcaagtggtcgtccgtcagcttatgcgggaaaagttgtcaacggtttgtgtgaaaagcaattaaaaaacggtgggggggggtaactggaatgacaaataaacaaaaataacacacattaccatcaccatcacaccacacgttaattagtgcgcgagaaagtgttcggaatcgagagcaaaattcctcgagaatcccccgctccattttttaattggtgggtcacaatttggtgttgcgagttcttgagggaagcgtgataagaaaaaatatatatgttgctcaaattctcgaatttccgaggtaatcatcccaattctcgaaaacattggtttgctgatctttgaaacaaataaaacttgtcctcgagtaggggggggggggggagggagggccagatagttttttttgcctaattaaagggatcgaaaaattttttcgtaattttggtctattaaaatttcggaaatccgaaattccagaaggccgaaaaaagccgtcggatttccgaaatcagaattttaataaaattctgtacaattttggtcaagtttaagtggtcaattctcttaattacttacagtagcttaattgtcgatatgaaaaaagaataatcggagaatttgattctcgaaggaattgtcgattaagcaaatttatttttcaggattaacttctcattattgctcacacgagaaatatgtgtattaaaaatttcgtaattgt

SEQ ID NO: 10872 - DNA, 1773 bp, Heterodera glycines
  unsure (1)..(1773): unsure at all n locations
taaaaaaaatgatgcaccattattgtttatagaacagaagtgaanaccaattattcaccacttttttgtttttggttttgctgttgttttgtttgtgcggttggaattggcccataaactgcctaattaggtaattagtgagcgggttaattgattcgtcacgcttcctcccactgtcccccattcaccacaactcaaatgatgaagagatgataatgatattgatactctctgtatcagattgttaatgagatgatttgcggaacattaattacccccagccccctgaccagcccgcccattagtttaacgagtgagtccaaacaatcagcaccaatcacatttcattaaataggtaattagatggtgcggggggattcaatttccacaggaattgattcaatcccagtggacacagtcgacgagagttttggtctcgagacctggaccgtacaaaaaaattggattgtttaatttgaagtaaacaaaaacacgcgaaatcggcggagggggcacaaggtataaatatgtataaacatttcacgaaaaaaaataagtagaaaatttcgtaagattcgtaaaaaaaaatttttggaggaggcaaattgaaaaaacttactctatgccaaaatgaaaatttttgtggcatttcagtcgcgaattgggacattttagtgcggacaattttgggtttcttggaaacaaaaaattaaacatagtcttagaatgatgatttgatggcatttttaagtgttctgaaccagcctgtaaaatttataaaaaagttttaaaaagtttcttatggcacagaaaatgtaaaggaaatttaatttttttaaatttctggtaataatttcttaaaacataatgaaatttttcgaaaatctgaagggctaatggaaaacaattaatgatgtcaaataatacacattattatggtatttaattcgatttttctaaacaaaaatctaacaatgtttccaaattactaagcccagaaattaattgagagtaatggtcaaaattggattgaaaccattgaattcgggaccataaaagggcagaaaaaaagtatgcaaaaattaaataaagaataaaaatataaaaaaataaatagcagccaaattttgagattttggcgcattttttcatcaaaatcagtcgaaattcccccccccccccaaaaaaaaaactggcccgaaccaagttaaaaaagctaactctgatgttgatccggaatttttaaaaatttcgggctttaaaaccttaacgaggggtcaacaatttactcattcgtgtaaaggtactcgctccaacaaagctcgagactcttgaagttggcaggaaaagccaaatcaaattccaagcaaaaaaaggacaaatgggggccatgcaaaaaaaaatagaggttgattgaaagtgccggatttaaattcaccgcaaaaagttttcccgatttttattgaaaatttttttacttcgagcgagagaaaatcctgactaattaccgaaatgccgaatccgggttcaacataaaaaaaaaccgatgaaaaataactgatattggctgataaaaatgaatgtttttcccattagacggacctccaccaccaccaaatgacaaaatgggaatgaaaaataatcgattaattattggacacgaaagaattgggggtgggggggggagacaaaagagattatgttgccgcactattgacgcatgttaacaccggcggcggaatatgtacaaaaaatatgatgatataaataaat

SEQ ID NO: 10873 - DNA, 1242 bp, Heterodera glycines
gggggggaaaagaaggcggcgagatcaaaggggcgggaaggcacaaagagacggacaaaaagtggttggatgggtgaatgaattattgttgttttggttatgttattgggtgttttgatggcggctaatggcatatatatatatacatacacacaagtgtgagtttgtatttcggtatattgatgaaataaatgtgtgtgtgtcgcgacgatcgctccccggcggcggcggggggggggggggggagtaattagggccactaatcgcgggcccatagggtcagagtccgctgtcacccgccgctcgcccgcccggctgccgatcgatttgttggcggcaacattttttgatgatgagacgggaaaaatgggagacagagagagagaaagagaaagagagagtgtgagagagagaaagagagggtgtttgagtgtgagctgttagataggggtgatatgatcaacagagaggggcagtgaaattgctagtggttgtgccaaaagaaccatgaaagaatcgagacccgagtttggcgagaatcgacactctcgcggggcagtcccagtggccgggagtggccagtgtcggcaaaagatggcgatcgagagtgcgacagttcttgagggaaatagttctgtcgagagtgatcaatctcagcagaggtggtgatcgtgagcgagatagagttctcttacgaagtatgttctgatcgtgaagagggagaaaatggttagctgtcgagaatgttcagtctcggtagaggagatgatcgagagtaagacaacgggggaagaagaaaatagttctgtccatgagtgatcagtgtttgcagaggaggcgacagagagctagattttacggtgtgttctgatcagtcagtgaggtttgggagacagtctcaaaagtcgagagtgatcagtctatcttggcatggaggtgatcaaatcggaatttacaacatcagccctattttatttagtgtctgatcagtgagcatcaaattttaaaaatggcatttttgaaagtttgctacgtgattaaatcattatgtcattcattttccattctgtaaaaatcagttcacaaaagtgtcaacaaaaatttgtgacgtgaaattttttttttcagaattttcaaaaaagggcggaaaaaattgggcggggagaaaatggagagatggatggggcgcgaggggttaatttaaatgtgaaactggaaataatgcaaagaacaaaaattgaa

SEQ ID NO: 10874 - DNA, 1518 bp, Heterodera glycines
accgactcggtcaccgcagtcccatcattctcctgatgcttgttttgtccgttccgttgttgttcatctactctggccttggttcctcgcgggttgagcacgttattggcatgtctttgctcggagtgaccatctcgggcccatacaatctcatcgttggcacaattgccattgatttgggttctcagcaagccttggccaacaatgctgaggccctgtctaccgtaactgggctcattgatggcattggctcggctggctccgcattgggccaactttttgtgccgttgattcaaaatgaacttggatggatttgggtcttccatttttttattttaatggtaacaaatcatgggaagagtcaatgcgagcttcttttgcccttcagaactttctttcatccatgtgccttatccgtcgtttcttccacgacgctcggctcatttccctttcgtttgctccgaggcaaaatggtcgtcggcaagagaacgagccgctgatttcgaataactgaactgaaattgctattgtatttaattcatataatgccaaatatactcttaagtcgccaaatgatgtaaattttgtttttgttgacttgttattttgcaacacattccataaaattgccacacattaaaaatttgaatagctttttgaccaatattattttttgatgtacatgaattttaaatgaaaaaatagcatttctgtacggtcgggttactgttgttggtcgggggaggggcggagaattagcatgctccaattcgtcccctccctaccgtattttttcttgcactttcctcattatttggctgccccgccccaatgattgactgcgcattttttgaccatttcaataatttcatctcgccgaatcgagtcggagtgaaactcgaactaagcgattcgaatgatttcttccgccgtttttctcacattttcgtttggcaaatgccccactttcagtgtttctcctcctgctcatttctcagctaatggcctttccttctccgcttttgcctctgtcattttcggctgtcccttctttttttgattgccaaatgcctttttttccttttccttccgtccatttcactgccaacgatggaagaagcattttcgaacttcagccccaaagtgacttttggcatttcgattgggcttttcctcaaatgaattcgccaattgaatcgtcgttttctttcgtcgacgctttcggtggcttcgatctgtcgcctttcgcttcgttttttggtgccattcttttcattagctgaccacggacaatgccttaatttgtgcagattttttcgactggactttgctcgaagggttgggagaagacgaaacggaaagccaagcgaagccaatgccatctgacagaagttacgtaataataagccgggactgatgatggcattcttttctcccattttagggaaacttttgggggattcattccttcccccggggccgcttcgtccatcttcactgcttcttcccccggggccg

SEQ ID NO: 10875 - DNA, 3150 bp, Heterodera glycines
  unsure (1)..(3150): unsure at all n locations
ggcttcgatctgtcgcctttcgcttcgttttttgctgtatctgggacagcagctgaccacggacaacgccngaatttttgcagagcacngcgacaggacnccgcncgaagggangggagaagacgaaacggaaagccaagcgaagccaaggccancggacagaagagacgnaagaagaagccgggacggaagacggcaaacagngcgcccagacaaggcaaacaagagggggaaccacgccggcccccggggccgcnacgaccaacaacacagcaacngcccccggggccgncgcagggcccagggcgccncaaacgaccaccgaacgcccaannncgngacgcggcggaagnccgacgccaccgccaccgcagacccgngagagcgagccggcgacgacgaccgcacgaaacgcgaacaagaggacccnacggcncccancngagancagggccaaagggnngggaccgccgagggcaacggacccgaaattatgccggagggctgcacgtcgaagtcggcacgaactcagccacaaaaggacccatcgctgcaccgttggaggtgaacgaaggagcggtgggaattctttaattgggtggacgaagtaaacatattataatgatcactgatcactgctgatcaggaatttgagtcggtggtaatttttactgcctttgtgtttttggcattgcgttcatcattaccgtccgggttcgattttggacattttcccgtctctatcttttacatattccctttaccattttcgcccgtctcaccaagaattcattttggtactttcatataactttttatttatttattattcttcctttgtccattgtttggtttacgcaacttaatcaccaaatatttttcatgaatttttaaatatttgtttttgggggattaattcggggaggagagacgaacaaatggttggtcacccattcgttcattcattttttgtttacttttgcaaaggattaaaatggtgggagatgcgattgtatggcttaaacgcttatagtactaataaatgctgataaatgaaaattgaattggtcaaatattttaaggctgtgacaaagtgtacaccaaaagttcgcatttgaaggcccaccaacgactgcacaccggtgagacttgtgcttttggcacttttgtcggtgtcaaatcggtgcttttctgtccattccttcgattggcctttaaagtcaacaattgtcggtttatgtttggcggcgctcaaaggccattcattcgcgctgactttgttctttctctgttcccctcattaagtgccttcttcaccagcgaaggacggcctattggggtcactcatcagttcaaccaataacctcaaacagttccgtcccatcggtttttttttgtttttgtttgcgcacattctttgaaggaaatcggaaatgcgatcccaccgcaaaatcaaaactattgtaattaggaccaattacaagcgaaacgaaggctaatgagagcactgaagaaagggggagagaatgggaagaggagagggagggaagagagagagaggaagagagggaaggatggagggaggagtgaggaatgaggggattagacagactggatcagtatctgagttaataatgacaaggggaggaagagtgagagagtaaaagataggggagggaaggggcgttgattagcaatgcgatcaaaggttgatcagcagtcagtcagccaattattcaggcgaaaagccatacccatgcccattcccgaaatgccattggaagttttcacgcagtgatgagctcacccggcacattcgcaagcacatgggcgccaaaccattcaaatgtgcccaatgcatgcgcagtttttcccgctctgaccatttacaggttcagaggaagagggaatcccgaaatatcgcaacagttaaagacaacaaacactttcagttgcacatgaaaaggcacggaggaaagcgctgttgaaagaaagaatactcgttgaagatcattgccgttcattttttgacgagtttttatttagatatgcctttttcacctttttcttacgtttaaagtctgttctctaattatttttgttatttggatgtagatttgtttcatttaaaaaatgcctgaaattttaaataaattttttaaaattaaaaaataaataaataaaaaatcttacgaataaaatgtgtttgtctaatgcttcacatgccaattcttttgtgtgaatgcgtgcagttcgctttattcccttttctctgttgctttttactgtcgcattcattttgctgcttttggacaggaaattaagcacagtaatgccatggaattcgattcaattcagtgtgcacttttttaggaatttagggattttcttggtgaaaattggcaatatgaagacggcacgaccgaccgattggccaaatccgcacaaaatcggattcaaagcacagcttgcaaagttcagctaaggaatttcctccatgacatagcatttaaaaggcattggccggtcaaagaaatcgcgaagaattgcgacgatttgttcggtgcgtttccttttgcttttgcgttcgcaatgcattttttccattttcacaaatattttctttgcagaagttccctctgctgccaatgctttgaaattccgtccgttttcccccggcacttcccatgtcaaaattcttttcctcctccaattgaatgggagggattctcgccaactccgccgtctcttccgttcccttttcctcccccgtcacttttattttgtccacgtcgacagtcgccgcgaatttatgctgaaaggtgaaacattcagcagaatggttctgaataaaatatttttgaagaaatgttgaaggtcgaagagtctttgagggcggagggattcgcaaattttcgcgtggcaaagcgtcggatggccaccatttggggagggtcgaatttgctcgaccttttcctttggacggtggcggaaacactcggcgaaacgaattcgaattgggcgcaatgggattatattgtgaatctgagcgagacggacatgccaattctatcagtggaagagttggaacagaacttggccgagtaattcaaaatgaaacaatctcaaagtgttcatttcctccccaag

SEQ ID NO: 10876 - DNA, 1719 bp, Heterodera glycines
gcatacatgtacaaggggtgcgccatcaaaccccccatacgtcggacgtttggcgcaggggggggggggtgcgccaggaccaatttttcttacgtcggcccctattttgccccgttgaagaccttcttttttttgctatttaaccatgttttttggaaaataaattccgcgtcaggactaaataatgcttttgttcgtcattttatcatgatttttatgtgagttaggtgtatgtcgatatgtgtcaaaagcctagcttcattccccccgtttccctttcaggcgcaatttgcccgtcaacctccgtttggacggtggctccgattgggtggtggtccaccgcgacttggctctgttcgccatttccgactctctcctgccctctcaattgcgtcttctcttttcttccgtccttttgccccttgaaactttcttccacactgtttgctctccctcttctcttccgatgcttttccgttccttcgtttagcttgccctgaacagtgccaatttctgtcgtcggattgtccgtcgcaatttgcgctttaccaattggcgtcgtcgccagggctgtcgctgtgccccgttaaagtccgtcgtcgattggtgcggctgttctccgctcgcagtgagtgccaacgaattgggcaaattgtcgttgaatcagtgagcaccaatggcataattgcctttttatggcattttccttcctccccctttagttcccagtccaaatttcacttttttggtcgcaaattcgattctgccgttgatattgctcccattgcttttgtcgaacggcaaagccttcgcttccgtgtcgatcttttgccctcccaaagtgccgtcttttccgcccattggctcaatttgttctccgccctttcgccttccgacgttccgttcggttggcattgactttttccttttttaatgcaattttaggattaaatgccgagcttttgacgctgttcacttcatccattgcccgttttatgttgccgaacaatttcatttttcaacgtttgcacgactttcacatttacagagaattttctgcgtcccctctccaaacaatcgcaacattttccgttgcttttggtcacactaattacttaattgaggtaatttgctttttgagtttcgaatcctttcactttttccttctcaggcactgattggccagaaaagggactctttcgcaacttcttctcccaccgattttgaggtcatcgacgaggacatccgttttctgttcaatgccgaggaaggcatcgaaattgggctcgacttcgaccacaaagaagagattttccgaacttttccaccgcttctctctccggtgatttctccttttcaaacccattaaatatttgtttttagagttccaagttcactttgaaatggcgttgggttcgccttggcatcgctgccgatggccgtgccaaaaggacgagtccccccgctgagctgctcttccgtgggcccaatggcaccgttttccacaggatggccctgccttcttacaattctttctccggcactcaattcgcacagttcgaatttggccgtttttctggcgtttcccccggtatttcattttccggtcgctttccctttgcgcttaattaattattcggtggtttctcaggtgtttggtccgttgctttgcatgccaacaattcccttccgattgccctcctgtctttccccgtcttt

SEQ ID NO: 10877 - DNA, 936 bp, Heterodera glycines
  unsure (1)..(936): unsure at all n locations
ttatttaaacncattttgaagtaaaaatgtaaagtttgaccttcttaaatttttgacctattattcgaatctgggtcaggggttcgaatttggtcgaaattgatgtcagaatcggatctccgaccctgaaaacccctaaacaactttgtttctagaaaaaaaaattaaaatttttcaaaaaaagggtgcggggtaccatcgacagtattacgaaatgttcgaatccgggttcggggttcgagactgagacaaaataaggccggattcgtgctcggcgcctaagattacccctaaaaataattttctcaaattttattaaaaaaaaattttcgggaccaataatctataccattgcccgccaaaccattgatttttaagatttttttttgaaaaatttaatgtttataattgaataccgtattttctctttttatccctccggggggattatttttcaacctcctcagaaagggggggataattagacacggggggataaatggagaaggggggattatttttcgacagatttattttgtgtaaaatttcggactgggacactatagtctggcccttatagtctgagccaagtttagagcatcataacttttttctttactgaccaaatccaacaaagttgatatcattcgaaagctcttaacaagctctatcagcttcccaaaaatcgcaaagatataccgacatgtaaaaaagttataaattaaaatatgcaaaacttctgactttttggtagtattcatcttgcaacttttttatagggttttcaatcgcttagaaatagcttatcaacagcttctaaacatatagggctttagaatgatgccaaatttataaaatttggccagctgagaaaaaagttatgataatttaaacttggctcagactataacggccagactatagtgtcccccaccc

SEQ ID NO: 10878 - DNA, 2425 bp, Heterodera glycines
  unsure (1)..(2425): unsure at all n locations
cgaagatggtaatagttacagtattaatttagttgaggaacaacgaaatgaccctgagattatggcatacattgaatttttaaccaatggacattttccgtccgatttttcagaaaccgagaaagaccaattctgctctttagcttctaaattacaagttattttcggcattctgtacttcaaaataagcagtaacattccacgcatttttgtaccagtttcgttacgatctcttatttttgagtctttccatacgtctcctttaggaggcggacacatgaatattaagaaaactttaaaaaaatgtaaaaagtattgtaaggattattcgacgcatttccctcatttaattattccttattggccattatcaattcaatcacatttatccattttcacacgtttttcctttacttattgtaatgtttctccgccccattctcttcgtatctctctttccccagtgatcagttagtcagtggtgatgggacagacttcaattattattccgatttctcgcttcgtttaaatccaacatcgaatgaataaatacatcttaacagtcaatgagtcgtttgggggttcggggcttggtcaaaggcgccttggcttttccccattccctcccaaactccatccgggataaacggtgcatagttggtctgggggcacagtgcgcatccctcactggtagcaccggatggttcccattttgggaaacgacgacccatcattgacgacgaagctgagaattgggtaagccggcagaagtttgtgggagatctccctggcctgagggcctgaaacaaagacgtgtacacgcaagtaaagaagtctgacattttaaatttctgtccgggctagtcgaagactaaagggactttaaaaagagaagaggtgagaaaatctgtccgggctagtcgaaaactaaagggacattgaagacgaagagaaaagaggtgagaacatttgtccgggctagcgaaaagctaaagagattttacaaaaaaaaagaagaacaaaatttgcccgggctagtctaaatgctaaaggggctgactgcatcgaaaattgacaaatttgacaattatttgtaggagagagagagaataaggaaagagagtgaaggaagccaaaaataaccaaaaaaaaagtcctggtaacaaacgaataaggactaatttataaaaatatttgaacgaatgtgaagcaaaaaaaaaagagagagagagagaagaagtgagacaaaaaaaaatatagaacaattttttgaggagagcaaaaaggcccgggctgataaccaatcaaaggggcactattttagctaattaaaaagagggaccaataaaaaatgaaaattaggccctatcaagttacagtttttacaagttccaaagttcattttatctctttgttttctcccgtttttcacgccataagaatattcacgtaatcacgtgccgccgcatttttcattgggcgagatcattcactttaaacatttttgcggcgcctgagaattgttaattgttcttgttaggcgaagtttaaacggagatggagcagataagcccattcctggaaggcgttcgcatccatttgattacccgctatcattcattaattttttttttctctctcaattaatgcataatgggattaccaaataattttttttagcaaaataaaacaaaatcttattacgaactgaacgacttcgaatgtctacatcagggggctcgtcaaatgagttcccatttggtacatcccaagccttcgggcaggaaacaaagatgtttttgagtggaaaggatgatgagtcctcgatttcggctattgataggaaactttggcaaggaaagaccacgataaaaatctctgatttagaaaaagctcaaaatgatatggggaaattagaagatggagtgaacagagcttttcgctgcctgaatcgttccttgaaccaaaaagtcaattgggtgaaagatgtcgtggccaatacaaatgccaattttgagactctgaaagtccaattcgagaccctaaccgaaagagttgatatgttggaacaagacagtgatgggacggattcaggtgggactgttagtattactaatctgaatagagcgtcgcgtgcaccgtttgtgacgccaatgggcaatgcacagcccaaccaagttgtaccgaaccaagtgccaattcatcaattatcaagcgaagacgaagatgacgggccgactctttttgacctgaacatgctctcgagcggacccacagtggggtcaggtttggaaatgttttgtgaggagtctgtttttgcatttgacgattgngctgaacgtttcaaggattacctgtccgtgtcaggcaaggcttacactgaacaagaaaaagtcacaagactcaaattggctctgagggacac

SEQ ID NO: 10879 - DNA, 2194 bp, Heterodera glycines
caacaatggtacgtgggtttagacctttttctggatccatgcgacgagacaacaacaaagaggaagaggaggacgaggccgctctcgcaattggggaggaggccgccaggagcaatttagccaaagaaactggtcaagcaaccctcgatgccattattgtgaccgtgctggacattttgcgtacaattgccatcaacgccgtgccaatttcagaggaaattccaaccaatcgttccgtcaaggaagatggtcaaatcagcaacctcgccaatctcagggacaatggcaaaatcggcagaatcctgttaacatgatgaatgtgccaaactcttccaacacttcaccaggatttttcgagaacttggcccagtcgttacttgacctcaaaattcaggacaatcgcaattacaaaaatgaggaaccaagatctggggcaatgaatacgctcacacacatcaaacccaaaacaacagcaatggattgtcaggtcgaaaatgaattagcaaaagaatcctctagtgaatccccagcctgtgggccggaaacaaagacaaacattcccaaaacgtcaaattgggaacggccaagcgtacgatcgaaagtcgcttctttaatgttcattacatttatgcttgttggaatgattttaccctttactactgctaatatgccccatctgccaatgcatccccttgtctgtcaaacccaaaacggaggaaaaatttggcaattgccggcagttactggctgttcaaagctgtcaattgatcattcaaaagcacctgttgttcgaactttcgatgtcttttcgccaaatttatttgagcactcggcagatgcttgggcttgccgaaaagtgagaaaatccgtgcgtaagtacacttcaatcactaatgttacgatccaagagactcttgaaccacttatgttgcaaatgactccgagtgaatgtaagcaaatggccgaaaatggaaagtgcagcttaggcttgctaattaatgactcgggactctcgcatactgacaagaaattggatttgtcaccccgaatgtggttaattggttcatttagttggtcgactgtctcaactgaaaattgttatctttttaagactaaaatcatgtcacaacatggtagcacaattatgctaagtccccttgggtcagtgaacaattgccaattcaaggcaggccaatgtgaaatggaagacaagacattgctcatgtgggatacccacactacccgtgcctgtgaattttcaaaaattggcacatggaaaggactacaacttgacaatatttggatttcggatgaagtcagttttcgtttgacatttttgaacaacacaaagaaagtcaactcatgtggtctgaatctgataaaatcggaggaaggatttgctgtacaagacttgccttccgacgatagcaacgaatcctcaaagagaagcagaaagacgagatcacttgaaagttgggtcaccgaatcggaaatgaactccaaattgggctatttggatgaacaagtaagagaaatgctgactatttccttttctcagacaattaaatcgatttgtgattatatgttggagacgagaagatgggcagcgacggcacttctctcagatccaacaacttttgccagaaaattattccaatctggtaaactggtggcaaaagtggccgggcctgaattgattaaagtgtggccatgcatcgaattgcaaggacatgactacgaatttgccaaaattggaaactcagcggattccgaattcgaatgctttgacaaaattccaattaaattccgagtgaaggacaacaaaagaatggcatttattgacccaaggacaatgattttgagctccgatgcgagactggcaccatgctcagaataccgcaaacagctcatttttgtgcgtggttctctttatgaagttgatcaaatcgatgctcaggtcaaacaggtgaatgccaatcgcattgacggtttcagccttaatctgtcattggcaccgacttatgctcgccattcctttcttcacattgccctagtgaatgtgtctgactttattggccaattttacgacgccaatttggcaagagaaaacgaactcacattccaaatcaaaagtgaggacgctatagtcacaaagaaaagtcgaacaatgggagcaggtgagtgagtccattcg

SEQ ID NO: 10880 - DNA, 915 bp, Heterodera glycines
caaaaggcacaaaaaggcgcttaacaaagcattgccgcaatttcgtagcgaaatccagcacattgcttttcactcagccaaatttcggcggattttaagtagtttttaggtgggcgcaaaatggtggcctgtgccgactcaaaatatgcaaactttgactggttttccatgcgtttcgactgatcaaatcggagaaaatctgccaaaaattaaaaaataatatttaaatttttggagagcatttttcaaagctattgtgccaaaaatgccccaccaaaaagcctttaaatgatggccaacacttaccgttttcctttacacatgtgtccatgcattgtttgagcccctcgaaaatgttgcgcgtctttccgacacatccgtcgtaccttaaagcaaaaagccgaaaatctttagcaacagaatgcatcaaaagaccaaaagtgccggcagaagccacccatggcgtcgaagtaccatttgcgtgtccaacttttgccgttgttacacgcgcggcggtaaatgtcgtcgaagggctgcgcacaaattgccaacgatgccattagcggtggtgtttcgaaaatttgcaattttaattggtattttttttttaaattccattggcaccttcgaccgccgctcggatttcctgtgccgttcccagccccgccgtcctttgccgttccccccagtgcttctcgaccccgttcagttcgcatttcctgcggcatgtctccgcctcccggaagttgttccgcgtttggcccgtacatccgtcgttccaaaagggacggcactttccgctccgcgcatcgtaaaaaaagcgcgtcctccaccgcatccgccccacacttttggtcaaattccaatcgaattggtcccaacatgcttctggaagtggagaaaatatgatcactg

SEQ ID NO: 10881 - DNA, 3173 bp, Heterodera glycines
agtacataatatggtaattatattattattgacagaaataagtgaggtcattaaagggttgccgcgggacgagaaaaatgtttaggcttcgtcatgctcaagctgtacctggtgaagtgccgcctcgtctctgctgccctcctccctctccctttcgcacgcccttcgacagttttgcacatgcacaaaaatgttgcgcgttcggatgccgcccgcgcgcggcgtcggacaacttatatccatccaaaagacgcggcaatagccaacggcagcgtcaaaataatagcggcgtttccaaatgccctcggcacagtgctggcgaagtgactcatcgaacgggtcgaaacaggggtcttaagtgggagaagaggggtcattacagtcgaccaatcaatcggtgagataatccgtgccaaggcaaattatgtatgcaaatgctggaaagtcccaccggtccgtaaccttagcaaaactccaaaattcgaaaattatttcgaagaaaatggattattatggacaccatcgatagattaataccgtgcatttttttctgttgttgcaccatattttgaggagcattatgcgcaatttcattgaaatattcggcacgcgagtagccaccacaaatggactcacaactcttaaaagtgctaataaaaatgctaatttaaaataataattaaatttcggaatattttcctcacttttttgtcctggaaaaagttgtgactggcgccaaattggcacccgccgtaccaaaagtgccggcattgggccgacgccaaatcgaagtgaaagcgcggcacccacagttgcccgggttggcattggcgttcgtagcgaacatcgaacggttgggcacaaattccttaaaaagcgaagtttgaaaactacttttaattagcagggaataattaattataattaaattatttatttacttcgattttttgtgcaattgaatccgctgcccgcgaaacccttgcggcattcacagcgaaatgagccgggcaaattcatgcatttggcattccgttcgcaactgatccaatcgcattcattcgaatctatggcaataaaaatgaaaaaaactttaaaaaaaattaatttaataaaataaattatattgaaaaagatagtcagtaattgcgctgattagtctcttttaccgatgcatttgccttctctcttttcatatccgcttttgcattggcaaattccgttcacacaaacgccgcccgcccttctgcaattttccacgcaattgttcctttgtcggtcattttctgcttctttaaatttaatatattttatataatttaattaatttttcaatttttgcccactctttcgctccgattggaaaacagcagacaatcgaaagtcgggatggcactttctcttgcaatgacttctggtacgaaagcgatttgaattgccattgcagccgctgaaagcgaaaaaatggaaaatgaattggaattgcggaaaatggcatttgtgccgaaatgacaacaaaaaatcaaagataaattaatcttttggtacgctctaagtgattagttaatggcttttcaatggtcgagattcccgatgtgaacttttggcatctcaaaatggcacatacgtgtaaaagaatctgaagcaccgctgtttggacgagttgtagtaaaaacgcgttaatttttccgtgcaattgccaagattgagcggcatctgaacaattaattaaaaaatttttattgtgcccccgtccgacattgtgccgtttgttcactcacctcacaaattctgtcccgttttgcgttccattcgattgcattttgttgctccgcatttgcattgaaatgagcgatgtgtgcggcagtggaaaagcacacgacgaggaaaagcggcagcggaagggacaaaacggtgccgaaatgcatggggaaggagagaagcggaagaagctaacacatattagcagacaatgagcaattaattgggaaatgccaatgcaaaggtgtgggcaggaagaaaatgccggattaaaaggctgcaacaatttaattctgaaaactatcgaattaaaaagtgtgggaaaattggtggaaaagcagaggaagaagaacgggtaattaattattgtaatggacgaacggtcgtccgattacggtacgataaataatttgcatttcagttccatttaaatcaaaaaggtatttaagttatttttaatttaatccttatttattttttgttcctccgttttagtgtttctcaaaataaactttccttttccttcttcctcctccatcttcgcttctgttgttgctgatcacaatcacttcacatttgtccaatcatttctatttttatttgtcccctttttccgctgccttttcccacacatttttattttttttatttattatttttatttatgccatttgtatggaaatccttcattcccacccccctcattcattgtttcttaccaaacagcagcagaagtgatcaaaatgggaaggaattgaagaaagacggactcttctgactttggaagggaagtcccatttggccattcattcatttattatctttgttggccatctttcttttgtgttttcgtttatatccattcaaatgcaaatcgctttcacaagacaagcgccatttaaatggtgccattttcgaatttccgaaataaaaaagtaattagttgaacttagaaaaatttaaaagaaaataaattgacaaaggaatgaatgaatattcaaatgcttttaaaatttttcttgcttaatcctccgctttaataatcgttgttttgtcccccgaaccctttcaattcgctgcttcaaattgccttttcccggcgattgcatttttttgtcctctttttgtgccattttggacaccatcactatcattcttgaaacgtacaaatgtcgagtgttttgttcgagcaattccatttacgatttgcaaaaagagtagtcattcagactgggccgaaaagtgatgagaattgggatgagattgagtaggccaaacaagtgaaaagcaacccaattttcattatttcggcacttttcggattaggtatttatttatggcattggcatgggatgaggtgctgctggacaaagcttagcttaacaagttggagaaagtgagtgcgcttttta

SEQ ID NO: 10882 - DNA, 282 bp, Heterodera glycines
cgccgggggggggggattcaaaaaagagcaaaaagggacaagcaaacaaaacaaagagagatgttgtcataaccttgtcaaaaaatcacaatttgaattgatcattgatcggaaaaggtggcaattgaaagaaagaaggacagaataataattagggaaataattaaagaaattgaaaaaaatatatatgtttaaaatcaaattcgacttttccctcgacttcggtccccgactttttaatgagattcattttcaaaattaaattgccactgaaaatgacca

SEQ ID NO: 10883 - DNA, 2681 bp, Heterodera glycines
cagcaacaggtggttatcggagtcgatcggcgtcgatgaacgtgttgaccacgcccgacaatggaaagtcagcagcaattgatgttcaacacgtcaatgggttccagcactaataataacaacaacaacatctttgggcacagcatgcaaagactggtgattaacttatgcccaagggttttaatacgttttttcctgagttcccagatacatgaaaagcgtgaaaatttgttttagcgactgatgttaagctattactttttattattttaacattataaagaattctttaaaaataatttttaaaaatattacatataaggagaaagataaaataaaattttattctaaaccccaacccattgatcagcagacttcgccggatgagagtccgttggatcatgtaaatgtgcatcaacagtatgcagtttcaacatatgcaaataatgagcaacaacagcaacaattgcttttatctccgtcaccaccaaaacgcagcgcatccttcacagatatgtgcgcttcctatcagcagatgaacattcagggtgggataaatttaaaaatatatttttttatgtaatatatagcatttattgggttctgattccagaatttttggataattttttgatgtttttaaaaagatttttaccaaaaagataaaaaatcaatttatcataataatttatttatgttaaagtaattaaaaagaaatctcgcttttatggatattaaaaatttaaaagggttcattatttaaatataatctaattattttaattcaattaagaaaatatgcaaacaaatgtgcaagtgactgaaatgcaacagcaatatcagcagcaacaacaatttcaaattcaacagcagcagcaacaacaccttgaagggttttttgcgcctccttttgcatatggtaatttttttaaaatttattttagattttattaaatcaatttatataaataattggttaattttatgcattgaacttgatccggatggaccacagccaaaaatatctttggcaaatcagcagcagtcggcagcacattttgccgcatttaaaggcataaattaatttagaattttttaattttttaaaattttaaggaaatgaacttactccaataaatgaagacacgccacgcttatatttggaacattagttggcctggcatattgaaaaaaggacattttgtcaaattaattttaatgagaaaatgttgcaaacagtacaattaacattaatttaaatattaataaatataattaattttaattacaaataatattgtatctctctcttctgtctacaattaatgatgattatgatcattcttcgttggcattttgctcatctattttttgttaaggtcattataacaaataaaaaagcgcattatcctttttatggcttttgttgttggtcaaaatgatttctaattattaaaatgaataaatattctgaaatgctttgtcagtcgttttagaaattttagcaaaaattggaaattaaaatataattttttttctttcgaattgtgaatttggaaaattcgttcaaaaagacaccaaaactccctaattttttgctattattgtacattaacaaaattaacgaatttctcttttgcttttttttactatttattgaattctaaacaccttaacaaaaacaaagggtttgagaaaaacgtttttaaattgtaacacaatgggacataaatgaggggaaagagaaaaagagattttttgagtaatttaatattttaaaaatttctttaagtttttaatctcttcaggttcaagagtttcttcctgttccattttttccatcaaatttttacatgaaaaaatgaaaacaaacaaaaagaacagtaaaatttatttgttaacaaatacgcatgataaataatataaaaaactgaaaataaatgtgaaaaaataaagtgaaaaatgaatggataatgaattaattaaatgaatgattaatcgccctttccgttgtttcttcggctttcttcaaagagtggccaaattgaatttgaaacttggcccaaagttcgcctcaattttgtcgccagtccacagaaaacactatttcattctgattgattgtcgttgaagaattttccatttaattcactgatttgtgaggataacacttggtcgcttaaatcaaaaatggacaattgatagggcggtgagttttaagaaaactcgacgagcagcagggagattaatatttttcattgcatatgaaaacatttttacgcgtccttgggtttcacgaatttttcccgttgtgtccttgaaaatcagtatacctatcgttcattggaaagcgaatttttccaatggcagttcgaactaaattaaattcttgaattactcgaaagaaagctgaatttcgtcttttctcaatgccagagtatttatttttttttatatttataaaattgatgcccgaatgttgtctgccttttttttttgggggggggccgctttttcggcgccagccaaaagttttcgagataataaatttttttttgttgataacccattcgaaaagctttttcatgctttcgctctctctagccattctacgcgattagacaattaattacccaacagttataacatgtaaatgcaaaaaatcgtttataacttttttg

SEQ ID NO: 10884 - DNA, 752 bp, Heterodera glycines
gtaaaataaaggtcatattcgtgaccagcgccacaaattaccctagaagaattatttaaaatgtcttttgagtgctttttatagtgcagttacttgagtgccagttgagtttggcactccaattctggcactttttcagcctgaaaaagggcaagcgcgcccctaattctatttttacataccatttcaaacctttttgcatcgattctaaccgtttttaagcatttttgagtttggggactatgatcatattttccccgtctaatagagatttttgtaaaaaggtcaaaatatggacaaaatagagaaaatattatgtgttttttacatttttgaaaataatttttaacattttttttcaaattccgatcattcaacatcaattaattcattagtcatcagtaattaggagtgcattttccggcggaatagaaggagctttgccatttgcatttgcatctcattttgggattgtcataaggactcattgctgagccttggcacgtctttttcgtgaattgtttgcatgtcgacacacaagccaaataatctcaaataaattaatttaaaaaattaaattataaataaaatgaataaagctaaatgctagcgaattcaatcaattaacaggggggagggggtaacaggctaaagagagaaaaagagagacggcgtaagagtgtaggaaaataggagaacagacagatagttagagaagcgatgagagtgatcgtttaacgcccgctccccct

SEQ ID NO: 10885 - DNA, 1580 bp, Heterodera glycines
  unsure (1)..(1580): unsure at all n locations
aaaaataagttttnccatttcaagatggatacccgaatgcgaatgaaaacgaaaaaatttgagattagaaaataatgtctaaaaatttattaaatgtnttatttntaaatttattattattattattatgaaaattgacttttttgattggtttttatatgggaaagagtgccgcattttagttttatatgaaagtttaggaaaataatttatttgtttagcttttttacattaaaattttttccctttttcgcctccgtcgatcgttgtcctctgtttaaatatttacaaagtttttgcatttcgtttttctatttggcatttaaatggttacctatcatttcgtcactgagactaataatttaaaaattatttctcagtgacgaaacgatcagtgaaaaaatgatcggccattagaggtttttgtactgtttttttaatacaataaatgatccaaaattcaaatgtacctttttaaatctttttgttaatataaaaactttttcatattcaaattttgaatataagcaaaattgaatgttgacctaagaagaagaagttcactctttctgtgaactaatttaaacatgaaatcggtaaaatttttgagagaaaaaattgttaggggttggaaaaaattttgaagtaagacagaaaaaaaagagcacaaaataggctacaagatagatagtagggttgaggcgcgacccatcatttacaatttttttttttgccgtaacagcggcaaaatgtgaccgaaatcctcgggttttgattactattttttgattaatctgaaggagcttttttcagcgcagcaaaatagtgaacaagcacaacaacagcaaaaggcataatgccaaaagaattttcaaaaatgagaaaattccgttcttccgcaatttcctcaatcagtgagcaggaatgcatttgttttcagcagcagagggagaccattagcatgagcatctgattttgggattgtgactagcacacaactttgccgtttcggcataatgcctgaaaaatatttgaaaattgtcgccatgggctaaattcgaatccaaaagctgtgcaagccaatttaactccaattaaatcaaagagaaaatttttaacacatcaaattttaccatatgcaatgaaaaagggagtttttcaaaatgaattatattttaaataaataaaatttttaaaccatttaaatcaattaaattgtctaattttaaaggattttgatgaaaatattttattgcgatttattaaataagaattcggctcaaattttgaaataacaaatataaatgcgaatactgaaaaaaagactatttttaaaataaataaataaaaagggaccaaagcaggaaggcagccctgataaaatagatgggatggaggaatgaggagttcggggatggcaccattcggggacgaggcattcatcccagaaaaagtgccaaactgtcagtgcggggagcaaacctcacaacgcattttaaattttgctaatataaaaatatcaaaaagattggcacatttatcgaggccttttgggtctcgatgngggttaattcttagtg

SEQ ID NO: 10886 - DNA, 1212 bp, Heterodera glycines
  unsure (1)..(1212): unsure at all n locations
ctaantcatccaccggtggcaataagccgtatttggcgctgagattgagcgcacgtttggatagaacttaaaaataaaatattaaattcttaacattagtatagaatttttatttgaattgaacatatcaatacagtaagttatccatcaacaaggttcatgttgggacgttttctaaatccgctctatgagatgattaaaatgaaaattttaatatattggttttattgttaaacaaatttatcattcttggtaccattcaatatctctgggaattctcaatcagaatatataaatccaaaaaattttgaaaattaaaaaaggaattatgtgtataatttgttaaattcaaaaaatcgaacttcagagttttctggtcataatctttttttttaatttttcaaaatttttaaaattaaacattcagattgagaatccttagaacaatatataccagggctaccctttgtacttatttgtaagtattgtacttatttgagctcaagtcacttatttttgggactcaaagcaaaattccgatttttatagcaatatttgcggtcggggtcattttcgcgtggccattttcgcgtggttgcacataagcgaattttttacttttttatagtttggaaaattttttgactcccgttttacttctggtgcttaattcaatatatatttaagtaaattttataaactaaattagggaccaggtcgttttggagccgacgatttgtcgccaacgttattaagaaaacaaataaatttaaatcaattactctgggaatttttcccgcgattagattctgttttttaaataaatttaaataaaaaatcattaaaaaattttgtttataatcacggatcacggatcacggaaatcacggggattttggggtgtcgtgatcacggtttacggttcacggaaaagttcaaaacaaaattatgtgcaatatatgcttattttattagaagttttcaatttttataaaatgaattgacgaaatattttgaattgattgttcatgattccttaacataatcaatgtaaaatattatagatattattacctattttttacataatttcctcaggcacacaaatattatatgtatcggtaatattacgcatgtttctttatgtactttgatcgcttaatcctaataaatgaaaatattatacgaatttaccttatattataaaatttt

SEQ ID NO: 10887 - DNA, 4762 bp, Heterodera glycines
  unsure (1)..(4762): unsure at all n locations
ttgcaagcataaaaatgaggacgcttttgagtaaataaaagcaaaaaatttgtttgaaatcggggtttgggactcaaaataggtcgaaatgtatgttcgccacacatccgaccaatttcagtcctaataggcactcacgcgaaaacgtcctggccccgaaattttgcgttttaacgcccttattcgaccttagaaatccttattttgggtgttcgcccttaaaatccatattttacatgttcgcccttaataagtttttgcccttattttggcgttttgtacaaaatttattaacaaaaatgcaataacaacgaaaaatacacncnctaagaatcgaccaanaaaattttcagaaaaatatacccctaagaatcgatactaaatttttcaaaaatagaccccataagaaatgaaaaatttttctaaaatatatcttatttttttggactttttcgcccttaaaaatcctcgccctatacataacacaaaatcgttgatcactaccccaacaaaaagaaaaattttataaaagtcaagggctcaaattcattttccaaatccgcaattcaaattgatcgatcacttctcagcaaatcattcattcacttctgctatggcaaaatatgcatttattctagagtagagcgggaccgggccgggaattcccggtcatccgaggtcccggtcccggattttgaaatgtttgccaatggaatcgtggaaaaaatgattttgttttgaatcaccgccaccgccctttgtgcccattccgtcgtaaatttttgtgccttccccccaaggaatttgattttggtaatttagccatcattattaggtatataaatcatcaatttgacaaaaagtgactatggacgaaacgcgaaaaatgcctgctaatttaaaaattgactgttttttgtttattcatttgtcaaagttctacaagaaattctacaaataaaatttaataaaattgtcaataactgaacataaagacaaaattgtcaaaggatgaccatcattaatcagtcagtcagtatgtttgggacaattaagcaaaatcatttggtgtgatgctttaacacaggtgtgcgatctgaagttttcaaaaccaagataaattggatgacaaatcagcaggagtttttcattttgtcggatttggatcctccaaattataggacaaatcgggacagatcgcacgcctgctttaacacgggttggcactaggacaatcaatgtatatgtggcaaaagtcgccatgccgacccgcagattgtcggataaaggatttcgagaaacggcataccgccgacaagaaacgggaatgtcgaaaatgatattctcttgctctctctcccccatccctgctgcatttgtcttcttctaattaggcaattaattaacaagtggtggaaatatcacaatgcaaacgatgggaattggtggtggtgctgatattactatcatgtttagtggcgttgttctttctgccaccacttcgattttgatcatcatcatcatcattagccctaatgatgatgatggcggtgcctttgttgttgcctccttctcctcctcctccgttgctgattgcggtggccgaaatgttagcggcggatgaagcggcggccagcgcggcgttgtggtgcccgccaccgccgatcagtgtccgcgtcagctcgcgcttctgcgcctcaaagcacgcgtcgcacaaaaagttgttgaacggctgaacaacgcgttgacagtgcgcgttcaggcaggtcaacagcacggaggcggtgttaaacgaacggctcagccgattgtctggcaacgggggcaacgcggagtggggcatctgtggcaggaaaacagcaataaacatatttgtagggtggtccgatttttttaagaatggaaaatatggaaccgaaacacatgggaataagtattttttacattttaagaaatatttgaaaatgaaaaattggaaaactcgaaaaaagtttcttgtaaactacaatccgtcaataaaaaaatttttcttttgggggaaaccaaaagatttcataaaataattgttgaatataaaaaattgaaaggatttttaatgtatttcttttaatatttaattctataattattttaaaaaatttcaagaaaatcttaatctcgaaaagtgccaaatcaaaacgggtatatgatggtctgtgaatcggtacacgccaaaactccgccgccgaaattccgccgagacataactccgccgggaaacttagaaatttttcaagaaaaaaatctagaaaatttttttagaaaaattttttcttaaaaaattccaagacatatatttcaaagaaattttccaggatcctttttagaatttttttttgaaaaaaacttagtttttcatcattaagttagaaaaacatcgctggaaactttttataatttttttcttcgagttttctaagaaaaaatttttctatgatttttttcttgagaaatttctaggttagaaaaatttttgaaattttttttttggcggagtttcggcggcggagttttgtcctgctccgtctgtgaatacatataaattttaaaaatttcttgtatttttttaaatttcgaaaactcaccattttggcgcgttcaaagcgtttttaactttggttgtctcgcatcaaaaatttggccattatgctgcgaagggacccatcttgttggttgatttgctgtccggcagcatagacgaaggcggacgtgctgttcgtgccgttgcggaagtagtcgcgccagattgacactttacccaacacggcctgctgctgctcccatgtcctgttttcagttggccatccattctcatccttttcctgctgctgcttttcctcttccttctcctcactctcttccttgccttcctctaccattttccacgccacaccgcccttctcaacacacacaatctttctggcggcatccaacgcccttttcctccggttgtccactgcagaatccggctccacaaattcgtgctccaccatttcagctgcttcccattccactgactaaacacacttttcgattttattttcaggaattgccgaagtcgcctcataaccctgtgctattctttgcacttgttctggcgtgctgagttgctccaggaggaggtcggcaagctgacccttcggcactctgacctttacctgataacaagcaaataattgaagtgtgtttaaaggtcatttgctgtacagaccttccagcgggattcttgaaggtagccgagcccgggctttcgctcacggctggtctccagccaatagtcggtcgtaaggccaccggctcaggattgccgtggccatatttgcctaaggcgatggtggtcaccgtctttcccccgggttggagaaaggtcggagtggtgccgatgtcagcctcaaaattccgtttgcccttgggcgtcaaaatatgccagtattggccgctggtgcccttcatgctctaaaaacgcaacttttctggcacacaaacattttcctggcaattatacctcgacaaaagcaaaaatgctcttccttacatccaaaacatcagaatgtttcggatgattgcagaacacaccgcaaaagccagggctgtgcacacgtttgatgtctgccggcaggttgcaaatgttgaattggtattctacttttcgattttgcgtgcgcttgctgcggagttcttgctgctcctgaatgccattttgtcccattggtctcaaaaattttaagacctcgggagttctgtccagggggagcagaccccccatttcgagggggcactgttcggcacgttcgaagcgcattgcggtgcgcttaagcaaatcaaagcttattaaaaaatacatcaggctcatcttttactctgcatcatttgggacaagcttgtgttttacttgtcccgcaattttttttatgacagaattccaaaaacatgtttataggtgaattttggggcgccgagtacgaacccggcctccttttttggccagccaattccgaatcactaaaccgaattcgtgcatttttcgaaaaacctttgttttcaaaactcgtgaaaaatattttaagggttttagggaattactatcacgaatccggcatcaattttgaccaattacgatccgaccgacccgaattcgaacaaaaagtcaaaaaaactcaaattttcctattccatttttagtttaaaagatctttttactagcgcactatattacagcttggaccaaaatgtgaaaatcgaaatttcaaataacctatccggttcgtcccgtcataagctcgctccgtcatgtgaaaaccgtatggctggttgaagcggtagatcttgaattctttcgacatgccggtaacaaaattaaatctcagaaattgagaaaagaaaaattgaattcacgtaatttatgatttgttatgccaaaaaaatggccgaaggcagacggctacttataaaatgaaagttgtacacaactatctcgcaactcaaatagaattaaaaaagccatttattcaatgtatgtattgtgtacatgtatggagacgacacaaatgtattggtcatggtgtttgatggtatatttggcgcactcaaagcacctttcgccttggcaatatacagcgtgagcatggaatcaatgtactggtgggcgtagcaacagcacggtcaacaccacgtggttgtccacagacagttcagcagcagcgaacggagtcgtcgagtggga

SEQ ID NO: 10888 - DNA, 1424 bp, Heterodera glycines
tagcaatcgattgggctgactagactccatatttgcaggaatagcaatggcaggtctatcttaaaggcctgacgagttatgtttcgacaaacatcctgtacaccataatcgattagcaaatttagtcgaactatataaatttttcaaaaaatgattcatcttttttatggttagcgcatatgtctctagctttatagaaacggtccccgaatctgcgaggaactacttttttgagaatttctatagattattattttgcatgaatccttcgcttaaattcccatttatcttataaagtcagattaaattaattaccccgatttgttttagaattggtccaaacacgcttgctaatagcttttcttttcgaaaagagaggcgaggaaaaataaaggttgcatccaaatgtaaatttttttacattgaagcatttggatggcttgctgtttacagttggctacgtcttatttgcaagaagcagcacaacttttgtttgggccaatgaccccaaaccattcgaatagcaatcgattgggctgactagactccatatttgcaggaatagcaatggcaggtctatcttaaaggcctgacgagttatgtttcgacaaacatcctgtacaccataaatcgattagcaaatttagtcgaactatataccccctccccccatccgtctccctgccccggtccaacccacttcgtcccgcatcatcatccgttgttgttggttgtgttgctgttgcgtttcctcctccatcgctgtgggcagagagcatcgcggctggtggtactgctgctgttgctgctgcgtgtaccgtcgtgaggaaagcagcgacaatttgcggtccaaccatcgaaagtgttgccgaatctccttcagtatactgctcgacgtggacgaaccgctgctgcagcagcccgcacgtgcagtcgctgaccccgtgcagtacgacgccaacaacgacggcacaccgccggcggccaatgtgagcaattatatggagggggaaaggggagaaaataaatttaataaaaattgttagtctagagatttccatagattttcaaaatttacaggaatggagaagttagtaaaaaaaaataactgaaacctgagggacttgttcttctctaattcagattctcaaaaaaaggaattttaaataaattcaataaattttgaccaaatctgttacccccaccccctctgcgtcaaccacaaaaagggcacccaccgatggcactgctcgggcgggcactccaacggcaaataaatgccgccgaacggaatcgttgccaattcttcggccttcgcattgcgcagaatggtgtccaccaacacacaatgatgggccgatacaaaatgtgcgcgagcgcaaaacacatgcacacactccaacgactcgtacacctgcaggggg

SEQ ID NO: 10889 - DNA, 2055 bp, Heterodera glycines
tcgggtggggaaaatgcaaatccttcccttttctcacatttaattaaaaacagcaaataatttaaattaatttttttacttcttaaaaatgtgacttttaaaggctttcggtcgacaaaatttcaattttcgcttctcaatgatcacaacacttttgcttctttgttaaaagcagtgaaaatttgggcgaaaagtcagtctaataaaacactgttttataattatattcaaaattaaaatttttttatttttcgatcgtctgatttatgccggaatatttggctatttcaatggcgccgcattggctttaatggcgacaaaaatttcgcttctttacccaaatgcaccattgatttatttattatatcaattcttccgaatttactcacaattgtatgccattgataaacaaaacttaaaaatttatttaacttcaatttctgcttattcatttcatcaaaaaatgataaataaataaatgcaattttcccgttttttggcattatttaattgtttaattcagtgattggcaccgttctcagctgatgattgacaaaatgtctcgcaattcgttgaataattttgcatccctttggcctccgactgtcgcggggtgtccaatggcaataataacaccaaaattccctgaacaaaatgcgtcttacaatgtcaacactttcacattccaaacaattgttaatgaattaaaaactggtaaaacgaaaacaaaaaaataaaataaattattttaaaataattaagcaaatcaaaaattgtcagaaaatcccaacaatcggcaaatggttttcgaagaaattgaatatttgcacaaatttgaacattacgcggtcattttgtgtttgtccacgacaattgaattttaccggacaaattgtggctatcagaagagcaaaattcgacagaaacttttcaattgggcaaaatcagaagaaaattcggaaaaattggacaattatcagctgataacgcaatcggagaggaaaacgaagtgcaaaatgacaaagtaaaataaaaacaaaagcattaaaaagaaattaaacaataaataggagagaaaaacccaaatgttgggtaattaatcaatcattaaggcaattaagcaatcattaaggaacggatttatatgcaaatgcttttatttttttttgatatttttgaatcggctggctaataagcaccaaatgctcattttcctctttgtttgacacatcaggatattattttgagcgttttctgtgtatatttctcattgaattttggaaaaatgctaaaaggactaaataaacactaagaaactccaagatttttttggccaaattcaaattttctcttttttatacgttatacataacttcggaagtttgaatctgataaaccaaaatgtgtaaaaccctgattcaaaattatcttataatattttgcctattttcgtgtcatttcctaatttgtgcttgtaaatccgcgctttgtctggtaatcagttgaacaatgatggattaattgaagaaattttgctcattacactaatcggacattgataattttgtgccagtgagttcactttttgtaccgtttggcttgttggactgactttgagcagtgcttttcggcaaaatgttaacgcattgggcccaatttatcggcaacgaccaaatcacgactcattgtcagcttcgtcctcattttggcttttgtctctttacaccgataaaaataatctcatcccaacgtttgttttataatttttatttgcttcattttcttttttattttactctaattacacaattaagcatcaatcaattgatttcgcagtgaacgagcaaaaagactaatcgaagacaaagaaaaacaattaattaccttcgaattaatgtgccaactcagtgtgaagcttgattatagtataagttacttaatttttagacatatatttttattggctttctattaattttgcgaccccattttggtttttgcgtctttggcgaatgaatgaaataattttgtaaaaataatatctatacttctaaa

SEQ ID NO: 10890 - DNA, 2490 bp, Heterodera glycines
  unsure (1)..(2490): unsure at all n locations
agtccctgaagtttttagagaatggacatagattttttaaaaaaccgctctgacatgaatccnaaagatgattttaaatatttattgatttcacaaaattgtttggtttttggaattgtaaaattgtacaaaattttgaaaagcgattatcagaaaagaaaaacaaattctcgttttgttttttttcaaaatttcaatgtttttcattgcgctgatgccgggaagtgaaaagggattaagctgagcttttcctccggaattggctcgtcattttcgatctgtagcacaatcgaactcagaagatttcgggcgcccattttcggttcgttgtcgccaattcttttaaatctttgataagcgcggacccatccgttgacgaaaacgcactccttttcgttgataaattcggaaatgggctgaatttgggccttctttggcccaccgatgccaaaaaggcatgagtaaaattgacaaaatttaaatttttccgctaaaaatagcgcattgtaagcggaaaagcattgactaatcgactcagtgaatgttagcattgacccatcggcgcttgctttgaagtgcggcttaactgccaaatggtcaagcatgccggtttcttctgtttaacagttaaaacgattaattacaataaacgttgaatgaaataatattacaatatgtttttctattattctctattggtttttcatttgtattttgtatgcaaatttaaacatttggctgaaaagtccactataattagagaccggattttgaggcttatgcctttttctacggcccaataacgcgaaaactgaatttttacttaatttgaggcttctagctttaactttttggtgccttttttgtcttttttaagattggcacctttttcctgcctttttcagtattttttgaaaattttcttcataaaatacaataaaaagtagagaaaatacctctaagaacgtcctggaactttttttaaaaataaccccaagtaaatggcaaattttcactaaaactcactttcttataatttatgttttcttaataaattttactaataaatatatctatgctaattcaacttgggacccaccaatttgcttggccattttgtttgccaattgtgccatggcccccctttcccttctcagtgccttttcaatctttgtgcccattttatggcgtccaaattctctgtaataggccaaatacaccgtaagacttgtccaccgctttttccattcgttgcaaatcgccgcgtgggttttcttcacctttttacattcccaatttttggtccgaattttgtccaatttaaagcgtttaatgttcaaatcagcttcatacatttcttcgtccaaagttttctgcggattcatttaaaagattaattttaaaattaaatagttaattaattaataatcaattaacactttttcgtcttctccaattgaatataaatagctcaaattcccctgctgctttttcttcattgctaaattgtctcttttatttgttgtgtccgggtaccctaaattaccttaattattttttgaaaattttaataacctattaatcaattttttgaatataaatttgttctcttacgctccatgccataaacaaaaataatcggcagaattgctgcaattcttatgaccataataatgcctttttaaaatgaatttaatagaattacaataatttaaaaattaattttatatgaatttgcttattaattgcaaaaaatatttatttctaattaatcaacgttttattacgcatattcttttcttgcattttcgtcagaaataatgacgtcagcaaaaattatttcacccgaaaattaattaacatgaaaattaataattaagcaataaaaacccaaacatactttccactttcttttgcatactttctattttcttctgttcttgatgacttaatcggaactttgggcgccataaacacaatgattcaatgccataaaactttaaaaggttcgattttcgaagtttgaccgttaatgatgcctaatttataagtgttgttttatgttttttgcaagtacatatgtaaataatttatttgtatttaattttataaattcatatttattttttttgtcatgaaaatggcgaagagggcaaagtgatcaatttttgttgctgcaaaaaggcagaattattcagcgaattgtcctccaaaagttgtcggtaacagtccaaaatgtgttcgatgtgttcaacgcatgccaaatgagcaaatgtcaagtggaaattcggcgcgcataaactgaaaatatttttgatttaaaaattgttttcccccaaaatgccacctcanacattgcaaaggcaatgtttgtgccgttgtctggtcaggcagcgaattggcattgttctcaccaattttttgtcgctgagcgcaacattttccaccgatgaaatggtgaaaagcggggaaagcattgatgacactgaa

SEQ ID NO: 10891 - DNA, 3708 bp, Heterodera glycines
aattaagagaacataagccaaagcgtaaaagagtataggaagaattaaatccggctctttgataggcttcgtcagaaaaattataacgatttcatcatttctacctcctccctacatggcgccaaatcgtcggcgccaaaacgttttggttgttttaatctattttagaaacaaaaagagaattttgaaattttttattttcgattttttgttcgaatttcggctccgagttccgaattggtcgaaatggatgcctggttcgtgagcagcgaccctgaaaaccattggaagcatgttttcatgacttttgaaaacaaaaaaattttcttcaaaaaaggggggcaaccaaccatcggcagtattaccttcgcgaaaaatacgtttttttttttgttttacaaaatttttaaatttgggtgtttttcttttttttattatagcttggcgccaaaacgtcggcgccaaaacgatacggacccgtctggtgtctcgtattctcgtgttttggcacgatacatttcagcacaagaatattatgatttaacggaaggatggaaggacacaaaaaataaaattgaagaagtataaatgtaaaaattttacaaaaaaataattaatatttatgattttagagaaaaattgaaaaattcatatatatttacgaaagcaaaagcttattgaagtgctggatattgatggattaagaaatcatttcacaaatttattgaaggaatatgtaaaacgtgtgtttatagcaacaaatacattgaacacataatttttataatatttattttattatttctttttttttgctaaaaaaattgcgaaatattagaaatttaaaataaataaatattattaatacgtcttaaaattttaagaaaatttttgcttttttttgcgacaatgaaattaatgtatttggtaattgccatttatgttttaatccaatttgtttcattccatgtgaaaaaattatcggcgcaaaataatgtataattttatttaatattttaaaatatttaaatagaaaaaattaaaaaatggaaaaatattcaataaatataaatgatttaggaggcttccattttgtattcacaattttgtgaaaatttggacaacgcgtacagatacagaaacacaaaagattggcaaaaatatgaaaggattgagcatcaaaaaatgccaactgataaatttgatgccatcaatttttcagagtggaaaattctctatgaaagcattcgtcaattttttgattattgcgattttctaaagtctaatgccgatgccgttttgttttatgaaggttaatgaattaaatcattttccaaaaaagcatgaaattaattattattaatattattattatgtatagttttttgcttaatgaaacacataaaaatattttaatatatgtaaaataagcccagaattcagaaaataattagataattatctatgcttatgtattaatgcctgctaatcctcctgtcccgacctaattgccaaacacgaaacccgaatttatggattttaaaagtctggtctctaactctattaatcatagccatattaacttataattataaaatattttattgatatgggctaatagcattagcatttattaatttttagatgattatagaagagaagaatttgaacattttgcatttaaaccgcagtttttttacccgaacggtgacacaatgccaatcagtgatgccatgcgcaaaattgttgaaggatttaatataattttaaagaaaggattggccaaaatcaattttttctccaaaaaagaattaccgcaaataaatttcatcaacagacaaatttgcacaaaggttaattatgtaattattattaatcaaattattggtgttaattattggtctaaataaaaaaaaaattatttttatttttaaaaatatttataggttaaaaaatatattttaataaaaattttcaaaatttacaataataaaaataaatttatttaaatttttattaaaaattataaatttttttgaggtccttgcttggacttactcaataaaaaaggctgaaaatatacaactcgcaaaatcaactttacacatcgttaaattgcatatattaattagcggatttcacaattttacatttgatctgccgtatccgccaatcgatgaaaatgaaatgggcgaatttggtgctgaattaaatttagagtttttaataacattttaattcaattagcttcgtaaaaatgtcagatctaaatatataatccttaaattttaatttttggtaattttcgacattattttattcaaaaaaaaaaaataagcagactattaggtgagtacttagcaaacctaatagttcaaataaattaaaaaacattatgagccttcgaaaatgaataaattttaatcacattatgaatctaatattattaaaatacttaattatatccaatcaaattaatcactttcagaaaatgatctcatttcaaatggttttattggaaatagacaaaataacactgaagacaacattgaagaaaatgatgaagatttatattggatttgggcctacaaaatgatgcttgatacaatagaggaaggaaatgataataaaggtaatgtaattaaaatattttaaataaatattgcgcttttttaaggaaatttcaaaaaaagaatgttaaattttttaaagagccaatggctttaatcgacaatggaattaggtattcgttggtgatggatgttctgaaaaaagaatggtttgatgaattaaatgattatgacaattagaaatgaataaagaaattattgttttttatttaatcataaagataatttattaaaagaattagagcgattcatttttgaattttatctatatattttaataggaaaataatattatttacttttttatattttttgttcgataaatgcagaggtggaaattcgggggatttacattaatttgaggattattttccatttgttaatattgacgataaacctaatctcaataaaatagttttgttttatttattggtcattttttcacgttcatcattttttaattttttccatccgtcgcggaatatttcattaaaatttggtcgaattttgtcggatttaatttggtaagcaattaaaaatataaaaaatatattaaatgtcgtaaataatttgctatacgaaaagatttttgtgcgaaaaataatatttgttttttgaactaattctttttccattttcgaaaagcaaatacagaaatgcccaaatccttcacaaattcttttggtttcttggcccaataaacatttaaattcatcaaatcgttcaatgaattctttctttttctgctcataaaaacatatattttttgtttttatttaaatttatttcgttttccgttatttccattttttcaaccaatttgatcaactgcagctgagttatctttttactcttttagtgaatttgtttagtttttatataaatttttctttcatttttataccatccgttgccaaatatttcatcaaaatttgtttgtgactattaatttattttgtatttcataggttcatttgaaaacgccgagagtaaaatgaaaaaaaattgcaatttttttggagtctttaattctgcaccgcaaatgtcgcatcacagctctcgcctcactctcctctca

SEQ ID NO: 10892 - DNA, 1105 bp, Heterodera glycines
attatgtaattatttattaataaaaattattggggttaaattattggtcaaataaaaaaaaaatttttttttatttttaaaaatatttataggttaaaaaatatattttaataaaaattttcaaaatttacaataataaaaataaatttatttaaatttttattaaaaattataaattttttttgaggtccttgcttggacttactcaataaaaaaggctgaaaatatacaactcgcaaaatcaactttacacatcgttaaattgcatatattaattagcggatttcacaattttacatttgatctgccgtatccgccaatcgatgaaaatgaaatgggcgaatttggtgctgaattaaatttagagtttttaataacattttaattcaattagcttcgtaaaaatgtcagatctaaatatataatccttaaattttaatttttggtaattttcgacattattttattcaaaaaaaaataagcagactattagttgagtacttagcaaacctaatagttcaaataaattaaaaaacattatgagccttcgaaaatgaataaattttaatcacattatgaatctaatattattaaaatacttaattatatccaatcaaattaatcactttcagaaaatgatctcatttcaaatggttttattggaaatagacaaaataacactgaagacaacattgaagaaaatgatgaagatttatattggatttgggcctacaaaatgatgcttgatacaatagaggaaggaaatgataataaaggtaatgtaattaaaatattttaaataaatattgcgcttttttaaggaaatttcaaaaaaagaatgttaaattttttaaagagccaatggctttaatcgacaatgaaattaggtattcgttggtgatggatgttctgaaaaaagaatggtttgatgaattaaatgattatgacaattagaaatgaataaagaaattattgttttttatttaatcataaagataatttattaaaaaaaagtttttaagatggaattagagcgattcatttttgaattttatctatatattttaataggaaaataatattatttacttttttatattttttg

SEQ ID NO: 10893 - DNA, 1756 bp, Heterodera glycines
aaacgttgattgttgctaacaaaagtttgtttgttgttttttaatgagattcttaaatttagaatttgttatgctggtcagtccatatttttggagaacgttttaaaagaacagtgaaaaataacggcgctatgtaatttcgacactgggtaaattcgacactgagtattttcgacactaagtaatttcgacactacattttcgacacaaagaaatttcgacactgaagtatttctaaatctttcactgttttcctgcattttcgagtttgtatttataataaatttcatatttcattttctaattttaaattaactacatctcattctaaacggttgaactaaagccatcggatttacatttaaaaaatattctaaacaccagccgtattgcccaggaagagctacagtccaaataccaaattttttagttcctgatataattcaatatgcaatcaaaaaggtttaagcattatctttcaagacaaatgttgcacaccgctatagaacattgttgaaattgttacgtacggcttgtatacaacaatcaatagtgcattttcacataaatgactgatgaggacagctacgaaatagatgaaattcttataacttttttctattgtcaaattgtttagcactcacttcttttcaaaaaattagataaaaatttgttttgtttagtttgaagatgttgcgagttatgaatgctcaaaacaaccaatgcgaaaaaggaattgatcactgatcagtatgttttttgattagcacccagaattacgctatttggcattatgaatcattttgtctaacacttggtttgacccatcgttataccatctaatcttttaaaaaacgaattggaaaatgaaataggaaaatttatcatacataaatactaacactttcaaaatttcatattaatttttaaaagttctcaatagtgtcgaatttactcaatgtcgaaatagtccagtgtcgaaaatgcaggaaaacagtgaaagttttagaaatacttcagtgtcgaaatttctttgtgtcgaaaatgtagtgtctaaattacttagtgtcgaaaatactcagtgtcgaatttaccagccacgaaaataacggattttatttgattacagttttcaatattcatagtttactaattatataatatgtataacacaaacataaatttttgaattcataactctatactcaaccatatttttataatggcacttttacgaaacgaccacagtggcacttttacgaaaagtcccaaggtggcacttttacgaaacgacttggcacttttacgaaacgacctggcaccgtttttttctgtgcgcgctccagccctagaaattttcggaaattttttttcggacgaaaatgggggtgaaaaatatttttctggggtaaaataaggtgctgagtacgaatataatgtctattttaagtttcataatttttggaattttttaaaaattctttattttttggcaattttttggccctcgggattttggcctaatatttgaaaattcataacaaatcgaagggttgatcgatttaacaagaataaagccttaaaaatagagaaaaatcaggagaattttatgggatttatttgagttttttatcacaaaaaaaaaaaagctattccagaatttctggaaatttttgatttttcagaaaaaaattcgtagctgccttctgaaaagctattcgggaaaagtaaaatactacaaaaatccgcaattttt

SEQ ID NO: 10894 - DNA, 695 bp, Heterodera glycines
caaacaaaatgaccttttctattatcagattccggaacaattgttgtttgtcggccaatggtccagatgttatcggcttatgcttttttgtaagttttagggctcattcttcatttgtacaataataataataataaaattatttctccttcgaagctctcctgggtccaagtcccaaactgtgactgcctgggggtctgtattcggcccgagatgtacaaacatcccttaatctgcgtgcccgaattctaggccgaaaatttcccaaattggctgacgcatttctcaattggggttaaagtgaaggtgctgctgtccaacccaaactaatggtcgagaggacgaggaaaagagggaaatggaattgggggggaaaggatgaaagagccaaagacccgggcccagggtggttggcctccccaagatcagtcccaggaatgcgcattcgattggcgactcaatgagtggaggagaagacaagagggagcagtactttattggccataaaataaatacatctttaaaagataaaacgccaaaaggaaaaggcttaatctctctctatcattcgacggatcatccccaactgctggttcgccgactcgactctccgaatcactgccgctctcggggaaaagggataaaacagcaaggggaaaagggggcggaacataacatcataataggggaacgat

SEQ ID NO: 10895 - DNA, 2213 bp, Heterodera glycines
atgacaggaaattaaaataatttaaatattaataaatatttaattgtattattttttttggttttttttattttcttgttttttattattttcttatgttatgaatttttttgaaatttttcaatttatgtaacgagttgttttaaaatcttatgtaaattttatggtgcaccccaaaatcacgccgccaaaatcccgccgccgaaatcacgccgaccgaaataacgccggccaaaatcacgccgggacaaatcacgccgctagaattttttttttaattttcaaacagaattttttcaagaaaaaaaggattttttcaagaaaaaatcttagaaaaattctttgacgaaaattttcaaggaaaataaaatttggaaaattttcgaaaaaacagtaatttatcataaaattccaaaaaaaatagcagaaaatatttcaacggcgtgatttcggcggcgcgaaacgaccttttccctttaaatggatacctaattttgtttatttgtcaaaaatttgtgctccagtaaaacggttataggtatgtattattcaacaaaaacacaaataaatagatgaacacaacaaatgaaattttaaaaattaataattacacatacacattataataatataagttcaaatcatgcaacatttttccatgaggcaataatttcagaaaaaataaaataaattttgctttttaaattttattttggaacgcctaattcttttaatcataattcctcgtgcttttcatcgtcatcaaatgctgtttcgtcgtcttgcggctttccaacagcacttctattgttgctgctgcttgtcaaaagccgctttatctcgttgtccaactcggtccattcggacacaatgcgaacagccgagtccaactttggctccttggtcagcggattgttgcactacaaaaaagcattttttaaataatggaatattcgagaatttgtgtgattttcgaaataatagtgtttacaagatcaatggtcttcgcactgtccttggacacgtcgtcacaccacgtctcgcaccacagccattcctggggcagcgagtggatgcgcacttggtgaatctgaaacattgaggaatggggataaaaatggaatgaattttctgtaaaaaatatgagaatttgattttttttcgcagaaaataaacgcttaaaaaatctagttcttgggatcagaaaggccgaagttggagagcataactttcccactcacgaaaatgaaaaaaaaattcaaacttagaaattaaaaaaaattttctagaaaatatttttacaagaaaattgcaagaaaaagatttagttgaaaaatttttctagggttttttcgaatctttgaaaaaattagtaatacaatataaaattttgaaaaatcgctttaagattttttctaaatgttcttacttgtaattttcttataaaaaattctctaatttcatttgaaaaattttggtttgcaatttttttttaatttcggggaagagaacgatggcggtgactgatgtcgccgtcagacacactaaactcaaaaatgcatagaattgacgaattttggtgtaaagtttgtcaacaaattgcttgccaactcaccatgttgttgggcaaatcctggtccaggtttgacaacgagttcgggtcggagctgagcccttggtattggccacggagacgatcgccggcggcaatttggctgaaaatatttaaaaagcatttaataatttgatgattaaaaaacatttttgaaaatcaacacaccgaaatttgaccaaatccacaacgtaaagagcactgatgtggtatttgcggcccgccaaatgctgggcccagtagccgctccgccagaaccgaaagccgtccatggacttgcgactgtcgcaaaacggcgtgtagctgcaaaagcaaatttcaatcatacatatacaaggggtgtctcgagacaccccccccccccctcgttcgtcgtagggggggggggggggtcgtgaggcgggagggaggggagcgagatctgtatggattgcgggttcggtgcagcggttactgagctgagcatttgccgtagcgcaaataaaacatcagtgatcattattccctggatttggtcaaatttcggtgtgttgattttctaaaatgttttttaatcatcaaattattaaatgcttattaaatattttcagccaaattgccg

SEQ ID NO: 10896 - DNA, 1368 bp, Heterodera glycines
gctccgcaatcactcaccagtacggggcgccctcgaggtcgtactccatcaactgcatcagatcggtgcgaacaatttggtcggcgtcaacgaaaatgattttcttcacgtccagcgggaacagcacgtcgagaaagaggattttgtagctagaaagaaatttctgaattaaaaaaaatccattttgaagtaaagaaattatcatttatgactgttttcaaaaacgttaaaaaatgcagagaacgccaaatttagaaaattgggggataaatgtcctaaattcttggaaaatagcaaattagcggtccgcatagtaaaagcctcccatgtcgcgagcgtaacactgacccccacatgacgcgctgcttctccgtctgttggtggagccaactcggccatttgtattcgatcagctgatagtcaaagccgtaatgagaagccatcacgggaagggattcctaaacaatcaaaaaaatgagggtagaaaatatcaacaaaaatttaaaaaaatgaacaatataggctccgatcgattcatggaaacaatgtttttcttgaaaatgttattctccaaaaattattccggcaatttcgctggggaattagaaccacaatttagtatgaagaaaagtcatggaaagtctttaacgcttaaatggaatgaaagtttgtcaaatttgcggagcgtgactcattaggaaaaaataataattaatgtttcagctggatcaccctgaattggggcgacaggtaattgttgagcagccagaatttgaccgggtgtttggtgttcttcagcacggacagcatcatgatgcgcaggaagcgctcgtagagatggccggaggccagcgagaagatgttaatccgatcgtacgattgaccggtgcccatcaatttgctaaaaatgggagtcgaaagtgatggctatttgtttaaaaaatggttttaaaaaatggcgttcaacaggattgattttttgtgatttatccattagaaaatgcaatatctttggattcccaggcgtaatgaaaaataaaaatttttcagaaaaatttgagtattatttttaaattttactcaatttacttaacgaatttggcccaccaccccgatggtgccaacgacaccacaggatcccaatttcaaaattttgtcttaaaatggtaaaaatttggctaaaaggaagagaatgaggaagaccccggctcttaaagtggcaattgcatgcttttcaagactgtcgggtgggcggggatcaatggcaacacgcataaaaaattaagtgtaagaggtgccgtaaaatttgatttatcacgataccggtgccagggcttaatttatgtgcctaacagggatggtatagta

SEQ ID NO: 10897 - DNA, 2493 bp, Heterodera glycines
gtggcgcaatggataacgcgtcagcctacggagctgaagattgcaggttcgatccctgcccaggtcgattactttttttccaattttaatttaataaaaagcaaagttcttttttcaaattttgaaatgattattttaaaattatttttattcaaagaaaatttttttttaatcccatcaaatcgattgacatggcaacccatctaattttttatttttaaattctcacgacccccaaattccatttacacacttaggcctatttttttaaattttctataaaaaatttcgattccattgcgcctacccgcagcaactggcattttttgaggtgaaatctagaaaaacaaacaaaaaaaacatttttaattggaaaatagttttttagtatttaatatttctcttcctttgcaaagcccggtggcgcaatggaaaacgcgtcagccaacgaagctgaagattccaggttcaactcctggtcgggttgattcttttttaattttaattaaaacgaattaatttgcaattttaaattgttttttaaataaattttctaaataaataaacaaatcccatccaattggattaccccagcatttttctcgcgcgcaatacaaattgttatttttaccccttaaattcagtagacactaaacgctatcttaggcctgagtattttcactaatttaaaaatgccaaaattttttccaaaaattagttcactccgctcaacccaaatgatgatggcaccacgccaatggacgttgtttttggcggctcttcgacaacaaatggtagtggcgccggtggcggcgcaactaaaattgggcgcaccggcgccggcgccgccgattgctcatcgggcgacgagtcaaatgaaagcgaacggagcgacgcgccgacaaacaccggcgccggcaccggcgcaggcgcagcgctaaccgaacgacggacaaagcgaaaacagcagaaaaagggagaggaaaatgagcatgaagaggggaagaacacgctcaaagcaatgttcccgacaattttgaggaggaaaagcggtgggaaaaaaagtgagcgaaagtcaaaatatttaattggcattttaaatgaataaattacaaaaaaaaaaacatttaatagtttaaaaaacacttttaatagactttaatttaataaaatttatttttatatcttaaaaaattctaaaatgcatttaaaaagccaaaaaggcatattgattcattcgaaaatgcaaaaatctgcaaatttcaagttaaatgccatttggtagagaattttttttttgccaatccttactattctaatcactagaccgaataacacaaggattttcccgcgaagccaggtctcgtccaaataatttttaaaagtgcgcccgggtcaggatcacctcaagcagggtttttaatctaaaatctgtttcggataaagatgacgaaacttgatccggaatttctcaaaaatttcaaggctctactaataattctcattaatttgtcagtattgcattctaaaataacctattttcagatgcttgttggtgtccttccgcttcatccctctcactgcctttcatccaccagcatccgcttaatcctcatccaatcacttttgccaaccacgaaagtgaggcagccgccatggtcatcagcaaaaacaacagtagacggcacaacacaatggcatcggcgcacccgggcgttaaaacggagccaaaaacacgcgctacggcggcggcttcatcaccttgttgcataaaacgggagagctgttgcggtggcgccgatatgccggaaaagagaagcaacaattctcggatggcaaggacggaaaatgccggcgctgacggcgcaggcgcagagcgaaagtgccgagtcagcgctggcttttcagtacaggaattacaactccaacggcacgagcaatgcatgttgcaacagcagaaacgcattgatcaactgttgctggagttgggccgatcccagtcggcactgaaccagcaccaaaaaatgttggaggatgccgagcgacggatggtcgaggagggcggccaaaccggcggcggaatggaggtgggaaaagaggcggatttactaatccagctaattaaaagcaattaccgtccttaaattgtccttaatcactcagggcctttcctttatcagtcaatcgttgatctttctgagcccttatgtcacaagatcgctccttgtttaacagtttttgttgattgaattcacgcattgatttgatcaatgcttcttcccatcactttcccaattttcatgtttttcagtattggcttagccaattggaaaatggtcgtcgcgaatttgcccaacagcagcagcaattggacaagcaaatggacgtccagaaagtgctgtgcaagcgggaccagcagatgaaggtcagtcccgggtgttaggaatgggaacatttaccactttttcggcatttttcggcaaagtttcgggc

SEQ ID NO: 10898 - DNA, 2281 bp, Heterodera glycines
tatcatgccatcagtgtcgtgccataaatttgatcacccccttcataactgtgtaaaacaaatttaaatggacgacgacactatgtaaaagtgcaagaaaagctcttttcctaaaagttggcacccatttttcattttatttcttttttatttaaaaaaaatattttattacaaaatttggtcgttaacccttttatttttaaattaattcccagtctctattaattaaacatccatttaaggatgaactgaagtccaaacatcttcaggttagctgagggctttttggcgttttcttatggctaattttgtcgaattgttggctaatttatccagtgccaaaattggctaagactaattggtcaaattcttgggtaaagttgtccaagccattatctatggttaattattggcctaattattgggtgaatttgtctatgccattgtttgtggccaattatctaattattgggccaatttttccaggaccaagccgtgcaggacattgtccgtctgatccgtcaggaaccaaaagcatcattgctgatcgtgcaattgttgaggaaatatcagttggaacgggacatgatgaacccgcaagaagaacagaacgaacaggcaagtccggaaggatcggcacaaaaaaaatgccaagaaattaatggctaaaattgtaggcatacttcactgtaatatgtcatacatgagtgagatacggtactgtaatttattatgccaattttcggacaatcgattgatgtcatagtgatcctgaaaatattttctctctgtccggtccaatgatcaagataatcctgaaaatttgcctgtaaacgcgtctcaaatgagataattggcaaaaatatttgctgagttccataaatttccgactagtatcattaatcggcaaaaaattattaatgttttctgtgggatatcactattttatttttaacagaatgacaatgatcaacaacaattacacccacaaagtgccaccactccgaccaattcggcaccatccgctgctgctgctgctgctgccgccgcatggaattcgctgtgtaccaccgccgcgcaaccgttagacaacggcggcgccaattcacaaaaaacgacggcatcatcgccagcgttggcaatgccaacaaacagtcgaaggacaaaaggcgttccaaagtcgggaaacgccaaaaaagcggtgaagaaggcatcatcttcggcggcagggaagaggaactcaacaagcgcaatggatcaaaagcaaaatcaagcaaacagaacaaatgtgagaggaaggaaatgaaaagtgatcgagaatctcgaattgggattctccgatcacaaatttgctgaaaaaggaggattcaaaatgatcgggaatctcgagttgggactctctggtcacgaaagaaataaaaatgattgagaatctcgagttgggattctccgattacaaatttgccataatgatcgagaatctcgcgttgggattttttgaacacaaatttgccaaaaaagattttggtcaactcagaacattggtatacaaatgcttcgtgtttcagcagcgagccaaaaatgggcggagcagttcagtgctggagggcatgttgggcagccaaccgtgccgatgtgccgccggtggtgaagcagcggttggagcaagtggcggcgacattcatcatcaacaatgtttgctgaaacagaggcccaaatcgtcattggacagcagcgcccaaatgggcggcatggcggtggacatggaagaggtgggcatgcataatgaatggttgattaattgccatgccgatttttggatgaatataactcagtttttagagtttttttaaatcatttttgggccggacaatttggcccccaccgtcgtttgggagtccatgagtcatttaggcagcattggcatttgaactccgctatttttgccacccaaacactcgggatttatttgggtgggtgcgatcgtttgcgccccgccccgttcgttcccagtagattgcctccatgccgaaaaatttagggacatggttacgggataaaaaagcaaattgtgttggatgccgtaccgcatgggtctctgatatccttcatttgccagattttccgctccgtattgaatgatcatgacgatgaaggagagcgacggcaccaacacgcgcatccgtcaataaaaatgccggaaggcactgccaccgtagcagatggcactcatttaccggctggcgaagagacgatgatgatgttgatgaatgacaacaac

SEQ ID NO: 10899 - DNA, 3908 bp, Heterodera glycines
tgtttttgttcgtttgtcagtcactcattgtcagcataagacgccccatttgtgatgctttgtcccgctttttctttcacttcttccggtggcggagacaatgaccttaattaagcgcaaaattcaaattcggataaaaatcaaatcccttttttaattgcttacccaatgcaattattggcacaaaaaagataaaagaacacacggttacaattgttgtcccaatttccgtctttccaatgaaacgccgccgtctctccaataattttgcatcgtttcattatccaatcgatgcgccaatcattttcatttgctttggccaatgtcagcttttcctttgtccattcgttcaccaattcaaatggcacaatttgcattgacggcacacgaatagtaaaacgaatttggtagctgaccgaagaaatggcattggcacggaaaaatgctaagcaatttgaaaacaaaaatagaggtaacaaaatcagtgatttgttgagattactgccacacctccttgaaactgttgacccaatcgaagttcgcttgtgcgttgtaatcatagcaatgaaattgtttgggttggccatcttttctcggcgtggtcaaccatttagacaacgcttggccagcagaaattgttgaattttgcgcatcaaaaacatcagcaatcgccttcgggaacagatcagaacagatcaaatgaatggattgaattcaattgattcagttcagtgagaattgttggcgaaatgagacgacgcaaattgtccaaatgatcaccactgttaaagcccaagtggcgaatgtttgccgaaaaaattggcaaaatttcatgggccaaaacatcccaaattggctgcacatccatggtgtgtgatgatggattccacaactctaaattgatgcctcttttgtcaaaaatttggtgattcaaacgaagaaaagcgatgacgtagtgatcaatgtacctaaaaattgaatgaatgcttttattgcgatatactcttatttataattactcaatctgaaggtgcttaaaacggattttgcaggagaacggacggtcgggcaacggaaattccacagctctgtcatcaaacactacagacagttttggtccagatcctttgtccttgtgatgaatttcgaccgttctccaaattgtcaattcgcgtttgccatcaaaatgtttgtccaccaacgcattgaaacgtggcgaaagcaatgccaatttgaggccgagttgggcatggtcaaatgatgggagaatgtccatcaaaacgtcgttgcaaatccaactgaaattatggaaaacagtttagtgaaataatgacgaatttgtgacttttaaaaattcattaccgtctattcatttttgtggcaattgctaggatttttatgtgctaaaatgctgaaataagtactaaaataggtgctaaaattcgaaaatgcaaaaatgggtgctaatcctccaggtttaggtttttatgtgctaaaaagtcgctctaaatcaaaaattaaaaattgtttaaattgatggggtttttttactatcataattagggccccaacaaaatatgtaactaaaatagtgacgaaaaagtgccaaaatagtaacaaaatagtgaaaaaagtccaaaatagtgacgaatagtgacataattttcagccaaaaattaagcaaaaaatttttcttattcactgattgcagttgcaaatcaagtaaatttactttctaataattgcttagccttgtatagttacagtagagatcggaatttttcgattatacgggtaagggtaagggttacgggcttgacatctataccagggatgggccaaattgaaaaataaaaagcgaaatgcgaaatttgcgaaactgaaaaatgcgaaatgaaaaaaaaagcgaaatgcgaaaagctaaaatatgcgaaaatgcgaaaggcgaaattttttctacaactttttaatagttaagatcataaagcaaaaatcatttttttaaatgttattccaaatttaaaaatcaataaaacgcttttttgaggcgcgctttttccaaaaaaactttttgggaagagggggcaggcggcgcctggaaaatttttgaaaatttgattaaaatttgttgacagattttcactttaaaaatgatcaaattttgtgatttttatcatttttctaatgagagaaataagagttttggggcgccgctgagaacagtttttcatcaaattaccaaattttgcgattttgggccattttctaagaaaaataggagttttgggggcgcggcggtgccgataggcgccgccgggggaaaaaattgtaaattttgatcatttataaataggttttcactgaaaattagccaatttataggtaaaattttgaaaaattttatgggaatttaatccgattcttaggggtgtaaaagtcgcttttcgcgccaaaaagcgaaatgcgaaacgccaaaaaatgcgaataatgcgaaatgcgaaacgccaaaaaatgcgaataatgcgaaaggcgaaacgcgaaaagcgaaacctaggcacatccctgatctatacgggttacgggcttacgggctaaaaacccgtaaaacccttaacccgtaaaaacccgtattcagaaattatacgggtccgtatacgggtaagggtttttttctttttgataaaaataggtttaataaatacaaattttgaatatttaaagctaaaagacattataataataattattataaattttaagaaataaaattcaaaaaacacaacaattcgcatccggcggtggccgttgggcgcctctagaaaaaattttaaaattttgattgcaatttgttaatagattttataaaaaaaactaattgtaagcaaattttcgattctggtgttactatcggtcactagaaatcactattttggcattttgtcactatttcgacattttttgggaaatttctcaacaaaaacgcaataaaaacgaaaaatacaccccctaagaatcgacttaaaaaatttcagaaaaataacctaaaaatcgaccgaaaattttcgaaaaatacactcctaacaaatgaaaaattttttcccaaaaatttactttcttggtaaaaatttaaattaaaaaattttttagataactattttgggtttttttgctcttaaaaatcccagtgctactcatttgcaactgcaatcagtgaataaaaattatttttgctcaatttttgactgaaaattatgtcactattcgtcactatttcgcactttttgacactattttgtcactattttggcatttttactcactattttagttactatctcgacatttttagtcactaaaagtatcatccctaataatcattttatgatcagatgttgaaatttttcgatattttaaagataaatagagaattcttagggctatcgaatctcatttttgtcttaatcaaaatatgtattttaggcaaaaaacagaacaaaataaataacattcccgtacagtttcaagttttaatttaaaattgatacataatgaattgtttggcgaattgactgcacaaaatttaaaaatttaatccatttcactttaaaaattgtataaaaaataacccgtaatccgtatcaagaattgtacgggtaagggtaagggttacgggtttgacatctatacgggttacgggcttacgggctaaaaacccgtaaaacccttaacccgtaaaaacccgtatcggccgaaaaaaatacgggttacgggttacgggccgtaaaaacccgtatacgggtccggcccgtatccgatctctagtttacaggctactttttacacatatttttagatgcctataaatgtattttagaaattaatgaaaataagttttaaagggttttcaa

SEQ ID NO: 10900 - DNA, 479 bp, Heterodera glycines
agtaccctgtaaactatacaagtaccttgcttagcaaatatttaactttttaaatcaaaaattttgtcaagaaaaaattttatggatgaatttttgagaaaattttacaaaaaattttttaggtcaattattaggggtgtaattttttttaacttttaggtcgattcttaggggtgtatttttcgtttttattgcatttttgttgaaaaattttcccaaaaatttcgaaaaagtgaaaaaattgacaaaacgccaaaatagtgaattttcaatatacccctaagaatcgaccctttacccatgaaaattttgaaatgtatcttatttgcaaagtattcaatgaataagattgtttgctttagcttttaacttatttacatagaaaaaaacagcaatttaaaaaattatagccctaaatttggaactttttcgccattattttcgcccttatttacgacattattttggactttttcgcc

SEQ ID NO: 10901 - DNA, 2717 bp, Heterodera glycines
atttttaaggcgatataatgatgatatttttaatatttcttaggctaattaacaaataatttttggcatgactttttttgctctccatccccccaaacaaaaattcaatacaaaaaggtacgtttatgtgtaggtatgtacatatgtattgtacacacatagatgattcacccatttttaaatgacaaatgtccccccccccgcccttttttcatttatttgcggaatcgtcggtttgttcccatcagcagcagcaggtgattttatctgctacaatagtgctgctgaggggataagagattagttaattgagacgattatcgtccgattggattatgcaatttattatttcccaaataaaatgaacaagcagccaaaaaatggataaacacatgaagaaaatagcatttgtaatgtgtgcatcatcatctcaacaaatataatttccctcatcaaaacaattcctcaaattaaatattcgtttcttccgtccgatcattcgctggaaccggcgccactcggcacggcatttccgttgctttggtccgccgtcgatggggacaatggcctatataaattcattcgttgaatagtttgaaaacagaaaatgccgttgctgggtgcttacccaatgcagttaatgccacgaatcagaaagcggacgttgttcaatttgttgccattttcgtctttgcgctgcgccgtctccccgccggcgattggccatcgcttcagcaaccaataactgatcaacacattgccctcaattttggccaagctcagcttttcctgggtttgctcgttcaccagctcaaacggcttttctggcattgagcataagtgcagcaagatgtagtaactggccggagtggtggaacggagaaattcctaaaaaatggaaaaaattgatcaccaagtataccgaaccagtagcaccaaacatattgctttagaaaccggacaggattttaccaaggacctgctggtggcccggttcttgtaagttttcgaaaaaaataaactacctgcatgcaaattcaaaaattttttttacaatttaaaaaaaaaaaccaaaaattgtaaaaaaatgtcttccataaactttttaaacaggatcaattttttgaaattttgctgtaaatagagttaaggtctatcaattataccaaaaaatgcttaatttaattgaagctgataaaagttatgacgatttacgggttggattttgtctgctgttggttcgaccaattgtttcaagaaaattttccgcccccatcacccacctctttgaacgttttgatccagtcgaatttgaagccccaaacatgatcactgcaatacaattccttcggctgtccatcgacggtaggcgtgtgcaaccatttggtgagtgcttgcccagcagttgcgttcggtccatcgtcagcaacaccagcgggaaacagttcaccggaatcaagcggattcagctggttgaggtcggtgagaattgtgggcgaaatgagacgacgcaaattgacgagatggtcaccgttgtagaagcccaactgacggatgttcggcgtaaaaatgggccaaatttcgcggcacaaaaattgccaaatggttctgccgtcttcttttccggacaaatacgatgacaatttgaacaccaagttggtgcctttgttgtcgaaaatttgcttgttggcacgcagaaattcgatgacagagtggtcgatgtacctgaaaaggaaggaaaatgcctttagtggggccaacgatgctttgaagcttttttaattatatggtttggattagagaccggacggcatcgggatcccgacctcgagatccgtaccgatggctttttcaaaattttcgagactgatcgggatccctccgaccccaggccgagcggaaccggtgaggggaaacgatgcaaccaacactctcacaatatttccaaggcttggaagcgaatttttctcggcaacggacgctcgggcagcggaaatggaaccgtattgttggcataaagttgcgctttccccgcctccgtgtccatgtgaacggagatcggacgccaaattgtcagttcggatttgccgtcaaaatatttgtccaccagcgcttcaaaacgtggtgaaagcagtgccaatttgaggccgagctgaggacggtcaaaatgagggaaaatgtccaccaaaatgtcgttgcaaatcctaaaaaaaacagtgagtaaaaaggtgtaaaaacgataggtattttaattcaaaattttaatgcacaaaaattttgctcacattttcttcaagtgatgagtcagcttttcttggccaatcaattgactttttgtcgtcgtcttctccaaagtcggaagcaaaaagaagagaaaattgaatgtggattcaaatgaacaaaaaaatcctgtccgaagaatgtgaagaagcgttatttagcacacaaaaattatgaaatttaattgatttgattgccgagacacttctatagagtaagggtcaacaaaaaatcagagtaggggtcgaaaatcgacaaaaaatgaaaaaaggggttgaaaatcgacaaaaaaatgagaaaaggggttgaaaaattagtttttttttgctctactgcattttacgcgtccaatcaaaagtttacgcgtccaatcgacttttacgcgtccaatcaaaattttcctaaatcgaacatccttttgacataaggtaccaacc

SEQ ID NO: 10902 - DNA, 988 bp, Heterodera glycines
gtttatgtaaatttgaaatttagtcccccgtttggtccgagtccatattgctcttacgccaaataaacgcatttggcgtaaatttttgcgcgctattcaaaaatttacactggaaaatgcctttttgtattttttattttgatctgccataactcgcttcattcccaactaaactgaacaaatttggtatctaaaaaaagtttttgaaaaggagaatctttttctaagcgaaaactaagcaattcgattttttagaaaaaagttgtgggagtttcaaatctttattacgttataactcaagtcttaaactgccgatttcaaccaaaatgcggaaagtaatcatttttctattgattctaaatgtccaacagattttgtaccgtatcaacaaaaattaatagaatttgcgaatttcatgatttttaatgtgttagagacatgaaaatagtacgccaaaaggagaggaaaagaaatactttttattattatttataatttttggaatggggagtataaacaaaattaaattcactatagaaggatgcagaatttttttctctataggtttgcaaattttggtgcaaattgtatggatagaaaaaaagttatatggagagaagttaatgttgtttttacataattaaaatgaagagatagtacgccaaagtgagagaaattacaaagaaaaagagtaacgacgagatagtactaggcttttctctgcacattggggcgtacgcatagtgcatattatctattccgattgtcaaatttaattccatcagatgcaacgcgcgcatatgtaacgaagataccatcatactcatactccccccaccctttccctctccaaccctctcctccctctcttgatagtttaaactgaaggcgggaaacgacaatctgatccccatcaagctagcttctgcaggtcctgctcgagcggtcgcccggggatcgatccccgatctagtaacatagatgacac

SEQ ID NO: 10903 - DNA, 2725 bp, Heterodera glycines
gtttcccgtcctagttccttctccgatggttttggctcatcttcacgttgtagttcaatgtcatgtgttgctggtaaaggcgcttcacgtatcagttccttatccggttctggtcgcgtttctggttcgaattctttgtctgcagaagcagccgccgctctttttacccttttttcttttggaaactttacatcataggccgattgaataatgctgtcaatgatttttgcatatgctctacactgtgaaactgtatgcttggaatttttaccttcagagttacagtagtcggacctgtaccgtctgatttatagtcgggattgagaagttttatgttgacaaagtcgtcctcatccacacccctacggaagggaacgagtgtggatagatgatggaggaaagcgcaacggaccagtttgagtctagctctaaggtatgtggaagtcttacggtaaaataggatgccgtatttcccggaaagggaacatttgatggcagtacaatataaaaatcgtccatgcctaacgaacgagatctgaatccttaatccacttattgtgattttctgaataacatatctaacgaacaaaatgttgcttaacaccgtttcgtaccctggatttcaaaatttctgctcgatgagttgtctgttcagcagcaacagtctttaccagttcctgatcgtaaaaaataccttttatattttcaccttctaaatcactgattcggtatgacggaggattggtcgggtttacccgaacaattttgaataattcgtcagtaaaatttggaaaatatcctttggagaagtctcccttctctttggtaattcttacgatatcatcaattttgaattttggaattcgcttttgttgttccacgtctttatatagacgatttctcagctctgttgcattacgaaaattcacatcaacaggacgcattcctgttgtacggttcactaaattgttcaggtttttaactattttatcaataatgtctacccatctgtgtgtgtttttttcgctaaaataacggtaaagtctttccttaattgtgcgatttgctctctccacaacacctgcatgcagatgagggctgtacattacatgtttaatgatatcttttgaacgccagtactcattcattcgtttggcttggaattctaggccactgtcgctgtacattttattaggcagcacttgtgcctttttgaaaactttttcaaacgcttcaatcatatgctcactcttcttcgactcagcttcggcgacataaatctgtctactaagaacatcaatacagacaagaatatacctgtatccatcgttgtgctccttcagcgagtccataatgcaaagatcacactgccaatccgtatgcaaaccacttgggacagtttttaaccgtgggaatttgtttcttttgggtttgaaaagtgtgtaagtcctttgtttatgaagaaacttctgtacatcgtgaagctttagattggggatacgttttcgcgcttctgctagcaccttttgcattcctgcgtagctggccggcgaatttaggttgtaataaacctgttcaagttgactttctacagttttgcccataacactggtttaaatagcggtttttctctatttaatccttgggtttttatagggttaacctggacaaggactagttttcttttagttcttctcttctttcctttaccctgttgtaaattaaataagtattttgtaatttccggttccctcttcaaacgttgaacaaaaaatgtatgacctcgaggcggagaaatatcttcacctgataataatttcagcgattcagtataattcgatccggtgactggcttattaaaattggtcaaaacctgtcctgattgcatatcgattccaaatttgtccggattttttccaataatattcataatttttgaaaaatttttctgacttaattttacgtcttgggaacgtattggcgtactactgctaccttctgtagccgaagaataatctgccgatgattcaaacacgttttcacttttctttttacgtgatgctcttattaatcgtaacggctgacgcttattctcttgttctacggctgtttctatttttggtattttatgaattcccatcaatgtattcggtttccggaaccatgaccattttctttgtgtgcttcattatgctgttattttttcaagcaaatgttgggctaagacactgagaacaggcacaagaatagcaccaagggcaattccgctcccttgttgaagtttttgccgagctgagttctcactgcgagcgcgtgctatggccctgtaatagtccgcgtattgtgacaaccgtcgcctctggctcggatttagacgaaaattaaattttaaaatatttgcgcaaatttccagctccctgcaatagatcgttttttcgtttatcagacctggtggccgcaagcttttttaagaaatctgtattttccctaacgtaaggactaaattgatacattttagtttttttctatattcatttctttatatagacaatgcggcggttagcgcgcatacattattcgctcggtaaatagattactctatgctcgtctggaaatatattattcgtaagacgttcagtttccggtgaatttggatgcatatttataaccaaatagctaaacggtttatttgttgcgtcattatatgattccataaaaaaaaatt

SEQ ID NO: 10904 - DNA, 993 bp, Heterodera glycines
  unsure (1)..(993): unsure at all n locations
tagtcctaagtattttctaaatcttatgcaaaatntcaaaaattcattatgtttaaaaattccaaaaatgtaaaacttagtccctgggtacttttggcataacttttctcaaatttgacgaaaatttttttctatgttttcaaaaattaatttttattttattttttttgttaatttcaatttattatcagtttttgtcaatttgggaattaattaaatattatatactaagtataggacttgtacgaatattttattcttataattttcacatttcactaattaatttattggatcactcaggtactttaaaatttttgcatttttgcgtcctacattttaaatttaagaacattcattaatcatataacacttatttttaataaattctttgagaattttagtcaataaattaaaatattcaagttttttattcattatgtttttaggttaaattaaaacaaataatttatgagttttttcatgtaaaaattcttagtgttaattattttctaccatttttatttaatgctttattttgtggaatccatgtttttttttggcaattgttccttcaggttttactcgtagaatggattacatacaatcgcattcgggtgcggagacccttttttggtttttatgctaattgatttattacttttaatttcattttctaattttttcaatcaaatattaaaaagttttttaaaaaatcatttgattttattatttttttttatttgtagaaactttctataagtaaaaacattataaatttatcatttcgtatttgttactgctgaggcgatatgttttattataattaatgattgttatcaaatttaatgcaatgataattgttattaattttttggtttaaaaaaaaatcaaatattacttaatcagtttgagtaagtgggcttaatatcgtttttttttttttggatatcgttttgtttagcttttcaatatttaaagtattttttaata

SEQ ID NO: 10905 - DNA, 3273 bp, Heterodera glycines
tttttatttagtcaattgagttggattgcaccttcgccttctcgcattgttcagtgctgcaaagattatggaattgatgaaagcaaatgcacatgccctcaatgatccaatttcaatttttgacaaatttataaaatatttattggcttaaaccaattattgaaaaaccacaaattgttataaataaataaatatgataaataattttcgtcttatcgctttttaaaataactcatcaacacatttagaaaatctcaacagttgttgcaaaaattgtgtttgacggttgaagcccgacgaacaaagcacgtaatcgtgcccattcttttgtaaaagcattgtgatattcagtgctaaaaattggcattttaatattataattaataaaataaagtaattaaataaattaataaggccttttaattttttagttggttattttaatttaaattattgtttaaaagaaaaattattaataacatttctgtctatcatcaatttttaattaattaattatttcttttaattaaaaaaaaataaaattatttttcattataagaataattaaattccaaatattaaaattcatttttatgcgatttttacctagtaaaaaacaaaagaggtgcaattgaaatggaactgatattcaacggaaccacacaaaatatgacgccgtgccaagtcataattagtgaattttgcattaaaattggcatcacaaaaatgccgaagacatagaaagccgccaatgtgcccaaaaattaccagcgaaagtgacttgaaaactttccaatgagtgcatgatgttgttgtggttgaacgtttgcctaattagggtaattaaaaatcaatatttttacatttattagtaaaataaattaattaccaattttgtctctgtacagaaataaaccagtgaaaacattgactagaatagtaacaataatcatcacaaaaattatattttttcgaatgaatgctaattggcccttaattaaattttaatggattaatttattactttttgttattaatatttatgccgaaaaatggaatcctcaataaataatctgagtacaaaaaataataaattgaatggtcaaatttattaaaatatttttaaaaaaacaataaaatgcattttagcgaaacgctaaattaattcttattgtcttaattgaatttaataaaatttgaatgaaattttaatttatttatattaattaattaaaaaatttggttacaaataagggaatatgacgcaaaagaggcgatcaattgcagtacaaagcattgcaggaatcacacattataaccaatgattgaaagtgtgccaattttgacggccattttatagtcaatgaatgtttggccggtcaaactgaggaacaaaaatgtgaaatacgatgattgatgcgcaatttcgagggccgcattaaatgccaataaacgatttgtcgggctaattaatgttctaaaattaaaaaataatttttattttgaaaaatattttataataaatgcaagaacataaaaacaagaaatttcatacaaaattaacaaattaaacaaaatttcacataaattaattgtcaaattatcgaaaattaacttcgaataaatttaaataatatttctaaaagatggttcagtgaatttataatattattttttaattggaaattttcgaattattatgatttcaatttatttttaattcaacaacatttttcagggctaagatctgagcaattaaataataattggctgtttctaattaagtgcctaattacgcataatcattattgaattataaaatattttcccggttttatttataccgcgctcgtactgtgacgtaaatgagtgccgtattgaatatcaaaccaaaaaatgcaattatgctcagcaacaatgcgcagcttatgattggccaacacggctgttcatccttatattgcaaaaatagctaaaaattgaaatttaaataatattaatttcatttttttgaaaaattaccgcaaatattattggattagcttcagaaaaatgcatttttattttctgcgaaaattaattcaaataacaattacctaaacttaataatgaattcattactacaattatatgtaattaataataataaaaaataaaaataataaaaaggaaattgagtaagaaaaaaattaaaaaattattaaaatataactaaaaataaagatatgtataagaagaaaattctttgaagcttttatgatggaattctcggtacttttcagtaaatgaggtcacatttttcaattaagaattaggccgcgcgtacattaaatttttcccaccaattttaaaatggcaaatttttctttgtccttttggcgcttgacatttttggtttgattttcattatggcactcatatacagccatttattatttaattaaagactttttttgatcagaatcaaaagttagcttagcagaaattgttttagaattttatctaaacttaaaattgagttttggtcgattaaacattttgatgcattacttttgcaaccggactgtaaaatatatatatatatatattttttaatataaatacaaattttgataaacagtttttcaaataaaatttcacggcaaatttatccaattttcttttaatcattcatttaaattctccaatatttcttctccaaattggttcttccatcttgaaatgctctttctatcaattttcaatgtttttgcaatttccttgtcactcatttttggattttcgcttttaatttgcagataaatttttattttttccaatttttcattctttgttaatttattgcaaatgccaaattttctcttccaattttcaattgtcccaatgccaactccaattttcttacaaatttcggcataattttgcttccattcttttggcgaatattttcttttttgcttatattcttttgacattttaatgaatttttgtacaatttcacctttttcttcatcagtttttgatttgtgacatttttgtttttgaagccccaattctttgatccattcataaatgtattggcgatttgtccccaatttttttgcaatttttcaattaattttatcccattcttttgctgaatattttcttcctttttgctttattttctcttttattttataatattttccaatttatttctctttttttgaagtcattttcgtttttcttcttctttttcttcccatttttctccaatatttcatcaaatga

SEQ ID NO: 10906 - DNA, 1426 bp, Heterodera glycines
tccggtttgacgacgacaaactgtgggaatgaataccgtacaaatggaatttcggagtgaaatttactattataaatgcttaaaattcattttaattgcctcacttcaaagccaaaagtgatggccattgtgctgatcagaacggcgaaaatgaactccaatttgcgaaagccgtagcgatcgatcagcagaaaagtgaacgtatccaccatggtgatcagaacgccagcaaagaggggaattcttggaagagggaaagttcaaaaggaaaagaatggaatttaaacaccgtccgttggagagcagggcaaaggcaatggcctgaagaatttgaggaaatagcaaaaaaaaacttcaatttaaaaaatatgatttaatacaataattattcaattaatgtttaattaaaatttaataaaaaaaattcctaccgttccgatcacttcttgcatgtcactgcctgtgaatgaattaattgttagcagaatcaaaaacagcaaatatttattgtattttatgatcaaaagccacagatgtggttccaaagggggcaaggtcgtttcgtaaaactgccatatttacagatttttcgagaaaaatccatcaaaacttttcttaaacataaccaaattaaaagatcttggtatctcgcgatagcacttggcttgctctataagattcagaaaatttcatagttctgaccaaaaatgttaaaaaaaaatagacataactttttgaaaacttaattaaatattctgaaatgtttcatgatgaagaagcaatctaagagctatcgtatgataccaagactatttttttaggatgtatttaagaaaagttatgacggattttttttcggaaaatgcgtaaatttgacagtttttgcgagacgaccgacccagcacggtgttatttttatttctaatcaacctactttttatcaatgattgaacatcaaaaattaacaaattaatatttctaatataaaaattggtgaataaaatgcaaatttgcctctttttttttcattgataggtatttaaaattttttagagtggtcaccggaaatgattaaaattaaatttaaatttctaactcctagttaatgcaaaaaagaaaaatatatatatatatttaaaaaggcggcgataaaggaaaaaatatgcaaaattttaaaacaactcttaaaaatttagtttttattactgataaaaaacgaaaattaataataaaaataaggaggactgaaaaataaaatactgaatgtcgtaaagtctccatatcgttgttcttgcattactcatttattccttctccaattatctgcttccatcgataaacgttaaagtgattaattttcataattttcgcaatttctttgacagtcattttcggatattctttttttgtttgcctaataaacttt

SEQ ID NO: 10907 - DNA, 2009 bp, Heterodera glycines
tttatttataatttcaaaaatttacataacaaaaaaaaggagataaataacaataaattatataaaatatgtttattgttataatcaaataaaaaaatttgaaaacttataaaagaattaaaaattaaaatatcaatttcacacaattgctttaataaggtatcaattgtagcaaataaacgccatataaaaacgaaacaacattttttgaggacgctagaaaaggaaaaacctcgaattatttaaaagcaactttagaaaacataattaagatataatatttgcaaaatcaacttatgcgatatattttgtttattgtattaagcatagttactattaataaataattaaaacatataaaaactatatgttaaataaggtagaaaatattaaaaaaaattattgggctttctaaaaaaataaataaataaataatacacaaagaataaaataaaattcatagtaaatgtgcttgagaaatccttattagatttattcatattaagaaataactttttaataattaccagaaatttaacaaaatagaaaaatcgaaaagagaatatatctgaaaatatactatagattgtgagacatgctgctcaaatgaaaaagattaattttatatttttttataatatgtttttttatggaaaaaaacaaaaattcgaacaaaaaattttacacaatataattaagagagatttagcaagaattaagagaattttgcatgaaataacaattgaaaaactatttcaaaaaaataatcgttaaaaagataattttataaattttgctaaaaatgcataaaaaatgagatcattatcaacactaaaaaggaaaataaaaataagtacattatttaaaataaatttaataaatgtttaacaattaattttttttcgttaacatttaatttatattccaattatcatgaattaaattagtatagtttgaaatgtagaaataatttttcttttattattattcttacgtattaaaaataaaaaccttaaatattgctatcatatatatttttctgttatgattatattaaaatttaatttaaaattaaatatagcaataactatgaataataaacaaaacaacttctgaagccaagaaattaaatgaataggaattttaataataaaattattaaaatacataattttcatattaattcataaatttcaacagttgaaaacaaaaaataaacaacttttataatgtttcaatgaaaaaccataaatcagtttggcaaaaaatattttttatcgaaatataatgtaaaaataataataaataatcgtcagatacttatttaatgaatttttttcaacaaagtttgtatttatattaaaataaataacttatattgcaatcagctgctgttgaatttttagtggcttttcacgataaaattaaattaattttttgtagcaaatttaattcgaattttatatatatatttaagagaattattaataaatattaaaataaatttattagcaaatgagtcagaaaaatgtaaaagattaacataaataaaatacaaaaaaaaatttacaagaaaatttgaaaatacaatttataaaaaataacaatgatgaaatataaaaataaaaattaactcaattattaaaaattcattaaaaaatattttttgccattgaaataatttcttttagaacctcatagaaaaggtaataaaagaatttgcttaacaaaataccccgacaaatgtttagaatgtcagagcgccggtatcattattgaaaaaaatgtttacatttgtttatgtgtacaatagattaataaatgtatgtaatacctaaatatttgaaaaaataaagtcataaaaattattatataacttgagagtaatagatgtaaaattaaaaagttagctattttcttatgaataatttcttctaacctgggtagttttattctataattattggcattccaccaacatttattgattcttatatctataaatcgtg

SEQ ID NO: 10908 - DNA, 2609 bp, Heterodera glycines
aattagttggttaggcaacatgacagttaaaatagtgttgggccaggagacttaacagaaaaggaacagaatatgagagaaaaaatgatcaaaaacatttcctttaatggcaaaaggtatcaatcaaaactgctttggattgaagaagaactgagaaattaccaactaattttgcaatgacatacagtcaattaaaagcaaatttaaaccgtttgcgatcaaaacccgatttactggaattgtatcacaaaacaattttggatcaggtcaatgatcagggatctgttgaaaaaaccgatcggttactggatccaaacaaaaggggcaaaaaatacattacttacctcatcatgcggtagtgaaagaaaccagtggacgtacaaaactaagaattgtttataatgctaatgcaaaaagtggtaataatccagcattaaatgagtgcatagaaaagggtgttaatgagtacaacgatttaacaagcattcaattatggagacgtttgaaaaatattttgattgggtctgatattgctaatgcttttcatcaaattgagttggcaccagaagacagatattgtgtacgttttttatgggttgaaaacccattcaatccttatagccctttagtgcattatcgatttaagcgagtaacttttggagttatttgtagcccagcccaattagcattaactattaaaatacatttagaaaaatatgaccatcctctcattaaacaattaatccaaaatatttacgttgataagttaatagtgagcattaccgacaaaaaggaatttaaaatagtttacaaaatgataaaacaaatattttgcgaagcaggtgtggatgtgagagaattcttgtcaaatgatttaaacaaaatacaaaaattacccaagtaagatcgtattgaaaaggaaactgtcaaattgtagggaatttggtggaatttccgagaagatgaatttattatcaaaatgccgaaatttgaaacgagtaacaaagttatcacaaattgctaagacatttgacccttgtgggattacagctccaattatattagctgcaaaacttttctgtcaagaaattgaaaatggaaaaaatttaaaatgggcaccaaattatcggaaaaagaagaacaaaaatggagagattttcaccgatgcttgttcaaaggcatttggtgctgtaatttacctaagaattgaaaataacgatcaaattgacaataatctgattttcgctaaaatttgcatcacaattgcatggaactatgctatgtggaaaatttttgaattttgtaaaaaatgaattagaaaaggaaacaaaaattcaaaagtgtaccatttggacagattcaaccaatgtacttgattttgttagaagtgaaatgaaatttgataaattattaaaaacagagtacaaaatatcaaaaaatggcatttaaaacatgtggacagcaaaaataatcctgctgacctagcatccagaggttcgtctgtggaagaattacaaaattctgaactttgctggaagggtccagaatttctttcaaaaatggaaatagattggcccaagacaattcgtgagcatgacccaatgaatccgcctgaggcaaaagaaaaacaaaatataatatactaaattaattcagcaattgaacaagaaatattttttaattctgaaaaattcttccaaagattttcaaaatggaatcgtctaagaaatacagtagcttatgtaattcgtgcatgggaaaaacaggaaaaagagcatctttagaaaagaacgaaaaagatcaaaaatttaagaaaaataattctgagggaaaaccaattaaagaattagttagtctaattcgacctttagaaatcagtgaaattgctaacgccgaaattttgattttaaaacaaactggtacaagaaaatcatccgcctacaaaatcactaataaaaagtttggatttgtttaaagatggcaatcaattatggcgtacaagaggaagaattttacaaagtggtctaaataaaatttggtcagaaattttcagagacgaaaaacgtgtcgaaatccaattgagagggttgtgtgatcaaattgggtgttctttgcgtccaattgatggagagagagtcccggtgaccaacgtcgtttggctgatagccgcgcacctgccaattctcactgatcagacccaaataaaatattcaccaacgatccgtcccttttccgtcctttctcagattttagacccccggtgagtcaatgattccagtaaataatccttggttaaatttgaccccctggtggatcaattcccaatttccggtaaattggtcggtccgttcccggtgatccaactcttgttattcccccttgttactgtattcgaccacactacagacttcaaatgcaaatgtcccgatgacacaaaagctgtttaatgtcgttcaagggcagaaaaggtgtgaaaataaaaaatattcagagatggaataaaaggtgatcgggaaaggatgaacgttgagaattgtgagaatgatgagaatggtgacaattttcccttttttccgtttttaagcttattcaaatgacagggaaaattg

SEQ ID NO: 10909 - DNA, 1306 bp, Heterodera glycines
catgccaatgtgatgatacgaaaagagagtggtgaaaagcagcagcagtgatcagctggagcaaaagaaagcaattaaaacggttgctaaacaaaattcatttctccaaattaaaatgaataattttcaattgtttacccaaaataatgtttttccctttcgcttcgtttgaattcatttcattttcttaataaatgcaactttctcttcttttgacaacttttgctatgcttttctcatgtttattgcctctctcaaaaacaggtccgcctttgtttctttatttgaaagtaattaaaattcaaaattttcacagctgccgacaaccgaccgccgcccgcgggatggtacaacggacgccatcacggaaaccacgagggatggcattggcacaacggcggaagacgatgagacagaggcactcacattaaaaaatggatttcattttgttaaataatatctactttataaattaataatttttacaaaaaaataagtttatcacaatttaaattctttatttttttaattatgtcatattttatatggagaaatgaattaatttttatttattattttaaaataataaaaattctttgtcgaagtaattgaggcgttttaccatagtaaattttcggcatgccaaaaacaattcgaggctttagcctggctgggtggtgtagtgatactctttcaaactcgtctctccacccgcctccgttaattatccctccacgcatttgtcttccattaatttattgcttttgttcctcatttgctacatgtttttcttatcagattgttttcacttaaagtgaccaatcgcgttttcactaacttttgcttaaatgcaaatttttgcttcctcatttatgtgctaattgtgtcgcatatttatattaaatgcgtttactcaattaatgcttttcattcccaaatttagcaatttccatgaatatttattattattaaataaagtgttgacatggaaattcttaatgattcgcgtgatcggattgtcgaaacgattcgcagtcacatcgaaaacaatgaaaaagcgcagcgctttttcaccgatttttcccttcgcctccgtttttgcctccgttggctgaacacgaaaaactcagtgctaaacaaaaaattcaatttctccacattgctcggcctctttttctgtgtttacgttgtccagcatttgctgcccttaattttgccaattcgtccgtcttcctcttttgtgaagccgatcacacgcgacgtgatcatttatgccaccttttcatacaaaaacagcacgaggtac

SEQ ID NO: 10910 - DNA, 1387 bp, Heterodera glycines
  unsure (1)..(1387): unsure at all n locations
gtttttgttcgaatttggattcggggttcggaatttctcccatagaggtcatattcgtgatcagcgccaaaaattaccttagaaaaaatatttaaaatgtctttcgagtgctttttattagtgcagtcacttgagtcccagctgagtttggcactttttcagcctgaaaaagggcaagcgccctctaattctatttttccaacccatttcgaacctttttacatcgattctgaccgtttttaagcatttttgagtttggggccatgatcaatatttaccgaaatggtttgatattcaatttaataactatttttatcattttcaactccattaatagacatattttgttactatggctaagatttttaaatacagattattaaaaatggcaaatatatatatatatgcgcaatatatatgtaaaatcactaatagtacaaaatatgtaattaaaaattttattaatgattctttggaccaaaaattcttagaaaaacattaaatgaggcaaaaaaatatcaaaaaagacttaattagcttaaaaaataactctttttccttaacagtttcggcatttcctcccacgatacttttgtactgctaatgctcgccgatcgttccgacaatttcccatacatgcgttgcgcacggcaaaaggccgagatggagtccgtcttggcgcaggttgagcattacgattacaccggactgtgccatctgatcatgttcatcgccgtgtgcaatttcccctcgccgtccgcggcggacgaacgccgccgcgtcgacggcgcgggcgaccgaagcgatcagtggcaggaggaggccgtgctggtggacttgggcccgcaagtgttagccgaccagcagttgcgccaaacgtatttggacccgaactatcacgaggtgagcggagtaacgaaaagggagggatttgagaaattggaattcatttttgaaattaaaaatgcaaaaaaaaagaaagccgaaaagtaaacgaaagtcattaagctatcagttttaaacattaacccgatagaaatgaatgaaaatttgttgaataatgaaatatataaaataagaatgaataatttgtcattatttttccatttattttttatttttctcaagttattactttattttttcgcattttttccttcaccatttttcggcactttcttttttccttttccccctttcagctcgttgttcggaaggctgaccaaactccgcgcaattttctcatttgcgttagccgagtttttgcgtttgaaaaatggcagcttttgctcaccgcaatggaagtgtacaaatcgatgggcgtcatttttggtggntgttgcacattgtgtccgcacttaagtgccgttttcaaactgatcaaagc

SEQ ID NO: 10911 - DNA, 3700 bp, Heterodera glycines
  unsure (1)..(3700): unsure at all n locations
aagtcattaaaataaaaaataaaagttgttttaaaattaaattttaatttattctttcaatttcagattttgtgcacaattttcgtgaattaattttcaccaagaaattttacaatagtgaaaaacttgtgctcagaccgccccaaattgacgcattttgggtgcattttacgcgtcattataaggggagggacaaaccggtgcaattgtccactgattacctgaccattttgcatctttcaaaggatgtaattaaaataattttgaattattaaaaaaagatggaattttctttatgacagatcgaagcaaattcaacaaaaggatacaatgacaaattgctaacacaatttgatggacaattgggcaacggaagtgcttttctgaacgactcgaagataataaaggtacagaaatgataaccaaaaacccaaacggaatggaaaattatgaatacaatataaaaaatttatttaatgttagccaattaaaattacaaaataccacttagataattgaccgcatgccgaaaaggttttattattttggcgccattcggcactgttcccgcttcatcaacaattatccaaatggcatttttactattccttcgccgtgcctttcatacaaactgtgcgatttgccgaaggcaaaagtggagtgtaccgtaaccaaaagcaaatattacagaagcacgattatgccaacaaaaatttacagggtaattagtgggaaatgattagttagttattgcgcatcattaaaacattcaggttcacgttttaaagaggaccatttttgtgaagaggaaaggcggatgctttgccagaaaactgatattttaactttattaaaatgtatttttttacaaaaaaaaaaaataaaatgcggaaaggaaaacatcgaaaaaatttgaaaaatgttaaaggaatgtgtctctgacacagttttaaaatgtttaagacacatttcaaatattttaaattttaaaatttaaaaaaatgaaaaaatttttaagaaatcaaaaaattaatggaaatatttttttattcttgtgtaataaaaataaataaataactaatgatttgacaagttaaattaatgaaattttcacagttcggttgtccatttttgccctttgcctggttggggaacagtctaaattataatttcactttaatttaatattaacacatcacattctaattatttttaaaaatataaaaatattatttttttaattttggcccactttttccaaaagtttgtcttcgcatgccaatcgaatgcgctcgggcgtcgccggactgtccagccgaaaatagcccaaatgtccattttgaattcgatagtttcggatcgcttcacgaattgcgaaaaaaggggccgacccgagaaaaagagggggctcaccgatagcctaaaaataaaacgtttaaaaagactaaagtaataaattcgaaaaaataaaataaatttaagcactttcgatgaaaaaatgccatttcgattggaggatccgtccaacaatttgacgttgaattggcgtggcgcatcgtccgcacttggaattttgtaagtgccggggccgcgggtcagccgaacgccgtccgggcgcactttcagttcctccattgtgaacagaccgtaaccctaacaaaaagtgatgtttttataaattttttaaggaattaaataatttaaataatttttttttaaatttaaatgggcaaagaaaattcacttggacaaatgctccctcaatttgaccaatgtcaatggccgggttaagcgattcgccgacatccatcacaatgtcaacgcgaataacctttatcaaataataaaacatttaaaaaatggaatattatttaaaaaatttaatttatttaatttttgaattaaaattgtacacgatggtcgcctgtcagacagtcgacttcgacctccgcacatccgaccccataaacacaataactgtacgattcggagccacgaccttctacgaaatcaggaggctcagaatgaatgcttaacatacaaattaaaagaaaaaataaaaacgaatttttaaaaattaaaatacatagcaaatccagtcgcagacaattgcactctgttggaataggcgtgcatcaccaaatcctggcattttgatttatttaatgacaggtgtaaaataaaagaaaaagataaatcattcaaaaatggaatccattcttggcctttatctttaaacgatcgtcaaatcctaaacatacggcatggaactcaaaaaagttaagatgccggatttacatgccaaaacattctattccctggcacatgtccatcccagtctctgaattaggccaagacctcagtaatcccgaatcctcaacacggcgtgacccatttagcataattaattccttttttggttttatttttaccttccaactggcttcttttggcagttcgcttctcaacggctccaatcgttttaataaaatttcgcatgcgtttttcacagccaacccattgacgtcacttccaacgctaacaaaaaaaacaacaacaacattgatattaaaacaaaaatgatgattttccttatcatggtccgcccacctggcagcggttgcgctcgcatttggcactttgtcggtggccgtgtcaatgatttgaatcgttgaaacgtcaattccaagacaccttgaagcaatctgaaggattttaattattattaattgatttaattattcacctttttattattattacttggagaatttttgtgtgcaatccttggcccatttccattccgccatgagaaattagcacggaaccatcagtgtacacattgacaagagctccagcctaagacaaaacaattaatttaaaattaaataatccctaaaaaatttaatttttattttttaatttcaaaatttaattcatttaaacttattgtgaaatacctggttaagtcgcttgaaaccaaaagctatgccaaactttgtcggaaccatgtaaatgcctcgtttcaaaaatttattcctggaattacattcttggagctgaaatagttgattaaaaatcaaatttaaaagcatatctcctccactaataccttcaattttcgctggtcataatttgccaatttttggcattctgtccaacaccggcgaatgttgcattggtgcaaatgcatcccgtaatgtgtaatgtccccctccgaatacatgttttgctcccgaagctgaatcaaaaagcaaaactgctcaggttttgtacccaataaatatcccgtttatacatatatgttttcgcaaaagtaaaaatggaataaaaccagcgaaaattggctttaatctgtttaaaaatatacaaatgccatccgaaactgacttttcccgagactctcgcacatctccccatatattattggccgcctattcgtcctcaccgtgtccacgtcgatgccaaattgttccgcggcatgcttcattatggtctcggtggcaaacattccttggggggctccgaagccacgaaaagcggtgttggaggccaagttggtcttgcacatgtacccgtacacgtcgagagcgccaaatttgtacacattgtcaatgtgtgccaaggcacgttctgttaataaaaataatattaaattgataaatggactatttgcccccacccatccactcctnttgct

SEQ ID NO: 10912 - DNA, 1168 bp, Heterodera glycines
ttacgtggccccgtggcccatgcgtcgccttttctgaactgatttcgactgattggtcgtcttgcgttgctgccacattttccgccggttttggcatttccgtagggtatgtcttttcctcatcccatcctaaaataacttaaatgaaaaaggtgaaaatattcaaattgccctctttttgctttgcctgaacagttccgtgctgtgagcgatcaccgaaaatggcacttcgattgggagaaggcaaagtttgtgggccctttgttggagcagcagcagagaggggacgggcgagttcaaagaccacagcaaattaattcgcgagggcgcacaatcggagacggacgaagagacggagagagagggcaactgagacggacagacagacaatcagagacaatgaaatttagagagaattggagagagaaagagaagagaatagtgggactgactgacttggccaagttggtcgggacgagcgagaacgaattggcaatcctaaatgatgggcaatttcaaattggcaattctaattgcattttgatcaaaataatcaaaatgaattgtgtgcctttgctttgagtgccctttttgttagttaaatttcaaaatttgccaatcaaaatgacctgagtgatggcgaagaagtgaattggagttgaatagtgaggcgatgtgccgttgggcggaggcgaacttcgcgactgacggaagagaggggagggacaacgcttttggggggacggaagggcgagggaaaaagggacgaagagaggaagagaaatgaatggggaaaggaagaggaggaggagggagagaagaaggcacatcagcgatggggaagagggatacggtggaagagcatacggtggccaaccaacatttactgtgggagagagtgcctgccgtggaggggacgactaattgggattggcttcacataacgatttttttttaaaagattttttgataatttttttttaattttaaaaaaattggtccatgccaaccgaaattggcacggaaaaaataaaattggaaaaaaacaataaagacataagcgaaaaactatgccaaaagaatggaaaattgggggtcatgtcgaggaagtcacacaatcagaaacaacctgctgtggatgacactttggttgggaatgtacgaagat

SEQ ID NO: 10913 - DNA, 3170 bp, Heterodera glycines
gccaacattttcgcttaaggcgctttaattgtgccgcggggtacgttcgtgtctccagtcgccttggctaccgggtacaccgacgacgccattcgcaagtcggagattcgcattctgatggccattggcttttgcatgagttcagcaaacactcccatcacttacgtcgaaagtctcctcaatttgacttgtaatgcgttaggaaatgtaattggtaacagtgtactttgtaccccccccccacccctttttttgaaaaagaaaattttcaaaatttaaaaagggggggggggtacaaattacactattaccatgcaatttatttctcgagttctcttttctttgtaaacagaccgagcgaatccgcacctgaagatgaacatcgactccctctgggagtactctgtgctcatcctcgactgcgtcttcctcagaatggacgatttttacagacgcattttgctgttggtgcacggagaccgaacggaatttgcgactcggtcaattcgcgcattcgcttcaaacgttgcattggaaatgtcttctttcagggaacgcattttgcaagttgaggccgactacgtactgctcgcctgcggcgtcatttgcatcgcctgcacttgcatccacggccgcgatttcatcaacagcgtcgtgttctccctccaacggttggattgactgatgacagactttggactgattgctttgctctttcagaatcactggcatcccatcggaacacataattcacatgtacacgggcatctttcagactgtctacgaccatttagtcggagtcagtttaatttgttttaggtaatattgtcataatttgagttattttcagcatccattgactgattctcatgcgtccgcgtctttgcttcagaatatccgactttcaaataataatcagtgattctgtttctgtgtttacatcattccctctccttctcctttaattatttaggccgttttcggaattgctcaatcattttttgttgttccttttacataatctttttcggcattataattttttcgtttccctattttctgtgttgcctttctgattctttctcgaatattgtttcttttcactaaaaatttttttgatctttacttttcggtgttatgacactcgtacaataatttttaccattttttaaatttttctaaaaaattaaatgaatattttaaaagttttttattagaaaaattatatgacttgccattgtacgagttgctctatttacccttgcttctcatcccatttcttctctgattaataaatttgtgtaattgttctttcttttcggcacttgtcctaacaaccgaccaaaacaccccacaaaagtcccatttgaccaaactccacgagtctatccgaggcaacagctgcaaaacgaaagccaagacctaaacaaccgctgataatccatcccatcatcacacggctgaaaccctcactaaaattacccgtggggatggtttttagaagaaatcgttgggaagtgatcaatgaaagtgtccacctaatgggactaattattagggagggattctcaagttgatttatggggcctttcttaaattgcaattttcgagaaaagccaaatgattgctcaatctgtgccgaacattggccattattatgatgaagaggaagtgatggaagacgaggaggaatattcatacgaagagattgacgaagaggaggaggaagaagaagaagaagtggagaaggaagagaagcgaacagtcgccgcaagggcactgccagcggcgcaattggcggaggacggcggacagaacggcactgcccaaggcaatgaaattggagggcaaattcagtggcgagacaagggactgtctgcactaattgcattggaactgatcatttggcactttctgatcagttgggactgaccaattggaactgtctgcactgatcactttcccatttttgtttctgttttgtcaccgattttccccaaagtgttacaccacccaatgtgaatttgcataaatttgtccgcatttcgcctattttgacgcaatgtcccgccggtgacttagttcactgtcccgaccgacggattgcaaactcttccggcaaaagtctgtcccaaaaatttaagtgtttggtttttctgtccgttgcccgtcaaaatcgatcatttgggcaggaaattaacttttctgttgataaagaagcactttggcagccaaaataatcactcaaatgagaatgaatacaaaaacggaactcaactcactccgtcgccatcggcgaattataaattaaaagaaggaaaacgaacaaaaaacaacggatcaaacgaatgattgatctctcaccacagccactttccctcgaaaaaacagaacacaaccccctcctttaaacctaagcctcattaagttcatacctcattaatgtcttttttatcattccaattcccctcccttccctgtctgatcagtctcaccctaacgatcactttgtcagtttggctccctaaatccgatcagtaggttagctttctccctcctcctctctctcccccaattgttcgtttggtcattcggccattcattttcattttttgggtaccataaattctgggctggtcaatcacagcctttattatgagaggggaggaaactgttgactttgtaccccgattagtcattcatcattttccgatcagtgcgcaattaattaatttactccccccgcacctttgacaattccacccccgcaaataaaaaaagaaagcgaaaatcgatcaaatggcaaatgcatcgatagtccatcaaaccccgaaaaaatgccgaatttacaatgttcagaaattgtaaaatgaaaaaggaccttttgctggtgctgacggtggagtcggtggtgatcggagttgtgctgggctttatgatacggccattgaaaccgaggtgaatgattagtggcaattaaagtactaattaattgtaatgagccaaaaaggcacaattaatttgggtgtttagtaacgacgcgattagtctgatcggattccccggagagattttcatgcaggtgaacaaatagctaacaataagcaaatgtaaaaggccaggagaatttgaacctttcacagattgtcgagatgatgtcctcccgctaa

SEQ ID NO: 10914 - DNA, 5027 bp, Heterodera glycines
  unsure (1)..(5027): unsure at all n locations
ataatcttaatatttntgttttataaaatatagtcaatttttttatatatttttacacaactgaatatttttatgagtttaaagatacatatttgtgtttagaaatgttaataaatttttttgggtttaaaatatcaacaaatacagcctttactttgatcaattgagttttaagcaaaatacaaatacatttatcggtaagcggtctaaagtcgcttgcttaatttatatattaaaaatttaattttattcgtcttaaaaatgaattttcttatcttgaaatatctttttctgtatccttttatttagcattaaatttattatgtcaattctttataattttatttaaatttcagattttatgcaattaattttattttgaggtgacaatttagcgcatatgctcaaaaaacgcatttctgcgttaaaactttttatttgggcgtcatttttcgtcactagaaatcactattttggccactttgtcattaaaatagaaaaattcacttttttgcggtttgtcactattttatcactttttcgacatttttgggaaaatttctcaacaaaaaagcaataaaaacgaaaaattgcacccctaagaaacgacctaaaaattttttcaaaaaatgcattcctaagaatagacttaaaattttttcaaaaaataccactaacaattcggaaattttcttaaaaattcttcctcaaaattttttttcttagcaatttttaatttaaaaaggttgagtatttacttaggaaatagttcaaaggaaatgtacctcatttgcaactgcattcagtgaataaaaaattttttttgctcaatttttggctgaaaattatgtcactattcgtcgctatttgggactttttcactattttgtcacttttttggcactttttcttcactattttagttaactattttggatttttcgtcactaaaagttgcgaccctacttatgatatgtatttattgttttattcgctatttaaattttaatggtttttttcaagttaaattatttttttaactttttaatctatgagttttttgctatttgctttgaagctttcaaggataacttgcagcataagtgtttaattctaaataagactcaatttattaatttttgtgtgtgtagaaagaatttttagaatttcttattattttatgttatttaaaatatataattaaattacactttttaatttacaatttctacattataaggtggacaaggcgcaacaattgcgaatttaaaattattttatgtttaaattatatttaattatttaatgtataattttttattggtttacacatagtttaattcaaaatttcgcaaatgaatatttcttaagtctcactgttccaagtcccagaagcctcccattagagcaatttctcctgttttttaagtttaggtccgtattagtgattagattttataaaaattcatctagagaagctattcgtataccataatattatgtttatatattttgatataatttcaatttattatcaaataaattttatatgttaaaaacacatttaatatcattctatccattttaataatttttttgattaagttttatgtattgctacttaaaaataaaaatttttctatgcctttgcaatttttggtgcctttttttaacaatcaataattatcgagatgtctacaaatttattgttgtttgtatttaatttgcatttttttcgtcaaaattgttttctcaatttgaattatgcattcatttccataactattctcgccatcagttatacttttctgctttttttattttgctttgtatttttaattttctatttaattatttttgattttgaatgtttaaataagaattaattattattcttttctttccccatttctcgtcctggggtcattttttccaaagttttttttcgccggaaattcttcaaataatattaaaaaatattcttcaaataatgaaaaaatattcgtcaaataatatttaattatatttaaaaatcactccagaattttggataacccataatgagcctagaatttgtgaagaatatcaatttcgaccatgctcatcctcaacaatttttttgaatgccgaaaaatgttcacattctaatacaggacaaaaaaatcaatatcctatccctgactctaataatggccaatgctgattcaccgatactaatttctgatgaggagctaagcgaagacgagactcatttgaaaaaattattattgtctgaacaacaacaactacttgaacaacaatttaacccgatcggccctactcatacactctttgcccatcaaccaggtccaaattgtgaccccagcacaagcagaaaaactaaagagggaacagcagttagccttaattaatcagaagataaaagagatggaagccgccaaaaaacaaattgaagtagaagaaagtgctgaagaagaaggacgaattttaaaagaaaaggcacggaaaacggaagagcagaaaagagggcaaaaagctaagaaagacggggagaaatggggaagaacggaagaagaggggccaaagcgtgatggcaagcactgcctaatgagatcgtatgtggcatattataattacccgagggagggaagtgatcaatcgatggaatgccctgaggaggcgagaaaaagagaggaaaatttaaaaatgaaaacggtcgaagagcgagaccatgccttccggtcatttgtgaatgccgacacttcactcgacgggagagcgaaagtcgggcaacgcttcgctcgaaatttgttggccccggtggagagggatatcatccggaacccgggaattcccccagaaggacggggattttgccaaagtgccacaggttggcagggactccctcatcccgaaggacggaacaattggcacgccacggggtggcagggatcgagaaagagggcctggaatatgagccctattcggtcaagtccggtgggcgcaacgatggaagaaaagatcgaacgtgtgcgctcacttttatttgaatgtacgcacacattgagagacgtagtcgatgaaatgaacgcaaaaaagaagaaagaggaagagatgaacaaagagagaacgagagaaacagacgaaggaagagagcacggaaagaaagagggcagtgagaagagtgagggaacgaaagacaaatgaagagaaagaacagaggacgaaggaagggaacaacaaaaaaaataaaattaataaataataataatatacaattccataatcatatacctaatgttggaacattcaaatttaaaaaaatacataaaataaaataaaaacaataaaattttaaaatccaaaacaattaattaataatcaaaaaaaattttgaatgttccaaatattttcatttaaaagtgcttttgttcctccctccctttccacttatctccctttgtttcttattctttttctttttttttctctctctctctctgtctaatatcgctcctaatcttccaatactcaccaatcacggcggacggcacaacaaagcacggcacaatcaaaattccaaacaccaaaacaacggacgtcagaaatgcagcagccatttattcggaatttaaatctacaaaaattttgagagaaggaaaagccaaaaagatgaaaaatgacgaaaaagttggatgaacaaaaatgacggttcgctgctgcacatctgtcccaaaatcttccaatcttttcttattcattattcttcactaaattgcattttcaatttacgcaccattttccacaacatttaaatataattgaattgaacgccgggggcggcgttaagcagagagcagagaatattatgcggcgattttcgactctctttcctctccattctctctctcgctcgctcgttcatttctctttctctagtgcttccgccaccaatgttgccattttcctcacccccgcccattaactcaactgctctgatcagatttaaggggagagatttgggatttgagtcagttgttgatcacttcacctttttgatcactcaccaatttcccttggcttttctttaacttctggtcaataaagtgtagaaaaaggggggcagccttttgggggagggatgcgccttcccgcatctcaggctctgcctgaaatgctgggagggcccaacattcctcgcgtatttccccgcatattaataataattgaaatttcttccgaaaaaacgccaccgaaaaaggctaaacgttctccgatacaagcaataaaatttggagaaacaatggtgtaagcttttattttttattaaaaattattttattaatttaataaaacaaagtttatagactcataatacgatggtttttagtgacatagaactaacgtttgtcacggcggacgctgttcgtttggtccaagacaaaaaagtttggactgtcattggtacagacgggtgggttaccaaaaaacgaaaatgaattaaacgaattttctacagaaatgattttctcaacattaaattttgggaaaaaaatctggaacgtttgattcgtgacattggcactgatttcaaagtttaattattttgggaaataaaaatcttgatcttgcttaaggaaccgagcaatgaagaaaaagccttttttacatttttgagccacaagttttccatcgccggtgatttcagcccaataccaattaaaaaaattcggaaaggagaaaattttgtgtaattaaagccatttaaaataatattaaaaaattaaataatattaatatgttagtgcattgttattaaaacattttgttattccatttagcgatgttgaagctgaattatgcaatgtcagacaattacgtgtagtccctgttcaagggaacgaatcacgggttttggatgttttggttatttaagaaaaaaccaacacaaaaataactgcatggaatattttggcggtttttttgaattttttattgagtggcaaagaagtagaaaagcattaaaa

SEQ ID NO: 10915 - DNA, 978 bp, Heterodera glycines
  unsure (1)..(978): unsure at all n locations
tttgaagcttctaggatggatttctatatccatatttttccatatttcgcgatttatgtccatatttccatagttttccatattttggcattttggtccatattttatgtccatattttggcatttttcaaaaaaacctctattagaacggcccccatcagctaaattagcctttttgagcccaaaaaccgaaaatttttcaaaaaatcattttttcgccaaaatttctcgagaatattgaataaatttaaattttcttaaaaattaataaatttatgtcaaaaataagcaaaaaagcgaaaagttcgcttttgttgttgattttgcgctaaaaaaataataaattttagctttcatgttttttttcttctaaaatgattgcacagaattgccgaaaaaattcgagaccaatttccgaatgttgaccgactaccgtatatgctctaattatagcccagtctctattaataccgcagtctccaattatcccctgtattctgaggaggttgaaaaataatcccccatgggctataattagagcatatacggtaattgccaaaacgaaagccgtctttgtcaaagcgccttaccgagtcaaaaaatttggaaatgtatctcatatgcaatttcaaccaataaatttgaagaaattttacactcaattttgaaaaatttatgtccatattttgacgtttttgccatttatgtccatattttgagattttcgcaattttatgtccatattttgcgatttttggtccatattttatggccatatttcgcgattttatatccatatttttaccagccctactaattagatgtgaaaaattttataaataanatatcaaaaataacaatcataacaactgtnnaatacatatcactcaacaannatagttccctggancctancanncttctccacgagaaggaagttcctaatggcgcgacggaaaaatctatgccgatctttga

SEQ ID NO: 10916 - DNA, 3276 bp, Heterodera glycines
gtgtcaattagtcactgaccggggtactaattggtcagcggtcaagagggcactaattggtcagccgtaggggatgggtggtgtcaattaattaattaattggggaaacctaaacctattgaacggtttcaaattgtcttgtacttttttttttgacataaaatttgattgattctaaaaatgacagatgaggggatgaaattcaaatttctgatgggggtgggaggggtccggaattttgattggtcacccatgaagtgttgacgaatattcaaaaaaccgtcacaaataattaaaaataaattgtcaattcctttttggtctaagtaggtcagttaatcgatggcatagcagtggggaggagatgtaaaggacaccatcactgggtgcaatgggaacgcgacgccatcgcacaaaacattgcctcccaagcttatagcttacaataataaacatctttttgtattggtcatttttcatttttatccgtaaagatttcccaactcgtgtatatatttattattcatggcggaccaaaatttaccggtcaatgaatgtaattttatttattattttcaacgatctaatttttttctcaaaagggcctcatcacacaagcccaacggaccaacaatatgttttgttctatgaattaaataattaaaaaatcatcattttgtctctcattttaatctattccctactctggctgaccttcctttgtgttggtcgtccagagtagggatccttatgttctcacaatctttttaagttatggctgacctttttttcaaattggttgtcctctcttattaagattgtttcattaatctcataataataataataattttataaaattcgccggtatatgatgaaaacgttagacagacaacaacaacaacaacgacagaggaaggcgggacgaaaatgggaatgcaagaggaggggaaaaagacggagggaggacaggacgaaccaaatgatggaggtgaaaatgatggaagaagagagaacggaaaaggaggagcaaaacaacaacaatggaaagaggggagaaaaagagaaaatgaagggagataagatgaggaggacgaaggaagaggcgaagaagaaacagagaactgagagaaccattgaaaagaggcgaaaaaaaagaaggaagaaggggagagaaaggaggaggaaaagaaacaaatagagggaggcgaagcgaaaatggaagaaaagccaaagaaggacgaggaggaggagcaggcgagaagaaacaaccgccgcccgggtcaaaaatggtgggacaattgttttattttttatttttaaaatacgaaaacgcaaatgtgtattggccatcggaggtcaatcctttatgagtattggctaccgaagggccgggtccgtgggagtgttggtcgccggagggccgagtccttgggagtattggctactggagggccgagctcttcggagtattggctgccagtgggccgagctcttgggggttttggctaccggaggaccgaactcttagggatgctggctattggtgggccgagctcatagaggtctgattgccgaaggaccgagttctgggtttcaaagagaagggaatgttggggcttatgggggagaggtacaaatcagatacacgctcattcatttaaaaatatttatttattggctacaactaatgcgaaaaatttgatgaattattcggtggtttttggcttcttcttttgatcggcaatcatatcactgacacagcaattgattctggcacattcttcacacatctcgaatccaatcgccactcgcccatcttccagccgacgtgtcttgtctttgttgtgaaataaattgttccagtcctctgaaagttgtcaattaatttggtcgaaaaatttgattaacctgaacacagccgaatcgctagtacaaattggccccgcgtgattttccaaagaaatcgctcatcaacgcgtggcttcttagctttcacttgttgctcctccgcagtttcgggttgtacaaattgatctgccattgttgttgatgaaattttgcaagactgatttgattgtgcgagaaaatcttggcttaaatagctttaaaaagtgggcgtggcctaattttccggggagtataaaagccccggcaatttgtcagctatgtctcatttgttctgctacaatggtccttgccatcgaattttgtgcccaaattctcggctgttcccctaaatcactccgcgacaagctcaatcatcccgaggaccgagtgaaggcactgaaggagctggtcggaaaaaaggttcggacgacatacaaggaccggaatggaatgcagaaaacattttttgtcgacggaatatcggacaagggagcggctttgaccccggcgtatggcagactcagacaaccgtacaacatcaacattgctgcccatttctacgctcgccaccgtatcaagctgcatctcccgtacgtgccatgtgttgtggagaaatactccgggagtggcgaagacagatactacccaatggagctactcgaaattgtggacgaggactacaccatcaaagagcgatggcttggcaaactgtttaccgaaattgaggaaattcctgtcaaacgccttggtcgagttgaggaagtcgaagaaattgacgacaacgatgatgatgatggtggtcgctacgaatgcagtcaaccgtcttacgtttattggtaaacacattaattttccttaattatgcacttttctacctaaaaacgacaaattcttttttaactttatttataaaaattgtatcttccactccttaataatttacaaattgtgtcttcttgctcttaattctgcacttttctacctaaaaatgacgttcccaattgcttaataatttacaaattgtatcttccattgcttaattctgcatgtattttaactccttaattatgtacttttctacctaaaaacgacaagttcgtgcacataataaaaattgtatcttccttaattatttacaaattgtaacttctttcgcttaattctgcacttttctacctaaaaatgacattcccaaatgcttaataatttacaaattgtatctttcattgcttaattctgcatgtattttaactccttaattatgtacttttctatctaaaaacgacaagttcgtgcacataataaaattgtatcttccactccttaattatttacaaattgtaacttctttcgcttaattctgcacttttctacctaaaaatgaca

SEQ ID NO: 10917 - DNA, 907 bp, Heterodera glycines
  unsure (1)..(907): unsure at all n locations
cctgaagagagggcattttgagtggggaaatgccaaaatgaattaccactctccgatcaaagaattcgtggatcaaaaggacggagaagaaaagggcgagcagaaaaagcgcacaaatgacaaaaaaccaaaagaggcgcagaagcaaagactgacgctgaagcgaagtgccattttaaaagagttaatttagcatttttaatcatttttttgccatttgaaatttgttatttgtctcggctcaccaacaaaaagaaagaaaagccgtgcaactgatttcgcccgtgattgttgcacattgtgcagggttttgcctgacaaaacggcaccgtcggtgccggcgatcggcggatggaatcatttggagaaagccgacggattggcattggcggaggaagaagagacctttaggaaggtaaagccgaacgaatgaaccacgaaacgaatcatttaaatctttggagagagtgggctggcaaacatccgaaaagcattcgatttcctcccttttccatggcccctttaaatttgccatttgccaaaaataaaattcatttgatacaaaaaatgagagaaattgactgtgagcaaattgaaaattggcaatacgtaaagtgatgggatgacattcattataaaatcaaccggtacctttaactcatattcttttcaaccttctgctgctgctcaccctcgccctttgctttaccttttaagattttacgcctcctttttctcttcttcccttattttcatttcctctccctcctcttcctcttncatttccctccacctctaattcgccaaccttttcttcttcttcttcttcctcctgcgtnttctccctcctgntctcttcttttcatccacctctanatcttcctcctttttcctttcttcctctttg

SEQ ID NO: 10918 - DNA, 4588 bp, Heterodera glycines
  unsure (1)..(4588): unsure at all n locations
ggacgagaaggaagcggatgcacactgatgtgacacaacaccggtcaatactgactctggttattagaggaaagagctgctttntaaaaaagattcatttatggtcggtcatatgttcatctacatcaatttaattgttttgtttaattgtaaattataaaattaaattaagttttaaataatttatgttatttggaagcagaaatctgaaaaaaaattcttgttatcttttcgatagctcataattttgaaataataatttaaatgtttggtcattattcttcttgttataacaatttaaaagtggtgaaatttttaaaaattacatatccaaatagagaattagagctattttctaatcatttggcggattataaaaagcccaccagaaacagcataacattttctaccgaatttcttttcagttcattcgccgaccgggaaaagagttgacaaattagcatatttctttattcatttttaagctttagcttatcaaacacaaccaaatgcacaaaatgcaatgaaaaagacaaaatgaatggaaatgtgtgaagattggcagaaaagggaaaggacaacaaatcggacaaataaatcataaaatgaaaaaatgtaaaattaataaaataaaaaagtgaaaaaattcaaaattaaataaaaaaatatatgtataaataataaatgaaaagcaaaaggattttacgttatgaagaaggcgtttcaatgaatgttaatgaaagattttgaagaaattccggcgataaaaaagggaaaagagtgagcaatatgagagaaagttagagaagaagacagacgcgaaaagagaattgagaaaacagagaaagtaaaaagagggaaaagggtgaaaaagagagagccatggcaagaagagagaaagagagaaatcaaaaatggaggacaatggacaaaaattgacggagatggcactgccacacccaatggtcgtcgtatcaccgcacaaacgaagtttcggtgccacccgacgccgccgaaccattggaaggccaccgcaccttaaaggggggggggggtgagaagatgtcagaagatggccaaattacattgggactcgacgtgttcgagtgctgtccaccaactgcccctccgttcccatggccatgggttcccgtgactattcgggccgagtctaaggactccaatgaaagagttgactgcgtgtccccctccacgttgtacatcctcaactcgtcgtatggccccgtgttcgggtcggtctccaagtcgttcacttgtgcattcagtccatcatctgttgaagaatgttgtgcagaattggtcgtcccgtcccttcttcgttccctaccaatttgcctccctcccctgggggtacactttggtggtgcccccgccgagtccgtttgtgtccaatggcatcaccggcttcctcaggttggataggttgtgccgtgtgttgtccgcctcgccgccgccctccacgtcgtaggggcgcagactgtccggcttcatctcttcggggcggaccgactcaaatggcggcttttgtcttctcgtgtaaacaaccattagcatgacaatgactgaagtgggaaatgaatgaccaattagaaggggagggattaattacgagtgagcagcagcagagaggccaagatcatgagcatggccgagttgctgatgcccagactggccacggcttcgcgctgattgcacctgctcagcctaccattcacgtccaaagacgcgtggttcccctccggacacacacaaaacgcacctttcatttgattatttatttattaattaattaatatttgttaatccgtccgtacctttccacgtgtccgcgcaaatttgcccaaggggacaaaactgagcgccgagtttatcgcaggtggccaactaaacaaaaagcagttgaggagtgcgtgggttcatcaccgactgcacctgtgagcatccctggacgacgcctttgacggtgtccaaacggacaatccccgggtttggcggttccctgcggtgtctgtgctggtgcgggcggtacctccgcactcgcccctcgctgtcctcctccctgtgcggtcgcgtgggtgccgccggtcccccgcccggagccatgttcagctgcagttcgttccctgccgccacgttcagagttccctcgacggtgctttcgtcgaggcgaaggcccatctcgaaactgttgtagcggaatttgccgatgcagccttggaagccctgctggccttgctgactgccggcaaagaaagtcctcgcgacaaaaagtgccgtttctttgtccggcaccaattctctcagcagtcggtactgaccatcgaccaaaagttggacacttaaaaaacgcccttttgacaattgcctttctcaatttcacctgctgggggttcggtgaaagtcgaccaaataagggacggagtgattcagccgaggctccgccaattccatttccattggcgccgaattcgccccaattgtcgacggcaccaaatcaaaggagccgcgggtggtgaaactaaacagagtttgaagggctaaaaggacggtaagtaccggttaatgtctagtttcatgtaagccggaggctgattttgcccaattgccgatgccaactgtcccattccggtagagccgggcaaaaacaacactcgcaggcgagactcttggtaagcgggttggacttggagaatgtacttgagaaaggagtcgcgggaagtgaactccacccaattgatcgggcgatcgcaccttaagaggtggtaataaagtgggtgtgtaattaaagaggggataattgaggtgtgggtaattaggggcggggtaatattatatagccagagagccttttcgactagccgcttacctttccccttcccagccgggctcgcattcgcacttcgccacctgctgatccatcgattccacaaaacactcgccatgtccattacaaaatgtgcttgctaattggactgacgcgctttccgtcaaatgattggcgcggccatcggccgacgaggaagccgagtcgccggcacaggaagagccccaaaacattgagcagtcgggcgaactctgttcggcatggattggacgatacaaatcgtagtgctaaaagggcaagggcttaagggaagtgccgaagtgttggcactcacgtcgttgttgaccaccaactcccgagtgcagcccacaaaattgcccaacgcgtgttctctgactgcgctcggatagtcctccgctcccgacagcggcgccagtccgcccaactgaagcggggcggcgatgttcagtcgctcgtcgtcgtccggcgcgtcccgactcgtcaagcagaaggccgtgttcggcttttgctgctgctgctgtgcaccgacctccatcgttgtgcagtcgtccaacactaagcgcaactttttgtgctgttggctgagcgttgcgcggtgaaatcggccgtccgcgaccatttgctcgacgaaaaggtccaccggctctttgccattgaattgaagcatcgcgtgcagcatgcccttctcaacgtacatcagcaaatagtcgttgtaactcaatgcgtccaaatgcgggtcgcccatcggtccgttgtacagaaggacgccgtcctgcttggtcatgaagcggagagaaatgttgagcgaagtgcaagctgaaagaacgaatcggtctcgaaaactgtgaaaaaaagggggggggtggcggaccgggcaacggtttgaaccatgcgaagccgcggccgtcgaaactgcgcgtgtttccctggcaacggaagccggtcagctgcgcattgcgacattcgcagctgagaaaaaggaggggggatttgttataattggcattttaacgaggataatactcacaaagttcctggccgagtgtcgtgacagacgcccccgttgaagcaaacagtccgatcgcactcactcttcggagaataggcgggacattcgcacacatcagccgccgaggcgttcagcccgacgatcacagttcggttggcttggaccacaacgccactcttaaaaaaatgatcagcaaccaatttaatgatgaaatgtccgcctcttacaatctttgatcagtcgaccctcctgatcaccattcagatgatgctaggggtcgtttcgtaaaagtgtcaattttaacagattttccgaaatgatcccccagcatgccatctgatcagtgatcacattctcccccctccctccctattcccattttctccctattcccccctccccttttttcccctttgccaatttctcttcgtccgtgcccttcacccttttccgtccgctcacattgtccgccctattctccgtacggcatccgttgtcgcatgtcgtccacttgcacatgtccacgcccaccgtcaaaatgcgcgccctcaacaccgcggacagcctctccctgtttcgcattgcgagtccgggcaaatgcgtgggggcgaggaattcgtcaccgatccgagcggagaagcgaagggccaccacttttgtggaaagacgttggagcagctgctcgtcgggcttcatcaaaatcacttccacaa

SEQ ID NO: 10919 - DNA, 1230 bp, Heterodera glycines
  unsure (1)..(1230): unsure at all n locations
tggtggagatgtgatggatgatggaacaagtcttccttttactcttccctcttctcttacttctttagcacaatctttcattttagtttttctctctctctctctctttgtctttctctgctacctctctctctctctctcaccatttctctctgtctttctctgttacctctctctctcaccttttctcactcttctctaactttgatttgtccacacttactcgagtccagcatttccagctcgtcatcatccgactccgtcccactgtcgcacgtcggctgcgcttgcggcaccgccgactccgtttgggcatttgaccgcgtgcatcggtcgcttgcggcgatgtttttacggatgtcctccatcagagacagttgagctctacgagatctctaaatgaataaaaaaatgaaaagaatcgccgccattcattcggaattagccaaaactgacagtgttcggcggagagtgtgaagagaaaccgccgcttccgtccgccgttcgttccgctgccgccttttcgttcaaccgcgcacttcgccgcatcggtccgtctccccttccgccgctcagtggcggcgacgatttgccggggggcgattcgctgccgtcctgcagagtctgtcgtttgaatttgctgaccaatttgccgagcatttcctccaaaacagcggacaaaaaaggttttgaacgcaaacattttgcaacagcactcactaaattctgtgctccaacggatcacttattcttttcggaatattcgcccgtcggttttctgatcggctcagaataattgtggcggacaatcgttgtcaatttaaaaatgagtttaagtagtgaatggaatgagttgggattgatggaagcaaagcaataaatgaagaaaaaggggcagcaaaagggcggacagagagaaacggagggaagtgacggaagaggaagaagaagaggaagagcgcttaggtggtgactgttggagaatgatgctgaaagcgatgggatgagaagcaacaacgcgcagcacagaaatgggagcggcgagtgacggcgggcgggcacttttatgccccccccccccccgccactcattgtcaggngatgtgccgacacggaaattaatttcgcaaatattccggggagaagaaaaagttgagttcgtcaggggggggggggggttgtctcctcatataggaggggatttcagaattgttagctgacactatgcaa

SEQ ID NO: 10920 - DNA, 3149 bp, Heterodera glycines
tggaaagagcccgaggatccttcccatctttcttaccctcgtacagtctcagttctttgtttctctgcccctctagtatttttaatatactgctgcactcaattggcgtgaagctagcacatgggtgtgggcggggactaatgcactctactctcatccccctctccctgtctcattcttgccttctcctcatctctcccctatctctctctctttcctctctctctcctctctctgtctcactctccccctcctttctcctccctctctctatcctcctctctttctcccctttctctctccaaattctttctctgtctctctcacactctcccctccttctatcattggatactttgtgcaaatgcctgacagttgtcccccctccccccccctcctttccccaacaaaatctcgggttctcccgaagctcggcctttggcctctgttgaattggcaaattgccactttgactgcgtctggccggccgctcttcgccccgtgcccttcgaatttcccgccccttcccccggcccgcatccccccccccccccgtccatctcattcaattcgttctctgccgattagcgtttcagcgacaataaaatgacgcgagaagaggcgaacggcggtggggggggggggaaggcctttcgtcgcgttgttaacacttcgcaagcggacggacgacgagaaaagggggcggagcaaaaacagtttttatcagcagcggaaaacgcgacaaagtcaaaacactccgtcaatggtcgccccttttgccctccttctcattttgcttcgttctgttcgttctgcgccacattttacccttcacaaataaatgcattttgaaagtgggaatttaagagcaaaagggcaaagagcagcagaagaagcaaaaggttggaaaagcgagctgatgagaatgggcaagaacgactgacccccgggggaggagggacaaatggacgacggaaggggggacaaatggacgacgggaggggacaaatggacgacgggaggggacaaatggacgacgggaggggacaaatggacgacgggagggggagggggacaaatagattacggacgaagagcccacgcgaggaatggcaaacgacgaaacaatgcatctctctctctctcttcccctttcttatcagttgaataaaagagttactttttagaatcggtgagccgaggaagggaatcgtcaaagaagggaaacggctgtatgctaatatagtgatttaaaatgtttggcgttttgttgttttatcttgtgttatttttgtttgtgattttgtgtgatagttagttgtcagttttatgcagtcggcagtttccctattgattgtcctcgccctatttttatttggaattaaacttaaattgtcttcggcattgggctgtattgttttgtgcttgctttgggctgttgtacttttgctgtgagctgttcaacatattaaagccacaacaacaatccctcttttttatgactgctgtactttgtttctttcaagcttatccctttctttgaaatatgccatagtcgtggggaatggcaaatggaaagtgccgggactgagatggacggaccattgtgaaaaaccgttaatttccgctgcaaattactccacctcttatttttcctcattaaaaccctttccttcggccatttctaacctaaacaagctctaacgagtatgcacaccaaatttgggccctgttttcagcttgacactttccctgcggttgccaaattattataaattgcgccgtcatttgcgtgctaagcgctaatacggccaaaaacgtaaaaagagaagaagcaggactaaattgggaatgggtgggcaagggcggaaaaatgccaatgccaatggcaaacttaatagaagagacgcgcgaatagattcaatgagataaacatagacacaggaaaatgttaaagaagatattcttttttgaattggcagaaggataccaatttattgtgttttaaaaatacaaaaaataaaattttctttaaataaccgattaaaatcaaatttatttccaaaaagcaaaattcattaaagtgaatgaaagaatccttttatatgacatattaataatttacacattttttggtataattatacaaatgtaatttatttttctataattccaattttccgatcactgctcacattgctttcctttctttgcaaattataaagggaaggaaaaaaggaaaagccgcataactcggcgcacatatccattcagcaaaaacggtaaaaaattcacataacaaaccgaggtcaatctacccacccaccaagtttcatcccgaaactccacattcacttgggggcccctcctttgtgagggggtgagggatttgatattcgtaaaggtaaattctgaagccctctacacaccgatgagattttatgcaaattaacggccgttaaaatcacttcccttgggctcattatttgggccaaataatgacaatttttgaggattttccctaaaaaccataaaaaggctcattttgaaaatttagactcatcagcctctcaaaaaccacataatgaggttaaagcctcacatctgggaaccctggtaataaatttataaaaatgtaaaaaaaaattagaaattatgttattcacaagtacaatagccccaccgtctgaggccgcgaagcgaccgaatgactcaaaaaaatttaaaaattccaaatcgcttctgcacccaatggaatactatgtagcgaagctccaaaaacacgcagcgctttatcccagctaaagacccgactttctcacgcaccgatagttggaatttaatttttcgggcacaattgcgtcagtgatacaaataattttaaaaagataatgggttaaaaaataaaattttgaaaaattaccaaaagccgtaaataatttgtaagatgcttatgtatttctcaaacaaattgtgaagaaaaggcccagcggcggctccaacatagtaaatttggaaacttaaccaaaacaaaagttttcaaaagcaaaaacatatttctgaaattaaataatttctgtttttcgttaaaaattcttatatttttttattcaaaattttaaaaaatggatttttgctgtgcattgagg

SEQ ID NO: 10921 - DNA, 1309 bp, Heterodera glycines
tttcttcccaattttgttgtttgcaaataattgcaataaattgagagaacgaccaccgtgacccaactttctttgctccatttttgaatccgctccatccaattattaggccggcccttccgttggccaattttccttctctctgtgcgcaaaatttgtggcatggcactccaccgcaaattcactttggccaatgccaatgccattgagacggacgcggaaaagagccgaccgaaagtgtgccaattgcgccaattggaaagcatagaaccgacgcattggaataaatgaaaaaaggataattaaaaatcgaatgcctaaaaattaaaacaaagaaaaaaggttggccttcgcttcggaatccatcccaacacgaccatttttcctttttttctctccccatttgggttttgaaaaagaaaggagccgtagggtcaagaactttgattggaattgaatgaccaaatttgcattttgagtcatttttacggctgtgccgccgttaaacgaattgttcagaaaaatgacaatttttctaaaattattcgataagaaaaataagcaaaacttagaaataagttcagttgtagccctaattatttttattttaagcttaaaagatttttcatttattggaatttttattttattaatagaatttttgtttttggtttagaagttatcattaagaaatttgagatcatttgaactataaatttcatttatttttaaaaatctctgatttattttagataaccgaaaatttggaaaaaattcaaaagattacttttgaagcaaaaaagttgcgaagaaagagggcatttttcaacagaaccagtcttatttatggtgctgcttttggggatttgtgtgaaaagacggagacaaacaaagatttatggcctttgtcataaatattttataaactgaaaatggccaaatatatttttattcgaaggtttttcttttaaaataaaaacgataaatttcatttatttttaaaaatctctgattaggcaaactttaattgttaaaactaaatttgtcaaaaagtattaagagttcagcattatttcttattgcatcaattccttatttaatgtttactaaattaattttctttaaaaatgccaatcaaattgttccaagaaagatttctgagaatttctcattttatcgaaagtgtaatttaattttcattgttaatttggcgtgagtatggcttttgtacataaaaaatgaattaaaataattggtcataaaatgtaatttctaacgataaaagtaatttaataatcaactttaagaa

SEQ ID NO: 10922 - DNA, 3600 bp, Heterodera glycines
tggtttagaagttatcattaagaaatttgagatcatttgaactataaatttcatttatttttaaaaatctctgatttattttagataaccgaaaatttggaaaaaattcaaaagattacttttgaagcaaaaaagttgcgaagaaagagggcatttttcaacagaaccagtcttatttatggtgctgcttttggagatttgtgtgaaaagacggagacaaacaaagatttatggcctttgtcataaatattttataaactgaaaatggccaaatatatttttattcgaagttttttcttttaaaataaaaacgataaattttttattttttaaagatttattaggcaaactttaattgttaaaactaaatttgtcaaaaagtattaagagtttagcattatttcttattgcatcaattcattatttaatgttactaaattaattttctttaaaaatgccaatcaaattgttccaagaaagatttctgagaatttctcattttatcgaaagtgtaatttaattttcattgttaatttggcgtgagtatggcttttgtacataaaaaatgaattaaaataattggtcataaaatgtaatttctaacgataaaagtaatttattaatcaactttaagaactttgtcatcaaaaatggacaccaatgacagcaacataaataatacggtaaaatttcagaaatattctccgaaaaattttattgccgtacaaatgatggctttaaataagtaattggtttagatgtacctcaagttccacaatgtgtacccgtgttggaatttcatcattgccgcattggccataaatgcggtggcaatgttcggaatggtcagcaacttttccgtcatttgggtgacctataggacaaagtgggtattcgctttaaaatacataattcataaaaataaaatgactattcatttgctaattaatgaacaattactcaattgatcattctaaaatgccttttttaggactctccgcggcactgccaattttctgatcgctctttgctccttcttcgatatgcttcacgagcatggccatttgctgttcctttacactgcgctatctggccaaaatttccttcccatctcttctgcggttcgcttttgctccgtttccctttttggcgttggcggaattgccgtgtccattgccttcactgggctcgatcgtcttttgtgcgtcctctttccggcattgtaaattttaaactaatttaaattcattaatttatcaaatatttttcagtccaagacgagtgaaaccgttgccctatctcagtgcgatcactttgctctgtttggcttcttccgtctgcactttgattggttactacaaaaaaaacaatgaaacgccagagtttatggtcactggcacattctccgatttagtctcggttggcatttttttgtaaatttattttccaatttatcaatgccaatgccacaggatccgtcgcttcttctgtatgggttcattttgtactcggttactgtcctcatttatctgatcactgggtttgtgatcagaaagagagcgagtaaatccgtttttaaaatattttaatttgaattttaaatttcattttctgtcatttttttatcagaaaattcctccaattcgtcgtcctcttctgctgagctgataaatcgtcgcattttccgctctcttctggtcattgttctgctgaatgttggcggctcttatgtgaacctcggttttctccttttcatttacccattttttgacacggaaaacccaattttggcgtggaaagttgccatgtttatgggcattctgacggtcaatgtcagctcggcgtccagtgggcccattttgtactttacaaggtaacaaaaatatataaaataataaatttaattttgaaatcagacatgttaaccaaaatttccgtatggttgagtctcagacaattttcctaataataaataactttttaagtcagctaatttccaaaaagagttcaatttcatcctaacccgttaaatttgcatgatttgttgacattaaaaattttttttgatgagtttgagtatttgggacttagaaaatatagtgccaaataattgaaaatgtttaaatcaattttaattatattttttcaattataaattattttcctagaaattataagcaaataactgaaaatgttgaattcattaaaattacggtattagcaattcagcgtactgtagtaaccagccgacaaacggtgcttcaaaaatgaatggaagtgcggcacggtacttcaccgtaaaaactaatcccacaaaagaaaactacggtaattaacccacagaaaaaaaatcgctgccgcaatttatgcgaaacttttatagactttatttaattttaattgaaaatttggcattttatagactttatttaatttgaattgaaaatttgacatttgtttgcttttgttataatcaataaattattgacaaatatttttatgcattttaaatgaataggcatgtacatatacatattaaaagatgattttaataagcaaaattgccaacaggtcttcatatttttttttgtataaatgaaaagcattttgttttttctcttttttcttcaaattaacttttcattttgtcaaatcattcggccaatgaatgaattcggcagtcaatcaacccattcgtatcatatcacacaggtaattaattatttgtattattagagacaaatatcgaaatgccaacttttatcactgttaaaatttaattagcaattagagcccgggagggtccgtcgaatttttccaatgcaaatcaaataaattttttaaataatttttttccgattttctttcgaatttcgacccccccccccccctccgctttctgtcgccgctccaaaacgatcatttgcacagatttctccgcccggcacttaccgtgtggtgatgtggtctcaacttttgctcggcgcaaatttcttcggcacacaaacaaacgaatgcaaagaaagtgaaatatttgccaaaatttggatggggcgacgggaaaagaagatggttttccgcctggacattcttcagaaagaaaactttgatgagttggcaaaatgttttgctcacttttactcggtcataacagacgaaaatgggaaatttttgttggcaaaaaatggaacattgaacaaaaaattgggacttttctcaatgctaatggatggcacaataaatttgcatttgataccaatgaaaaaggaaggggcaagtgatcctgattattttttaccaaattttgtcgggtttaaattaaactatttaaattaattaaattttaaatattgaaattttaatccttcgctttttaccattccatgcccttttgaagatggcaattgattttggtgattattggccaacctttcccttccaacaagtgtattccttggccaacagaacaccaattgacactttgtgcacttttgacaatttggacagtcggcattgtcttttgaaatactttaaagcatttaatgagaaaaaagaaatattcgcaaatacacttaggcattggctgttcgggattcaatt

SEQ ID NO: 10923 - DNA, 981 bp, Heterodera glycines
agaaaaactgcattaatgaaacgactgcgtttggcgacgacacaaatggtcgacttaatttgggaattttgccggattaatcggtactttttatacgctcatcagtcagtggaagatcaaactcaggtgaatttcattttttaattattgtttggcattgaaaatgtgaatgttttcttttaaaagaagtcaagtgagtttgactactccttttgtgaccaatggcctaccgtatacaaaaaatcgttacaatacacacaatttcctgtcgttttggatgcgttttcaaaatggcttcaactctcatatgatcattcacatgggaaaatcaccgaattgtaaggcccaaaatggaacaaatggcaaaaattaagcctaaaaagtttccaaacttgaaagaaataataataaatagagaccagatttatttccataaaatagtgttaaaattacgaaaaattttcaactttctaatcgaaaagcgaaaaatcattttaattcacgaaaaactaaaatagatataaaattagtatttaaaatttaatggtaattgtgagaaaataacttttattttcgatgaaaaattatttaaatagaaattttgaacatgaaattttttttagacaatttttgtattttttttaaatttaatattttttaaggtttcttgaaatttttgatttttcatattaggtggaaaaaagaaataagaaataaaaatgcatcatagaagctttaaaccagctaaaatactatttaattgatttttagtaataaaaaaataataataataataataatatggaaattcatacaaatccgatctttaacataaataatttgaaaaacattctttccttttaacattgggagtatttcaaacattaaattatttgaaattttaatttaaactttgactaaattcttcgtccatttacgttttgacagaattcttcctccactacaaaattgtgaagaaat

SEQ ID NO: 10924 - DNA, 2252 bp, Heterodera glycines
ttttatttcccttaaaattgaaaaattatacacaagttatgaaaaatagtcaatattactttgcgcaacatgtccgggttatatccgcgtttgaacaattcgcggaacaccagcaccatatcgaagcggccgccaaagtgagagaaggcataggtgtcgtaggccaaaggcaagtcgtttatcagccagctgacaaacgcttccaatgggttttccgccaccacttgcttgttgactgttgtttcagtgaagcggcgttgacaaaaggcgactgtacgacttggaccgcacacttcacagcctcccgatgcctctcgccagctctcattttcaatgcagtcggggcaagcgactcgtgctgcgatgaaattcggcaaatgctcacgcttctcaggctttacagatggcgtgtgctgcatggtttccaagtcaaatgccacgatgcggtaggggtcgcgttccttgggctcaatgggttggatgtagcatccccgctcggtgttgtggtagttgttgcacatcttacagaagcgttcaccacacacatgtccttttctgcccttctgagtgttgtcgtgcacatcccaaacagcaccacaatctttgcattttttcgaccgcttgcagtagcctgactgcagatgatgctggtagcagccgttgttggtgaattttttgttgcactctttacactttttgatgaagccggtggatgatggacatggaaaagctggtccaacacgtgagcacagcacacagcgcgctttacatgttttgttgtgtgttgacattttgtcgtatggccgttcacactccaaacagtacggtttgccgaacagaccaccctgcttctggacaccatcgaaatggtcctcattgaagtacaacagcagcggagtgtcgtagatgttgtcaatgtacttgtacagcggcttatactgtcccaacgatccaaagatgaacacagcaaagcggtgttgtcgctgcgtattgttccaatggtcaacgacgtgaggcacaaaagtgtccgcgtcgtacccatccaagtccattggtgcattaacctgctgcatgagctcaaccgcatcatgatgaagttgtccctgctgtccttttctgtcgttcacatagtcgaaaaacttccagcgaggccaattgcatgttttgtcgaccattgttgcctgcagcgcgtagaaaaggcagaagtggttgtcgttattgcgaattttaatcaggcactggtcattaattcggtggtgaacggccgttttgacagggcgacgagctcccccattgacacgacgtttggatggcagtccattacggtcgagagtcgtgatggtgacggtaaacggctcaccccataacgatacatttttctgttgtttggactgcgccacttttttgaactggttgagaatggtgtcgagagtgttgtttgtcatttgtcgtatcgggattgggatatctccgccttccagcagaggactgctgatcatacagccgaggtgtgtaggttcgatgtttcgctcacggctttcaacaattgcttcgtcgatgcagtgttggaaaatcccagccaacaatgcctcaggcgtgctcggcaaatccgtaatggtgaactttgacttgactttgacgtaatggaatttggccatgtgctcgatgctgttctccaattttttaacgtagtcctttgcctgttttgatgttccttcgccttgctgcaccgatccaaggaagtgtacgacacccaagagttcattgatcaggaagccttgacgtggctttttgggcgcggagagaatatgatcaatggaaaagttagaggagcgttttcgtggttccatttttttttaatctgagagtggagtgaggaggaatgagtaaaatctcggtatttatatgcgagcgccggcatggaaatggcgtgaaatcgtgaatgaataataaatatttgggcatggaaaatagtcaaaaaacttaaacaaactatggcctgaagagcagcacaccgccacccatgaagcacaagacgacagggcacctaaacgactcgggaaattagtcaagtcaagcgaaagacctcaagccctaaaaggcaaattgctgccaggataaacggagctttttgtaatttaagctaccgccctggttaacagcaaaaaatatttattttaattatacggtccccaaaatcccaattaaatgatacggcccccataaagcacaagacaagtgagaggaggaga

SEQ ID NO: 10925 - DNA, 3358 bp, Heterodera glycines
  unsure (1)..(3358): unsure at all n locations
gaaaaaatcgatttttttgttttcggggcagtccccccgacccgattgcgcccagatgtatggggagaccgaatccttcgggaatagcttccctatagcctgtactntaattctgcgttggatttttgctccccataaatgtttgagtaccccaaacggacacttgaaaaaatcgatttttttgttttcggggcagtccccccgaaccgatgcgcccagatttatggggagaccgaaaaaatcgggaatagcttccctatagcctgtactttaattctgcgttggatttttgctccccataatccacgcccacttttgggtcaaaattattcctagcaagaaatcgaaatcattctttattcaaattctagaaaatgaaacgcaccaatttcaacaatgctcttccaatgagtgagaaaaagcccaaacttcgtcgacgcctgccggctgaattgaacagcgagctgatcagtttcgtgcctttgatctgcctatttgccaatgtgaagcggactccaattggtcctgtgtgctaccaattcgagtgttttcgtagtcgacgccaaaagaattttgaatatttggtaatttcccctttttttattttattacataaattattatagaagggtgttattgcattattcgatgtgatgtttgaggagaaaaggacaccgaagaagaagaaagtggggagactgcatctacaggaagaactgccgcatgacctcagccgaaatgagctcctgcactacctgtgctacggacgactgggaacgaatttgttcgagacttattttgtgatgagccaagcaacaaatgtaagcgaaaagttttaaatttttaataacaacacaaaatttttagtcaattgccattgggaatttgtttgggcttctgctcgattttgcaatgagctcaccaactccttggcacatgaagcgaccaatttgctgtggaattttcttccgtcaacatttgccgtggattctgcaacaaccgatgaacgtaatgctttctcatggcttttttccggaggtccgaagtgatggttttgaatttttttggctgttcaacccacacttgaaaaagtatgctgggtatgtccgaattctccctgagcttagtcaacctgacaatttgcattttttccttagcattttctaagcatttatttgatcattttattcatcattatcattacatacagatcggaatttgtcgatttttccattttctcaataaattgttgaaatgaatgaccttgtgacatatgatacacaaaaacaatacagtgtggggcacacgttgacactaattgggattgatagggacgtatattttttcttagacccatcggaaacttattcaggaatgatgacacaatgacagatggtattttttgggctaagctgtcataataaatcactggttcttccattcccttcgcataaattgcacaccaatgagaccctcccttgttatgtgggtcccggttcacaattagcgctgcgggatactgtagagtgaccggaggcggtaattgatcactggcgaagcagccccgaaagactcgcgcggtcccccggttttcgttcaagattgatgtgatttgcacgctgtccattcttcatccaaaaaatagagcaaagttgatggagaaccaggctgacaataagcatcaagtacaatgcaaacaccgcccagcaaacggcttgttggaataaatttccctcttctggtcggtctttgcacaattggatgagtggcgtgagaccagctgatacttgctcttcaattaacttgtcactttttgggggagaggaggtggtggttgttgttggtgtgattgtagacggaattgttttagttgttgtcgatgtaagcattgcctttcttcttatatattcagaatactcaggaatttcctctcggcatgacactacgggaagagaaatccgaagaaggaataaaataacgccaacttttttggaatacatgtttattattgcaaaaaatgaaaacaaaagtgccttaaatagtgatgtcagtgctgatcgatcgatttttatccaacatcaccagcgagtcgcactcgcccatcaccaccagcattattcctccaacgggcaccgcctgattaaatttgatgctcactgctgtggtcccgttccttatcagatcaaaaagcgccgcttggtcgtctccactgctcgtcaagttgaacacgtaaatgcaatgcgtagtgccgaattgtgctagtgtaatcccgttgctttccgatgagttggagaatcccaccgcttcgttcatgtcgttgaaggggcgcacatactttccgtttgggtagtccaagtcgtaggctgcttgagggtaggagcgcccattggcaattatagaaatttcacgcacattaaatggctgaaagttgaaggggctgcgtgaaacggtgccaacatagtcagcattggccaccaatcccattgtgatacgccggggaatttgatccatgaacaaattagacgtaaattcaaaacgcccatgactgatgaacagcgacttcatcagcgttttcctcactgcatatcgtgccggcttcaactcaagttttcgtgcaatgtccaacgccaatccgtccatcagggacaccttcttcacatacattttcagaccgacaacttcgaaatggtagcgagtggctgcagcaacaccgggtggtgcgattaggacaaagtcgttgtcgttgggcaaaatttcaatgtccagctcacaaaagttgatcaagtagagaggctggttaaacaaatcggcgtcaattttggccatgaattgtgctgttctgctgcctacaaacaggttgcgtcgtgcagtgcatccgtctcccacctcaagcacaccaccagtgtcacggtagtaaccggcagcattcaaatgcgagtccttggccgctgttgaataggagagttcgtgtgaaaaatacgatttgtaggccatcagagaatttgcgttgaacacttcacggccattgatgctcattttgatgtttcgaatgaatgtgtgtccaatcagttgaatcggagcaacctcatcagctgcaaggtcaaccagttgaccatttgcattttccttacgaattcgaaactcggataacaaatagcatttggagagatcaatataattttgactggagtgaagcttgaagtgatagggggtgtcggtcagggggttacttgggagcagctcaaacactttggaggatgagacactgacgttagaaggggggatgcggaaaaagtccaaggcattatgataaagggagggctgtcattgtcaattttgtggaatgccatttagtaaa

SEQ ID NO: 10926 - DNA, 739 bp, Heterodera glycines
atgaatagggccgcaacttttagtgactaaaaatctcgaaatagttaactaaaatagtgagtaaaaatgccaaaatagtgaaaaaatagtgtcaaaaagtccggaatagtgacgaatagtgacataattttcagccaaaaattgagcaaaaattcaactagttgcagttgaaaatgagtaggacagagattttgaagggcaaaaaacccaaaattagtaccgaaaaaataattttttaaattaaaattcttgccaggaaaatgaaaattttttcatttcttacgagtgtattttcaaaaattttcgaccgtttcttaggggtgtatttatttgaaaattttgaggtcgattcttaggggtgtattttccgtttttattgcatttttgttgagaaattttcccaaaaaatgtcgaaatagtgacaaaatagtgacgaaacgccaaaatagtgatttttaactattttagtgacgaaacgccaaaatagtgatttttaactattttagtgacgaaacgccaaaatagtgatttctagtgacgaaaagtgacgtccaaatgaaaaaattttaatgcagaaatgcgttttttgagctcctttcttcaaatcaatcgagcaaaaaaaaaagttttttcactagaaatcgcggccctatttatgtctatgttggaattaattcattaattgtgacgaatcgatgatttaagttctggtgatataatggaggggagttaactgtgc

SEQ ID NO: 10927 - DNA, 2025 bp, Heterodera glycines
ataaaaatgtttgttttttcgattgcctcgcatttgaaacaaagtaaattttctaacgcaataattctgcaattattcttccctttgtgacgacatcattcggaactcggccaaattgtgctaattgctgccaaaaatgaaccgacggtaaagaattttaaaagtcaaaattcatcatttatttaactaaactgttttccataatttcagttggatttgcaacgacgtttggatggacattttcccatcctttgaccgtcctcaacttggcctcaaaatggcattgctttcgccacgtttcaatgcgttggtggacaaacatttcaatggcaaaagcgaattgacaatttggagatcaattgaaattcacaagggcaaaggacctgaaccgaaactatctgtgtggatggatgacgaatctaacaatgttgtggaatttccattgcccgaccgtccgttgcccagcaaaattcgctttgattccattctgattaggtaagtaaaatcagagctatgacaataaaagcattccttccattttcacagttacatcgatcacttcgcatttttgttcgtgaaatttggcccattttttcgacaaacattcaccacttgggcttttacgatgatgatcatttggacaatttgtgtcgtcgcacttcgccgacaattctcaccgatcttaaccaattgatttcaatcgattcatttggtctgttgcccgctgtaattggtgatggttttgatgtgccaaattcaacaatttctgctggccaagcattgtccaaatggttgcattctccgagaaaagatggccaacccaagctattgcattgcaaagacattaaagaacaagcgaacttcgattggatcaacaatttcaaggaggtgtgtggtccggggggggggagcttcaagttttttattttctgaaatcggaattccgaccccaaaaacgtcgtaagtcggaaatttttgaaaatttccgaattttatcaaaatttcggaaatccgaattctgtgccatccctgctggtgtggctccacatttttggcaaatgactgatttttgttttccaatcaaattgcttagcattttctccgtgccaatgccatttcttccgtcagttaccaaattcatttttatgttcgtgcgccgtcaatgccaatggtgccatttgaattgcttaacgaatggacaaaggaaaagctgacattgaccaaagcaaatgaattggacaacagttggataatgaagcgatgtaaaattattggggagtccgcggcggttcagcagcagaagaaagatgataattgggacaacaattgtaacaatgtgttcatttggcttgttgctggcactaattgcattgggtgagcaattaaaaaaagcatttgatttttatccgaatttgaattttgcgcttaatttaggccattgtctccgccaccggaagaagtggaagaacaaacgggacaaagcatcacaaaagggacgtcttctgctgacaatgagtgacggacaaacgaacaaaatcaatgagcagacgcagaagaaatgaatattaattgaaaatgaccggacgatcataattcatcagtgatcaagtgcattttatgaagaaaaacctctgaatttcggtaaataaatcggacgcataaaaatggcaaaaaatgtacgaaaacataacaacttagagctttaccaaattcatttttctgttcatgtgccgtcaatgccaatggtgccattcgaattggtgaacgaatggacaaaggaaaagctgacatttgccaaagcaaaggaattggacaacatttggataatgaaacgatgcaaaattattggggagaccgcggcggttcattgggaagacggaaattggggcaacaattggaacactgtgatcatttggcttgatagtgacactaattgcattgggtgagcaataaaaaaaggcatttaattttgtttaaataattaaaatttcgcttaatttaggccattgtctccgccaccagaag

SEQ ID NO: 10928 - DNA, 2153 bp, Heterodera glycines
  unsure (1)..(2153): unsure at all n locations
ttttgtgatttttgttttccaatcaaattgttnagcatttctcgtgccaaatgccatttcttccgtcacttacgaaattcatttttctgttcatgtgccgtcaatgccaatggtgccatttgaattggtaaacgaatggacaaaggaaaagctgacattggccaaagcaaatgaattggacaacatttggataatgaaacgatgcaaaattattggggagacagcggcggttgattggaaagacggaaatttggacaacaattgtaaccgtgtgttcatttggctttcttatggcattaaatccattgggtgagcaattaaaaaatggcatttaattttgtttaaatagttcaaattgtgcttaattaaggccattgtctccgccaccggaagaagtggaagaagaagcgggacaaagcatcacaaaagggccttctgctgacaaatgagtgacggacaaaagaacaaaaacagtggtgattagtggaagaagaaatgaacataattcatcagtgatcaaatgcattttatgaagaaaaacctcaattggtaaataaatcgaatgaatgaccgctgatcacttgggctgggacaaatatttgttaaaaaatgcagaaatatttaaataaacatttacgaaaaaatatttttctgaaaatttaatgtcgaatcttaggggtgtatttttcgtttttattggatttttgttaataaattttgggcataaagccaattaggcaaaaatagggatttggggaatatgtacagtttgtgctccgatacaaattttttagatcgtttaacaacccacgcagaacacaaattttgtcgaatgaatgaattttccctaaaaaaatttgacaattatttttcgggattttgacgggggatttccgacatcaattagcaatattagcaccagcaaaattaaacagtttcgatttgctgctgtttctctctcttttctcctcctcatttttgcgccgaattttccttttcctctctttctcttccgtctctcctcctccttccccaatgctatttccctccatcttttccacctctttccttgtttctccatttttgctgttgtctatcttcatctctattcccatcaaaatttgctgctgttgttgtactgcttgaacttcttgtttttgttgctgttgtttttgatgatattcgtaattgagttcgaaaattagcatatgcacttataacggaaaattgaattcagaaaaggcggggaaaagtgtcaaagcaaaggaattgggcagttggataatgaagcgatgcaaaattgggacaacaactgtaacttgtgttcttttggcttttagtagcactaattgcattgggtgagcaattaaaaaaaagcatttaatagttagtttttaagttataaaaaaaccgcaaaatggggcaaatttaattgcattgcaaatatttatttagtgggcgccgccggggggggggggaggaacagcgccactcagcagagatattcagcagcaggtggacgacggcgttaatgccattgtcaaaatgtgcaatttgtccattaaatgatcccgaaacaaatactgctgaaaatccctgaatgattttggtgccaaagcaaatagtatatgatggaagattaattatcaccgaatcgcggaaccaattagggaggtcattagagtgtttttggattttgacgcatatttcgcattttgtcaatttctggattacctaattgaattgttagagtaaataattttgaatttttttattaaagaaatttcttaatggaaaaataaaatggttaaacttaaattgttttcgttttgtctaactgactaaaatttccgattaaatgtgaaaaagtgattaagaaaaaaggtaaataaaattgagaagaattttgagatttattagcagatattttgcctggaattaccaattttaaaacataaaaaaataatttctcaaaagattttataagctttagctgattctgatcactttcggcctcagaagagcataaatcaaatcaattcatttttgcttttcactttttggttgaggattaggttgctttttcccnaaagtgccgttgtgcgagcaaagaaaatgccgtccgttcccattcactggcagaggagggcatt

SEQ ID NO: 10929 - DNA, 1035 bp, Heterodera glycines
ttgtcttagtctcattaaaacggaaaagggccattttttccacaaaaatgcaaatgaccaaacgaagaactgcactttcaactccaaaacaaggtaagaacccataaaaaagataacgcgaagaacggcgaatgcaaatatagtaattattctcgagtttcgctattatcacaaatgtttggctattgcatatcaccaattttttgttaaggaaatgattggactttccgctcaaactgcttaaaaatttatacaaatttgaatttttaaccatctttgacaaattttttatgaaataaagtaaattttgctgttaccgtaaatccgctatttgaaggcccggccttctaatggacccatcaattgaatatggcaattcaactaatttagtaaagcctcgtttcttattcatttgttcgaataaaattatggcatgaaaaaaagtaatgatttgcggaaaagttttcacgcatattctaattttagttacactagtgtctttgcgtgcgatgagacagctgtttgagtgttttaaggcggacggagccataccaaattttcatgaaaattgataaaattggcaattatttacaagatgagagagaaaaagagaagagagcgaaagaagtcaaaaataacaaaaaaaaagaggtctggtagcaatttatacaaatttgaatttttaaccatctttgacaaatttttttatgaaataaagtaaattttgctgttaccgtaaatccgctatttgaaggcccgggccttctattgttcaacccctccaaaaaggggcttttaattggagggggccttctaccagagaggggccttcaaatagcggatttacggtaattaccaatatatttgtggtttaatggttagtgcttcaacactaacagtatttcttgttaggagttcgacaccggttgacgttttcatttgaatttatttttatctgattaatgcagggtttctttatgttcttatttctgagaaatgttctgattttagggctaatttcatccaaaagaatga

SEQ ID NO: 10930 - DNA, 2832 bp, Heterodera glycines
  unsure (1)..(2832): unsure at all n locations
gtcgctgatcacgaatctgatattcgttttgaccaatttcgaatcccggattcgaacaaaaagtcgaaaattcaaaattcacttatgttcgaatctgtatagaaaatttcttttggcggaatcgaaaaaaatgttattcacttccttatttgctgctcaaaataacatttctaaaataccctgatttttagtggctctcaaatgttgacggtggaccatctgcgaaatttctcgtttccaatgtgcacacgatgagcgagctgaatatggtcggaaattgcttgaaagggtcgaggccaattctctcctttgacccggaatttgatggaaaatcgcacttgaggctcattaaagaacttctcgtcaacgtaacatttcattaacaaatgcagaagtaattgctgtaatttagacattcaaaacaccgaatcatcacccgcgaagtcagccgttcattgaccatgtgattaatttcgcagtgaccgaagatggaaatatttggtaattgggctctgctacactagcagtccatccatcaattcgcttggtttcgtggaccataacttttcttcgaatgtcgagaaccattcattctaactttcatatcagaccaacactcgaatgatgtcaaaaacataagggttgtaaaaatatggtccacgaaactcagagtgcttggatgattggacagtaaactgcaatagagccggatttacttgcgatgtaaataacaagaattgattccacaggttccgaaattatcaagttgccgaaaataatgaactaatggaaattggtaatctttctattgctagaaaaaaagaaaaaaaaaatctagttgaaaaattgtgtacgaattttcatgacaccatttttaaggcccgcgatttgtgcttcaactgatccgtttgtttgacaattctttttgcggagccgtcctttatgacaacccgaattaccaaacgccaaatgcgatcagaagacaaatcaaattgcaaaaggccgctgaatttaaacaaagacaagggcaaagggaagaggggaaagtcaaagaacggatgatcaaagaagtggaaatggaagacccactgggggaagtgtttgacacggaagaaaaaatggaggaggaagagaaaacggaggaaaaagagggaagaagaagaagagggtgaacgcagcaaaagcactggagaagagaattctgaagaagaacaaaaagaaacggaaaagcacggggacaaagtgatgcaaacattggagcatttgtcacctttttgttatttgttttactaaagcaatacaaaacggtcccccctttccgtaaatttcaaaaaaattttcaatataatgacgttaaatttaattttacatgaaaaaatttaaggacctacatttaacgaaaatggatggtgctgaatcagtcattttgcagtgcgcaactgagaaaggaaatggcgttggtccatcagtcgcggccgattgtgaggcgaacaaattggccgaagtcaccgagggattggcgagaatcaccgcgacggcggagggcggcgagactttctacaaccgagtgcaggagttcaaccgagacttgacgtaaggcttcaaaagccgagcgaagggcgcgtctctttccatcttaaggagtttagggtcgtcgttttgagggcattcgctgccgaaatacccaacgaaaaagagccgaaaacggaagaggagggcccaaaagccaaacagaggaaaatggacgagggaaaagcacccgaagcaaatgcagcgcaatccgtaagcattttttagtcattgaaagtgcccattttcgcctcccagcagccccgtgccttttctgtgctcgatgccttgtccgcttctggtctgcgcgccattcgcttcgcgttggaagtgccaaatgtgacgcgagtggtggccaatgacttctccgagaaggcattcgaagcaatccgtcggaatgtgcagctgaacggcgtccaggacaaagtcgaggcggtcttttccgacgcaatgtttgagagacgacttttcggcttaaatttcgcttggatttgtgtccctttcagcgatttgatgatggcacatcgcaaattcggcaaaaggttccacgccgtcgacttggacccctacgggtcggcgtccgcctttttggacgcggcggtgcaggcggtgatggacggaggtgagcaaaatggaccacaatacacttggaatgagctttttaaaggcttactgatggtcacttgcacggacacggccattctctgcggcaacactcccgaggcgtgcttcaacaagtacggctcggtcccgctgcggcacaaatcgtgccatgaattggttcccccggccctcgctgcccttcccatgccctcccttaaggcccttcgcattttgctccgtgccatcgacgcccatgcgaaccgtcacaagcgttacattgtgccgctcctttcggtcagcgtcgacttttacgtccgatgtttcgtccgaattcggtcgggcgctgcgatggccaaagacagcgtgacgtgggcatttctttgtttgtcttttagggacgtttagggaaaaatgaggacaaatttaggggattttgactgactcattttttgtagcactaattaagtgatgaaatagttggggtcgatccgagtccatacgaacgaagttcatgggggagaagcccccccccccccgctttcggcccctcaaatctgggatggtccccggatttataaaatttagttttaattgtccataaaattgctaattatgggaaaatttgggtacacgagantattggaagatgtaccccaataa

SEQ ID NO: 10931 - DNA, 4990 bp, Heterodera glycines
aaagcttattatacttcttatggcatgagaggggaaccctttggccaattttattaataataataattattattattattcgtattagataatcccttaaaatttattatttttttgatgaactaacgtaattgctttctatttaaataattaatgactaaaagtattattttctgcgaaatcatacatatttttaacatatttttaattaatacatttttattattttatctttatttttattccttgttatcgttaccttacccatttagaaatttaattcattttattattattattattttgcaaaagcaattttttacttttaaacaattttctatattaattgtgttgaaaataaatttttaaaatttgcttaaaaattttttctgaattctgtaagttcaattcattgctataatttcttaaattattatttttttgtttaatttattaaagagcaaggacattatcttaaattacatgcattaaaatctttattttcaataattatgatctatttaaacatgcgaagactcatcagagttgtgcgactttttgcctgcaatttagatttaaggataaatagttaaaatgttaatacggtattaattaattttcaatttaaaaggctttacataaatataaaattttctttttttattgccttattcgcattcttcttacgtctaattaacaaatccctttccatgcgttgaaataccaaattttagaacatggatacttactgatttttgtgttttacaatataagttgcgactaaaaatagaatatttgcataatttaattaaaaaagccattcattaaaattattattatataattttctttgaaaatatcgaataaattattaggactatcaagatatgtggctctacacgataaatattttcaaattttggatgaataggagtaaagtttcgcaccctaataacaaataatatttatcaaataaaaaatatattgtaaaaatcgcaactaatcacaagcttcaatatattacaaagccttatttttgaaaatatattaataatcagaaataattaaattatcaaggaagccaaatttcaaaaatcagcacacaaaaatcaagagattaacaaaataaaaatttaatttatttaaattgataaaagaagagaattaattttaataattattatgaacacaaagaaaaaatttatttttcaatgcaagaaaatttaaaaaaaaacttaatttcattgaaaagatgacaaatgtttaaattactcaattgaaaataatttgcagagctgaaagcataattttattattttaatatatttcgaataaataattctatggacttattcaagaaaaatagatttcctgttaaaacacacaagtgagcttgctcaacatttcgtcgattttctgctttttgagaaaacatgtatttgaatgtataatctggaatttaacctaataattcatggtggtttaatagatttttgtgaaaaaaaataaagaaaaagataatatttgaataataccatacaaataaatacgatattgagttgataaataatgaaaaaaaaagttttttaaaaaaggaattgaatacttaaaagataatttaataattacataaaataaatgtttaaggacagaattacaaattaataattaaccaaataatatttatcttgtttcaaaattatcctaatacaataaaaacaagaaataaacattaatataaaaaacttaatttaaaacaatttgaataaaattattcaaaaaccaaagtttttctgcttaaaatgtaacaaactcctatataagacgagatttttttttgtaagaatatgaacgcgaaaagtatttggtattatattaaactaatatataaaaataaatataactccaacatccttgagaaaggatcagctctatagttttataactaaaatactgaacaaaatattaaagattaataaatttataataattattaagtacttttaaaacaataatattttcttttctaaaataatcattaaataaaaattatttatttcgaaagagataaaagcagaaaaataaattactttcacagatactacaactaatagaaaaaaaattaaaaaattaaaataaaaggtgaaaaaatcagtttaatactctgcaacaacgaacaatgactcaacaacaagatagaaatgctggttcggatgaagttaaataatataaatatataaagtcaaattacatagctaaaaatgggaaactactaaagattgtttggacattttcaaacatgttttaacttaaataaattttaaattattttacttataatagggtatttacacacttttgggtattaaaataaataaataattaatcaaccaatcacatacctctaaatataagtaaattttctataaattattaaataaaggtattaaaaataggaacacttataatttttttggtttttcttaattttcatcaaattgattgaattagatttgatagtaaatgagggagaaagttggtaagtggttatttttttaaatatataaccaataaataataaaaaaatttcgtattgtataaaatattattaatcaaaaagtgaatattttacgtcttcacattatgtcattaaaataatataaaaattaataatatggaaaataaaaaataataaaataatttccatattaggtttgaggcttttaagtccaaattcttcatcttacttgattccttgtcagaaatggcctcaacaagcaaatcttttggtaatttttaaaagatttcttttattattcaaacaaaatttaaagtgcaaatcgattcgacatttgacgaagaattcaaaaaatattgttcggttgatttgattggacacgaattggaccctttggattggtggaaaattaacgaatgactatttcccattctcgctgcgctttcaaaacgatatctttcagcccaggcaacaacgattggaagcgagcaacttttcagtgttgcgctgatgtgtttgactatcgtcgatcaaaatttaaggctgaacatgccgaaatgctcatttttttgaataaatcaattccaaaaattcaatattattgataaaaaattttgttttgttattttttctttaataaacgtattgccgctcaaaatttgtgcattaaaaatatttttgtgagttttaatttaattttcgaattactcccgctcccgcccgggactcccgttaaaaatggacgggatttgaacgtgagcgggatttttacgggattcccgttcgggactccagtcccgtaaaattttgaactcctgatcccgctcccggaaattttttttaccggactctaaacaaaataaataaaatatttgctaaataaaatttaaaatttactaccaaagtttaagggtgactaaaatgaaaaaataaaaacaacttcataattttcgcttcattttaataatttgtttttgtattggatgttgggcccattaattttttgtaaataaaaaattttacattaatcaattaaaatgataaactatgaattaattaatatattgaaaaacaagaggaatacagaacttttattaaaaattataaaaataaattttgtaaaataaaacaaattattttaacaataaatttataacatttcgaaagaaaaaatcatacgcattctttctaataatatttatcaaataaaacaaagtaacattgaaaacattcattttatatctttaaaagaaaaagttataattgcgataatgtgtctcacacggtcccattggttcgtaactccttcgattgttagacttaacttttgatctgaaatgctaaaatttcaaaaatggtaaaatttcagctaccttataaatccttcatttggcccactccaaatgtctgatgtacaagaaaatgcttcacattttcgtaattcctctttgatctttcccttaactagttcacttgcaaccagggctggacgcaagtggatttacaattacggaaatccgcaatccacaattgcggcgattttctcagttgcggaaatccgcaattacgggtgtccaaaaaccccgcaatttccgtaatttccgtaatccgcaatccgcaattgaaaaaattttttttttttaataattttaaattttattttaaaaaatcctataaatcttttaaagcaatttaaaagcatattaaaaagcaaatttataaaagcaaaatcattcaattgaaaatccggttagaagcaagttatggtgaagaaacaaaagctttgccagatttgccgcctgtaaactttttctcaagtcatctgaaatcaggccggccgttgagaaaagcctctcactttctgaacttgttgcaggcggagaaagaaatttccgtacaacggcaccaatcaatggccatttttgtgaattaacttcccagtataatgctggatcggccctggatttgattttttggtcccgtaaatattcattcacttcaacttcggctttttgtcgtgtctccaatgcagatggactgggggatgttgccttaaattaattaatttgaggggaatataaagtttatttacagtattcattaattgatcaaattccgcgtccttttcaaaacgagaaaaaatatcccccgaacttgaaccactgcagtctcttaggtcaatttgtaaatcaatttcctaaaaaaataagttacaaaaatagaaaaaataatatgacatctgtctttgcgtggtaactctccacttcacttatcagccagtctttgtactgattcagtcgactgctgtcaaggtaaatggtcttgaatcgagggtccaaaatagtggcaagaactaagtttttttgttcttcggcttgtttaagccgcaattcgatggcgttcgcaattgttttcttaatattgaaaaacgattgtccttgtcctcacgtagaccgaaagaaattgcctaaa

SEQ ID NO: 10932 - DNA, 2578 bp, Heterodera glycines
cggcggctgccgaacagcaccagcgtttggccaccgactttcgcgagttggccgaggaccggggacgcattgaacagatggccaaggaatcgctgcgggcaatgcaggagcaggtgcaggaaacggcgatgaagctgcacgacgcggaaatgaggtgggccgcgggcgcgctttttactatacaaaacacaacggcacattatttggaattggcacttttacatgggtgcagctcgacccccccccccccccccctctccccaaaaaaatttccaaaggattttttacgaattttttttaaaaaaatctatttcttttttttttggaaatttctgtttaggggaaacgataccgagggggggggcatccattattttgtatgggggttttctcggcagttgccactcgccgtttcaaattttactcaatttcccatcaccaaattgaaaaaaaaaatttttttttgtcatgtgattgtgtgtcgtaaattgaaaattttgttcaaaaaataacataaaaggttaattgggaaagcaaattctgaaaattattttcggatgtcgctaaatcaacatcaaacaccgtccgccaaccattttcgtgcttaattcccatattccttcttttttgttacagtttgatcaacgtggaggaagagtgctcttttttgcgacaacgttgcgccgattttgagactcaaatgggccgtcagcgtgacgactacgacgcactgctcgtcaagtacaattcttccaaaactgcaccaccaccgccaccatcaccgtcgccgccgtttgcattggatgcacagaaagaagagtcttcggaggaaagcaagcggaagcggtggtggtgggcgaaccggaacaacatcacagcagccagtgctggagacgatgccgacgacgacggcatcgaaacaggaggtggcaacgcaaatgccgggcgaagacgatgacgaaccgccaccgccgccgccgatgccgaagaaaacagcatccaaggaggcagagacgcaagtgccggatggcggtggtgatgggccatcaccgctgctgccgcaagtgccgccgaacaccacagtgaagatggaagcggcaacccaaatgccgccggacggaccgccggcagcggaagaaatgacggcggtggtggtggcgattgtggcgatgattttgatgtttttgttcgaattcgtgtctgcagttcattagaatttacgtttctacattttttaacaaacattattttgtaaacactccgacacaaaaaacgagacatgcgtcaataaagagaagaatgcagagaaaaaaaacatatctcattttggcgtactttttcttgtatcctctctctgttaacagagaaatttcaatttttttcctatttatccaatttgcactaatttttgcatacaggaagattttcttcttcgatttctatgttgtttttttaaatttatctgttcgttaatggaccaggacggtatcccgtgaccggaactcctgttttctctactgtttacacaaacacaaaaagcatttgtgacgaattgaattagcgcgaaaataaatttggcgttatgtttattcttttgtccgtacaaaaaaaactaatttacaagatttcgaagttcgaactcccgttagagtttatgtggaatggattcagtgtttaatcatattcaactttttttctccatttgcaattaatctattttttaaatggaagcttgtttatggttgaatgatgtcgtccagggaaagttttggataaacaaaattattttcccagtaattttcacaattttcttttagaatgaataataacaaatttttctatttttaatttgtaattcctatctttttcgcactgttctctgtgtaaaaatttcaatttcttcaacttaattttattcatattcattatccaattaattggcatcaaaatttgttccaacatgcaattaaaaccaattaattaaataccccatacaatacccattattctctgtattctcttggacaaattcgctggtctcctattaattaattacacactccaaaattcacaccaaaaaattgatgatgatgagttattatccatcgtatccattgcaactgttttattattgcgttactaaattcatcaccatttacctcaattacatcatcggctttatagagtgcaacaagggcaagcagttgttgcagtacaaccgcacgcgccgtgtaacacaacacaaactacaacagcaacatcgccatggctcgtggtacaagctcatcacgcaatggtggaggcgccgaacgcggcgagcgcacttcccaccgcagttcaaccgaggcccgagactcgcgcatttcacgctcctaccgttcaccaccaccaccctcaaggttttgccgtcgttttgtatggcatttggttaactctcaatttacactactgacaaatgagtccaatctgtcagcgaaaatgcttaacaattaagttgttgaaccttagtgtttgtggatcaattgataatgctttaactagaggcaggcatgagcggatttccgttctggaaaattac

SEQ ID NO: 10933 - DNA, 2272 bp, Heterodera glycines
tcagtcaacactttagcaaattcgatgggctattgaaatacaataaatttggaccaaaaaaaaaattttttttttccgagtttgtcggaaaatgtccaaatttgtcgcatccatttcctgatttgattttgtttctggttgcgcatgacaatggcggtaacattaagatttcttttacaatcattgctaggtcggttcaaaaaaaaagcttcaaacgaagttgtgatcaatttcctcctcgccactaaaattaaaaaaaaaaattttgtttaaagtcgatttttttaatatattttaaacatgcattcaacttttttcaaaaaaaacaattcatatatactcttaaaattgccgagtttcaatcgttatccacaagtttgtccatttttgagtcctggtaaacccataaaattttttgtccgacttttatttccacggtcctggtggtgctgcctgctgttgtgcttccccatctctgaggtgttatgtctgtgtttgtggtcccggttttcagatcaaaattgtgcgcaacccggaggacgacgaacggctcgcctatgtgaactttgagcggcccgagtgcgcgaagagtgtgcgccgctcgctgctcccacgcttacagaaaatgttgggccgaaacattggcgttgacccggccggtgtcatccgggaccaagaaggtggtgatggtgtacaaggcaggcccgtagccagaaaaaaagaaatttttgggtcgaattttcgaaaataaattgtaaatgaaggtccgacggtgctgtcagatgcaggaaaaaaacaattttttttttgaaattttaatacatttcgtaagaaatttatgaaagtttcaaaaaatttgccatttttcttcaaattttttcatttcatgggtgggtggggaattacccctcctccccctggctacgggcctgatggtgtaatccgctaattttcggtgggcctttattttaggttttccagcccctccccggagatatttttgccattttttgggtatgtttcctttatttttgggggttaccagcccccccccccagacatccaccatggtaccaacaaatgtttgcccattttcagggtttcttgatacccgtatttatcggcccttgcccttggaaattatgttatttttcgcctagctcaatcaggagaaccctattaatttttttaggcaaattcatcccggaccgttacaatcgtgccgtcatggctgctgccgaccgttcaccaccgcccggtgggcccagtgccgcgggtccggtgccgttgcgacgtgccgcgacccctccaatgcagcagccacgtcgtccgccaccgcgccgcatggaaatgcccgttttccgtaagccaactgttttttgtcaccaattaattcaaaataatttttagggggcgggggttggaaaatttgttcgacgagaccttaggaaaataaaatttctttgtcagacttgaaccaagacgacgcacaagcgggacgtacaatttttgtgggcaatttgccgggcgatgttcgcgacacggaattgcgtcggttgttcgaagcatttggcactgttgacgatgtgggaccaaaaaatttgaaatttgttgttgtttttttcccattacaattttaccccctttaaataggtggacatcaaattgttggccgattcaaacgcagcctatgcctttgtgctttttgaggtttctgtcaaattttaattagggcattgcaataatgaaaaaaaaatcaaattcgttattttgaatttttgagttcggtttttgttgaattttgctttcaaaaaaaattttcattttcaaaaaaatcctggaaacgacctgctgccaaacataagcacattgtaatattattacttttttagacggttgaacaggcactttccgcccgcgaaggccaacacaacaaaccgatgcgtcccggtgaataccgttgtcaattgggttggtttttccccacggtatatctaccgtatactccctccacaccgtgttttaaggttatggtaaaacgcagccgtgcaccagcctaatcatcggtggattgggcccttgggcttcggaagatttgctggagaaggcattctgcgactatggcgaaattgcgtccatccaatacgacggtggcactcatgggttcatttggtgagcacccaaattaactatcgaatattgttcttggtaccagaaatttgtgattgaaacgggaattcggttccgttgtacagtaagatttgaattacag

SEQ ID NO: 10934 - DNA, 5435 bp, Heterodera glycines
  unsure (1)..(5435): unsure at all n locations
ttataaaaaccattgctttgatccatcaattccttanttaataataattatgccaattaaggaattatgtacaattgacactcaacaccacgtttaaacagctgtaagaattgactaaataataaaattgtcacttttccatattttaattttgtagtaaatataaatttttaagcgcatcttggattattaaagaatgaaatcatagcgtaattagtaatagtttttcaatttttaatttaataagcccaaacttcccggttcccaaatttctggtcccaaaaaattctgcttaaataaaaggaaaaaatgatcagtcaattaggaatggtttcaattttaaaaaaaaagtttaaaaaaatgtttacgtaaatcctaacaaaattaatgcaataaatccaagtccaaaaattgtaaacattgacctaaaatggtaaaatttgaattgggtttatgactaaaatgtttatcattgaaattcggtactcaaaaatgagagtctgctaaagcagctccgacaattaattaattcatatatcagcagttttgaaagtataatcaagaaaaattaataaataaaaaaacaggttcatcataggatggaggatattcaatggcatttttccccaaatcatattgggcatttatgtttcgtcctccgttttgcttctttcactgtgacatcaatggccaatgtcactttgtcctcgctttggtcgtaaaagcctttgcttgggttcatcagttccttaattgatcataaataattggaacaattaagggaatgtttaattgtcactcacagcaaatgaaatgaaattgaatccccagcctctgtttttattgtcaaaaacatggtcatcgagttttcttctgaaatccgacactccgctctttagagagacaattcgaagagttgccgaacatttgcaactccaagtttctgctcaatatcaattaattaattgtcgttaatatatatattaattattagtaattttgcaccttcttttggagcatcacacaaaagataaaagcccaaccatttctcatttttgtcagtgcttcctttttctttccaatttgtgccaaaattttccatggaaatcctccgatgtgaacagtttcacttttacgttcactccaaaagatttctcgcgcaaattccgacactttttcaatttccataaagagtgcgcctttcgaattgctttgatccaaattgaatttgtccacttttggttcatcaacagttgtgagatcaataatcaatttcactttgtcttcttccctgtcgtaaaaaccattgctttggtccatcaattccttaatttaaatcatctaatttaatttttgtttatgcgtcgtcaattggttatgttttagaaattaatttattttgttatgatttctttacaccaggcaaataaataaatgaacttcaatattggctggtccacgaatgtcaaatttaaatatttgtttgaattggcacttaccgcaaacgaaacgaaattagtgaatcccaaattggtcaatttgttgtcaaaaacataatcacacaatgtcccaatggaattcttagacacgttgttttgcgagataattcgaaaagttgccgaacgaacgcagcagcgccaattcgaatcttaatgattattactcatcgttgttaattagcatttaataacagttaatttgcacctttttcagtagcatatatttttaaaatagtaattaaaattggaccttcttttgcatcgtaccataagtaaaatcccaaatatttcttctcatcaatgcctttcgtaatttctgcttgaatttcccatggaaatccatttatatacacggcatcactgtatctgcttctcccgacagactctcccgcaaattccgacattttttcaatttccatcgaaagtgtccctcttcggttgcccctggctttgttccaattaaaaattcgtccatggcttgggaatttcaacgagtacagcccgggcactccacgaagatacagaaacggatgggaattgaactgataaacgccgagcacttcttccactgttaacacaccggatggaactgtaaaatttcaaaatttattattctgtatgcatcagttctctttgtccagttttcccataaattttatgtaaaaatttctgaccctccttgtccatgtatgaaattcaagcattaaaggtaaaataccttatcgaccaaaacaatttctatttaatttccgatttcaaaaattttaccgacgcattttgcaaaatcctcctcatggatattaggaaaacgaattttgaacagtgcaggaccaagtacggaacgacgatttcccgaggagcattcaatgccattttcacggcatttttcatcggcccaacggagtgcctttaaaaaaacaattaaaattaatgcaatatttaaaaaaatgaaattaatttatttttaagtagaattactgcattccaaattgaaatttctccactgatttgcaattggtcacgtcccaaaatttcacacaacaatttttggtcaatttgcaaaaattcctccgttttaagcaaagcgtccgcatttttgtcaatataatccaaacaatcattgcaatattcctaaaattaaaaatgttttgaataataattgcatttaaaattctctttaattcatttttaattatttctctcccacctcaaagtcgaaaagacgagcctgggcataagcaaggaaaacattgcgcaattcggaaattggaatttgcgaagatggaaggaccaaatcagggatattgtatttatcggctaattagtaaatccaataattaaagcatttattttagaaaaaaaaattcaccggcgcaaagcactcccattgcattgtctccattcaattcgcttaaatcgtccgcgtaaatgaagctcaatatcactttgaacgctgctgcttcaacgtcagggatttccacaacaacagggcaatttgcaaaggctaattgaaacaaattaaatcgagctcaaatttttgaaaaatcgttaaaccattaaattttttagatgaatgcaaaaaattatttaatttactaaaaatatattaaaatttcaataggaatatctatttcttgaaaaaatttcatctttggagtgtatttttattttttatttttttgtaaaaatgaaaatgtcaaaatatggatttaaatcgaaacataggcaaaatgtgaaaatatgtaaataaaagacaacctagaagcttaaaattaagccaaaaatattattatttaattttaaatcgaaataaattggaaaaaaaagcaaatcctataaaatgccggtttatattaatttctaattaatatattaattttccataatagttaacctttaccattatccgcttttgcattctttgaatcaaagcggaacattgcctcaaatactttggaagcagatttcaaaacgatttgatgggccaaaataatctaaaaggattaaaataattaaagatttaaaaaaatcagtacaaaaattcagaggaatttatagcgggtatatactgttcatccctgacactcggggagagcaaattcgggaatcgggagaggaaagtccagtgacaaattttgtcaggaaattgttggagaaatttgtaaaatttagagcaaaaacaccctcctcagggagtaaatttcataaaaggtaaaaaaaaagaaaacaatacattttctaataaaaaaatcctagaactcattgtctagtcgcaatttgatggtgtatttttggactaattactctaaataattgtctaataaactaatcaacaaaaaatgcaacaaaaattatattaataagaatttttaaatttacttgaaatctaatttatgcatttaaataaagtggtcttaaattatgcaccgtactgtaccatacaaattttaaataattaattaaaaattaaaactcgcctcttttgcgtctccgtccccaaccaaaaatttcacatccgcgtactctcccgtgctcaacaaatgcttcatccgaacactaatcgattggatcgaattggacatggcaactcaataataagaatgaaaatgttgggacaaattaaattttatttctcgattgaaatgtgatacagttcatttttaaacaaattaatgcgagacgcaaaaatgggaggcgcaaatggggagttattccctatcatattcaaaaatttggtggtgaaaacgcccattaagccgtgaccaaagaattgttatgagtgagcactgcaaaatatgataaatcgttggaaaaaatgaagggaatttctacaaactctcaaaagaattttttttttattctccataagaatttgggaaacataggaaattccttaacaattcgaactcattaagaattcgagtaatgaacatatatgcattgtaatgagaacggataaaatgaacaatttgctggtgatggttcacttttaaatattaatgattaaggtcataaaacattacggcaaagtaatgacctaaaaaagatgagtaacaaagagttaataattattattattttttgaatttttagttaatattaataatttgatttagatttaaataattattttttcatttattttaatatttgatttaaagattcgaattcttttctgctgacgcacgcacatcaattgacaaatttatgcattttctttgagcctctccgtatatgagaaaaatattttagttcatattttgcctaattttattgtgcattattctcataaatgtagaagaaccttcagcaaatcttattttcattttattaaaacatcataaattatttgaacttttttattttgtgtcccttattaaattattaatattttttaaaatatttatcgctatttttagttaattattgtatataattttctaataactatggatgctattttgctatgtagaatcttactgatgctctaatgttgtataaccgtagtaacagtggccaatatttagtgaatcattgattttgatattataatcaattaaaaaataggtgattatgctatatagaatcctatctgatgctctatgttgtaaaatagttaataacagtgactattatttagtgaaacattgattgattatatgataattaataaaaataaaaattggtaattccgtggctgctatagaattattgtatataatctcgcgtggtaaattgacttatgaagtagaaattttggaataaaagacaaaacaaaatctgaataaaatcacatttattttatcttatttttaaacagaatccattaattcatttcttgtttaataaaatttgctaaaatgtcttttttctccatcatttccaatcaaagaacaattcaatttttattgcttatggttttattaaaaatgactt

SEQ ID NO: 10935 - DNA, 1559 bp, Heterodera glycines
tatatatttttcacaaattttaaatgattttccgtttttacgaaaatttaaacccgatttttccgtattttcggatccgttcacaaatatcggttgaccgtatgatctgtaccgccttttctcaccactaagctcttcaaatttgaccaaaaattggtcatcttttatgaaaatctgttaaccgatcaaactaattttcaaaacttttagccaataaatatcatctttctggactgatcgatgcgtgccgcaattttccaattctgaaattacccaatgttttctacgcgtttcggcaagcttcatttcttgaagagacggtattttaaaatttaatttcatatacatatatggccaattctttttttccactgcctttttccgtgaaactgatgaaaagccaagaaaagattttcaaaagtttgacatatttttactggcccaatattttcaaaggcaaagaaatcgtttccagatttagaaccagggaacggatttatatgtgataaaatgccaaatatgtacatatatatatgtgtcaaaaaacccccaaaatatgtactaaaacccaaaatatgtgtcaaaaattaaaaaaactgctcaaaataagtgaatttctcaaaaaaagtctcattttttatcaatttcgctagcacaatgctaaccaaaaatatgaaaaaagtcatgaaaagcgtcaaaaaagtgcaaaaaattgtacatttttggggacattttgccaataatttgagatttgagagtcaaaaaaatggaaatttttttaaaaaaattcaaattttctcaaaaaatcgccaaaagcctaaaatatgattgaaaggaaaacaaccaaaaatgctatttttgagctttttatgctatagcatatgctcaaaaaatatatgtaaaaacaaataaatccgttccctgtttagaactaataaaaaattgttttgcacaattagaaaataaatataattattttttaaaggaaattgcttctctgctgatacttttagttatacggtgttaccgtcctcccattagtactcccatccctctattgatcggtgttaccttatcttacgtcatactgtgcagagggggtggtcatggatggcgtttagcaatgacttcccccttccctagaagggggggggggggggggggggggggggaatacagttctcgcgccattgtgtggccatcattatccttaccgttttttggcttcacatttcatttttcctcacattgctcgccgatgcgctggtggtcaatgccgaacacgactcgcccttgatacagacgaaccagttacagtacgagattttgtagccgtccaaaaaggaccaccattcgatcatggagctggtcgcaattgagccgtcgccggacgattcgcacgcgacgaaatcagtcagaaaaatgggcagacctgggcaatactggcaaaaatagtttttttaaatattatgaccccaaaaaccactttttgagtaggccgccttgaagtttgccccgaggccaaaaactgtgtgagggccggttaaaaggggaaagtg

SEQ ID NO: 10936 - DNA, 1518 bp, Heterodera glycines
aggaattgatggctgatgccacgggatgtacaataaggagaagaatgtgctgacggcaaaagccaatgtgacgtgaaaggagcgtaccaagtttaggaagaagacaaaaagacggaaggaaaacgaacgaaacggggataaattggccatttttgtcaattatcaaattttgacttagtaatcacttattgagtgcttttatagtataaggaggttttttcttatatttttattcaaatacaatttattttaaatcccgtttgaacaaggcttggcgccggagcgggcaggaggggaatcctcgcggaaaaaatttagctaggctagtagaaatttgcaaatatatatatacgaaaaaatttcataattaaaatcgatattattggaattttaataaaatgaagctatattattttgtaattagaaactgttgtatgtaacgcagttgggggcaacgcccaggtgacccttccttcagtcggcattgacccgcttttccctcattccacccaaaaatgtcatcgtcagacaaatattcctttttttctttccaccatttgtctctttcgctcattttctctcattcttactgtttccatcccttctcattattttgccattgattcactcatttgcttgcccatctttggcaccaatggaataatcataagtagggatgggaattttagtgacttaaaatctcgaaatagttaactaaaatagtgagtaaaaatgctgaaatagtgacaaaatagtgccaaaaagtccaaaatagtgacgaatagtgacataattttcagccaaaaattgagcaaaataatttttattcactgattgcagttgcaaatgagtaggactggaatttttaagatcaaaaaacccaaaatagttacctacaaaaatttttaaaattaaaaatttttgtcaagaaagtaaatttttgagaaatttttttttcatttcataggagtatattttgaaaaattttagctcgattcttaggggtgtatttttttgaaatttttttaggccgattcttaggggtgtattttttggttttattgctgcatttttgttaaggaattttccaaaaaatgtcgaaatagtggcaaaacgccaaaatagtgatttgtaactattttagagacgaagtcatcaaaatagtgatttctagtgaccgatagtgacatcagaatcgaaaattttaatgcagaaatgcgttttttgagctcctttcttcaaatcaattgagcaaaaaatttagttaaaacctaaaattcccatccctaatcataagttgtgtctaaagggtcgtggtcgttttcgcgccggccgttttcgcgccagcgcagtttttgaactataacttttttcattgtcaaccaaatccaacttttattattcgatagccctaagtgtcctctattagcctgcaaaagtgcgaaaaatttggttaaggttcaaaaaagttatggccggaaaaattcaaaaaactggttttctaaacattttggccgg

SEQ ID NO: 10937 - DNA, 1720 bp, Heterodera glycines
  unsure (1)..(1720): unsure at all n locations
gttttaagacacttaaagaatgccaaaaccaaaattgttggttgatcagttggaacttttgttgagcaccggcaatggcgcggatgttcactttttggttggggaagacgaagaaaaggaggcgagtgactgacaatttaatagaaatcgagggcatttaaaaactttaaaatattgaccagttaattttgacatatcctgtagtaatttaaagcaaatatatgtggtgtatttgtctactaagaccaagaaatccatttagccataaaagaaaattatggcacgtgacaaaggaaagaaaaagtcgattttgtttttggccatacttttttataaccgaaaaaatattttgaagttttgtgtgtctagattaatgctctcaagcatcattgctcttaatttattgcgcttatttgctggcgcaaaaacaaattccatgccgcaaaagttagcatttcctgtataagtctttaatgagcaactatgcttatgtattgtaaattgtctaaaatgattataatgttttatccaaagggtataatggctaaataaaaaagaattttatttttaagcaaattccggcacataaagcccttttgatggccgcctcggatgtgttcgaagcgatgttcgcttatgactcccagaatgggacaatggcggggaattgtacgaaaatcggacaattaaattaaattaaattattaagcttttttcattttaagctccttctaaccctgtggaggtcattgacatttgtgccgtgccatttaaggcgatgttacgctttatttacaccaacaaattgagtgttttggacggacaaaatgcaatggctgtgttttatgcgggtcaaaaattgaaattgatttcattaatggattaattattatttatttattatttagcaaaaaaatatgccatcatcggtctgatcgaagcattcgctgactttcccattgcaaaattgccaaatgttttccttgcctttgcccaagctcgtctcctgcaagaaaatgtacaaaaattaaatttcgatttattaaataataatttcacttttgttttgggactttgctgatcgatgcttggcttgcattaaccaaaaagcacaaatactgatcagatcggatgattttttacctattgatcaacaatcattctgtgagattctgagccgtgatcagttaaaagttggagaagaaagtgctatttggcaagccgtaagaaattgataatgttaaaacaatataatggaattaactcacttaaatttgattttggaattttattaaattaattaattttcaaatctcattaaagtctgacaattacgaaaaagtttcgggcactttttaatttcgtaattttattttgacataattaagaattttgttgtatatcctaacaaatctaggaattcaatgcttttgttaatttgaaaaatttanattgtaggcactgcgttgggctgacgaacggtgccgtcaaaatggcatcgaatgttcgggggaaaatcgtcggaaaatgcttggcccaattttgatggctattcgattcccactaatggcacaggatgaatttctgaaaatcattggtgagtgtgtgtaaagggtggttccggagactcaaaaaattcctgaaattttgcacaaacgctccgaaattgcgaaatcgatactactcctgntactgtagtcaattatccataataattatt

SEQ ID NO: 10938 - DNA, 3302 bp, Heterodera glycines
atctctttcaatccgcccattcgataattgctaagttctttaatgtgattaattaattgtctattagcataaaaaaaatataattttcttccgccgtttagcccctcccattcgaaatgtccaaccaaaacgaagtgccacaactccgtgcaaaacgagagaatcacggacagagcggactttccgtccaagcactcgttgaacttctgctctgtttctttctccccgttcgtctttcaaaatgactttcttttaaatgttgcccttggcgttctgtctccccctcaaaataatttcacattttttagcccgcggcggttgccatccacggcggccccagcttcaaaatgcacattttgctcaatgttctgctgtgtattctcggtttggcctgtcctccttcattcgcattgactcccctctttaggatggatccccggcattctccacgccgtttggtactgtttcatcagcaccaactgattttaaacggagggtgatacattattttatcagcaaataattggaccaaagacaatgatagtcatatttttgatccgaaaaatgattaatatcataaatataaaattatttcaagaaattctggttgctaaattcggaaacaaaataaataaaagtactaggcaattttactttataaatgtaacattatttaaaactgctaaaatcgcaagaatagataccaatattagcttttttcgtgtgcggaatattaaaattgcattttaattcaagttttaacgcgttttgcatgcatgattttaataaaattaataattggttttattttactagctgtgcaccaacaagttttggtatgtattgagaataataaaaattttaattctttataagtttataagacctttcattttaatgtaaataagtgatacattattttatcagcaaataattggaccaaagacaatgatagtcatatttttgatccgaaaaatgattaatatcataaatataaaattatttcaagaaattctggttgctaaattcggaaacaaaataaataaaagtaataggcaattttactttataaatgtaacattatttaaaactgctaaaatcgcaagaatagatacgaatattagcttttttcgtgtgcggaatataaaaattgcattttaagtcaagttttaacgcgttttgcatgcatgaatttaataaaattaataattggttttattttactagctgtgcaccaacaagttttggtatgtattgagaataataaaaattttaattctttataagtttataagacctttcattttaatgtaaataagtgatacattattttatcagcaaataattggaccaaagacaatgatagtcatatttttgatccgaaaaatgattaatatcataaatataaaattatttcaagaaattcaggttgctaaattcggaaacaaaataaataaaagtaataggcaattttactttataaatgtaacattatttaaaactgctaatattgtcgggaccaaacagaggcaaattcggcccggcaaaaattttggcaaaatagaaattgggacaaacagtagacaagcaggggaatgatgttttattccgactgaaccgatttcaataacaattccacgacttaaatagggtgtcattcgctgaataatacatttttgtgtgagaaatgaataagaattgaatgtaaacaaacaaatattttttgaatagaacgacgaagagggggaacatttccaattaaattaaggttttcccatttttaatgaaattgcatcatgctttaaaatttatcttttccattttatttctcgtgacgtgagtcgcgacactccccacagcaaagttgtcggggggttcagttgctgcaagtctgcctgtatgttgttgttttatttcatgcctcattccgggttgtctgtgctgagaaaggcgggcggttgattttggttaatcgtaaaatctgtgaggtgatcagttgcccaggctgatcccttgttgcttgtgaagatccgctccgcggcggtggacagcgatcagttgaccagactgactcctctccgtcctgtcgcccttgtaccagcgtctgccacccgctgatcacaagcattcatcagtgcagaggttcccggccgttgcaccacttgtcgggaccaaacagaggcaaattcggcccggcaaaaattttggcaaaatagaaattgggacaaacagtagacaagcaggggaatgatgttttattccgactgaacccatttcaataacaattccacgacttaaatagggtgtcattcgctgattaatacatttttgtgtgagaaatgaataagaattgaatgtaaacaaacaaatattttttgaatagaacgacgaagagggggaacatttccaattaaattaaggttttccccatttttaatgaaattgcatcatgcttataaaatttatcatttccattttatttctcgtgacgtgagtcgcgacacccaacacaagggtaatttttctaaaaaataattttaaattatttatttggttcatgaatttatggaattgttcccctggtttttccatatatttatttaaaaagcctctatttcggaatacaaattttagtacccaacacaagggtaatttttctaaaaaataattttaaattatttatttggttcatgaatttatggaattgttcctctggtttttccatatatttatttaaaaagcctctatttcggaatacaaattttagtacccaacacaagggtaatttttctaaaaaataattttaaattatttatttggttcatgaatttatggaattgttcccctggtttttccatatatttatttaaaaagcctctatttcggaatacaaattttagtacccaacacaagggtaatttttctaaaaaataattttaaattatttatttggttcatgaatttatggaattgttcccctggtttttccatatatttatttaaaaagcctctatttcggaatacaaattttagtacccaacacaagggtaatttttctaaaaaataattttaaattatttatttggttcatgaatttatggaattgttcccctggtttttccatatatttatttaaaaagcctctatttcggaatacaaattttagtacccaacacaagggtaatttttctaaaaaataattttaaattatttatttggttcatgaatttatggaattgttcccctggtttttccactatatttagataaaaagcctctatttcggaatacaaattttagta

SEQ ID NO: 10939 - DNA, 1353 bp, Heterodera glycines
  unsure (1)..(1353): unsure at all n locations
ggttttcccatttntaatgaaattgcatcatgcttanaaattatctttnnccattttatttctcgtgacgtgagtcgcgacaaatatcgcaagaatagatacgaatattagcttttttcgtgtgcggaatattaaaattgcattntaattcaagttttaacgcgttttgcatgcatgattttaataaaattaataattggttttattttactagctgtgcaccaacaagttttggtatgtattgagaataataaaaattttaattctttataagtttataagacctttcattttaatgtaaataagtgatacattattttatcagcaaataattggaccaaagacaatgatagtcatatttttgatccgaaaaatgattaatatcataaatataaaattatttcaagtaattctggttgctaaactcggaaacaaaataaataaaagtaataagcaattttactttataaatgtaacattatttaaaactgctaaaatcgcaagaatagatacgaatattagcttttttcgtgtgcggaatataaaaattgcattttaagtcaagttttaacgcgttttgcatgcatgaatttaataaaattaataattggttttattttactagctgtgcaccaacaagttttggtatgtattgagaataataaaaattttaattctttataagtttataagacctttcattttaatgtaaataagtgatacattattttatcagcaaataattggaccaaagacaatgatagtcatatttttgatccgaaaaatgattaatatcataaatataaaattatttcaagaaattcgggttgctaaatacggaaacaaaataaataaaagtaataggcaattttactttatatatgtaacattatttaaaactgctaaaatcgcaagaatagatacgaatattagcttttttcgtgtgcggaatataaaaattgcattttaattcaagttttaacgcgttttgcatgcatgaatttaataaaattaataattggttttattttactagctgtgcaccaacaagttttggtatgtattgagaataataaaaattttaattcttttaaatataaaattatttcaagaaattcgggttgctaaatacagaaacaaaataaataaaagtaataggcaattttactttatatatgtaacattatttaaaactgctaaaatcgcaagaatagatacgaatattagcttttttcgtgtgcggaatataaaaattgcattttaattcaagtttttaacgcgttttgcatgcatgaatttaataaaattaataattggttttattttactagctgtgcaccaacaagttttggt

SEQ ID NO: 10940 - DNA, 1296 bp, Heterodera glycines
tcttaaaaattggctcaaaatcacaaagtttgtacaatttttggacaaaatctgttaacaaattctactcaaatttaaaaaaaaaattcccggcggagcttatcgacactgccggccttacgccccgccccgcttattctattctgatttttgaccccacaatctgattttttgggctcgatgttctgagtttgaaaaatttttgatccgcaccctggttaaaacgcatctgctgtttattttaagataacatgcaaacagcagatgccttttcagtgcctaaaattacccaagaaaaaaaatttaaaacatttttttgaggagggggtcacaaaagggataagtaccacaaaattgaacgaatacaacccacaaaaatggtgggaaaacacgtaagaatgttccgttttcagaatctttgtataaaaatgagagcattgaaaaacaaattcatttttcaacagaaaatttaaattttaaaatttgtcatttcgtttctttggataaaacagccaatttaaattcacttttaaatggatgatgccgaaaataacatttgcgactacttgaacatcaccacggcaacaaaaagtgatgttgataatctaacgggaaaatttgctgctttagacgcatcaaaaaaattgacactttttgaatggcttttcagttcaatgattcaccaattaattgtcgcaaaatgcgcatatcagtccaaagtagcgcaagttgcggtaaaaatggctatttttatttaaaaatgacaaaataaattataaaattggcaatttaagtccgatcagtaccgtgacactgtgctcatgctgattggccgacatttgcggcgctgacacttgcggcgcagacatttgcggcgcccagtcaaagcgacacttgcggcgcagacacttgcggcgaggacatttgcggcgccgacacttgcggcgcgacacttgcggcgccgacacttgcggcgcccagtcaaaaggacatttgcggcggcgcaaaattcaacgaccccaaaaatatttcaacaatttattaaagttaacagaattgttattttaatagtttattttttaacaatgcctaatttaacaaaaaataacttatttatttttggtttttttggagtcttaaatttgttaatctttatttgactaaagcttatcttattcatttttattaataattaatttcttaggtggcataacagcttcagaaaacgtttcacttcgccccacccagcattttcaaagtataaatgggtactgtaataaaataatttcaataagg

SEQ ID NO: 10941 - DNA, 1255 bp, Heterodera glycines
tatttttcagcaccgattatcggactgcctacaaaaaaacgatggggcgaagaaacaattcgccgggagttgggccgctttttagcaccaaagttgttgtggttcccaatgtgaaggcaaattgaaactctgagaattattctaaattgttttgtgaaaataaaatttcgaaattttcgactgtctttatgcaattttaccattataaaagaaattattcttaatttggcaaaatgagtttttaacggggatcgttttcattctttaaaaaagcatcacaatccccggaccgagataacgattttctttttagaaattcaagtttcaattctcattttaattgcgggattagtctctcgagtgaaatttatttctcgatcccttccgctgacaagggaacatgtcgaactctaagtgttcaaaatcacttgtagagcatggtcgatttgctattgtaaattttcggcttttttggccatgacccccaaactgatcagaaaaaaaaaatataaatgaacaaaattcgtaaaattgaaatatttttgctggcatttttattgggtcatttttgaacctttttgtctttttatttaggtttttgattttttttttgtcatggaaacctaatgggatgccttataacattggcccaagatccctatataagaagattaagttgcaaaattatgacattgttttccagacgcataatttctcttttttcaaaaccagggccctatgggccctgttaaagcgccgggggcgctttcaacactggggccagcaggagccatcgcgttttcccgcgctgaaggcactcactcggccgcttcgcggctttcaaggggcccttcgggccccttccaaggcgatggctcgtgctggtcatagtgttgagagcgtaaaagggggaaggagagggctggtctcagggttgtaagcgcccacggcgccttaacagggctaatagggccctgttttgtaaaaagagaaattatgcgtcaggaaaacaatgtcataattttgcaacttaatcttcttatatagggatcatgggccaatggtataaggcatcacatcacggttacatgacaaaaaaagaatcaaaagcctatataaaaagacaaaaaggtttagaaatgacccaataaaaaatgtcagctaaaatatatcaattgtacgaatgcagctaatttataattatttattctgatgagtttgcgggtcatggccaaaaaagccgaaaatttacaat

SEQ ID NO: 10942 - DNA, 2462 bp, Heterodera glycines
agaagtttcgatgatggcaaatcaggaggtatataattttctattatatttcttataaagttaaatttcatcttttaaggaggttattattcagtaaatcgtccggcaattggatatgaagaccatgaagcaccaccatccaaacaaaagaagtggtgtgtttgtctaagttttctttgtgcttttaaattttttgcatattttatgaattggcagtagggccgagtaaaaaatgaattaacaagtgaatctttggtgattgattgttagcttaaatttagggagtctggcccacttactgtggaagtaaaagcgaaggtcaatggccaagtatccaagcttacaatcaaagtacctttttataaaaaattttagttttataattttcttaatctaggaaggcatttcttcagtttcggacctttatgagatcatcgtaatagcctccccccggcctcccctctcccccctccccacgcttgcaatttgtttgtcttttttcttcattcctttctttttcaatttatgttcaacatttgctttgacttgtttcaaaaattcgggggggggggggctgaagtaaaaaaattcaatttttaggggtgtatttttctttttttcagtcgatttttaggggtgttttcgttttttgaaatcccgaattcggggggcgggtgtattttacaaatttttagccgtttttcgccaaaaaattactataacctagtcatatttgcattttaggatttattttatactaaaattctgtaataaaaatttctacaaaaacaaaaaaatatacacattaaaatggaattttttaaactaaaattttttactattggaaaagaaagataaatttaggtcataattttcaattttcaaatgataaaaattcaaaactaactcattgtcaggatgccagttgctatcattgatcaattttgcttgtgattcaaattataatgaggaaaattattcataaataaattttcgaattagatttatttaataatatatttaaataataattttgattttcgactaaaacctaatttttaatttgaaattttcataacaagtgcgatttgtatccaattttttcaaaatttttaccgttgtttcctatcgtaatcgtctaccaaaattttatttttttaaacgcaaaattttgtcattatcgaataaaatctgaacgaatttcacagaatgaaatttcaaaaaaaaaaattttctaatattctgattttcgaccccaaaaaatatgcttttaatttgatacaacgattaattaaaaaaatcaggcaaaactttaccatatctagatgactcggcactaattgaaaccgtattaaaatccgtgagctcgtcaaaaaactcattaattgctagttggaactttttcgccactattttggatttacctgaatttctcaattttttgaggaaaattccaaatcccaggcatgtatacagccttaaaatgtggtcgggatctgatcccgtcaaaatcgggattttaatgccggtacgtacagaaaacataatttcggcaaagtcgagatttaaattactgtagaccagtcgcgggatattttatcattttttagattaatttgaataaggtttggttaaaaacaaaatatataaaaatcttaaaatttgaaaatagttttaaaaatatagtcagttctgatctaatctattgttgaacatatcacaaaattgatcatttttgtcctataaatttttgtcacagtcatgagtttatcgccaaattttctgacaaatcgtcataataattcgccggggagagccttttggaggacattcattcacacttcgatgggttcaatgggaaataagtgaatgggcggggatttatttttaggatttatttgctggaggatttaagagggcgaaagtcgatttttacaacaaaaaaagacgagaattaatctaattttttgagatttttgtctcaaaatttatgaaaatagagttattataagaattaagtcgacctttaactaagattggaatgatcgataaagttaagcagggtcataggaaatcttgggagtgatcagaaccataccgatttggaatgacttggactcaccggaaggtttaaatcgaggtcaagttttagggaatttatctggatgattgaaagcctctagtgatccgaatagtgcgctcaggtatgaatttggattaatcaacaagttgaaccctataaaaaaaatgcctcaagattgatcattacgataaatagtgcgaataattgaattgatcaatgatcgctgcggcaattagacaaaatgtaattgggtcacgatggtggatttatgatggtcattagaaaaaatgatctgccattcgcttttctatattctgctgctgatttaaacgaattggatcataaaaagactaaaaattgaacgataagtaagctctct

SEQ ID NO: 10943 - DNA, 1691 bp, Heterodera glycines
attgtatcgatgcgagcgttgattttgtctatgtttgtcatggcattgtgttgaacttttgttattttcgcaccgtaaattgattttttttaaattttaattttcgactttttgttcgaattcgggtccggagttcgaaattggtcgcaatggatgtcagattcgtgatcagcgaccccgaaaaccccctagaaatgtgttaaaaaaaatttttttttatggtctgtaaaccacataagtaccaattttgctttcttttcctctcttttatgcgcgctattatcatgtctctaataactgtaaatttgaaatgatcattacttttttcaaactgatcaaattgatttcgtttgcgtagaaaagctttcgaatgacaccaaaagtgtccaatttggttgccaaaaagctttaaaataatttttgaaaatcgctttttttttttttttgaatttttatataaaaaagagaccgagattttccgaatctgccgagccaggctgattttttcagaagcaatggcccgggcctctcaaaaactagtcaaaccggattttttccaaaaaacgccggccacccggcccggctcggtggtctctaataaaaaaacaaaaatattcatgttgcacaaccattgccttacaatttaattagtgtatattaatgcacattttggttttttatagatacgtattttagggcaagcaatgaattaccaacaatcagtccagcagcaattaggaggtggtatgagcgcacaacagcagcagcaacaagcagtgagacacatggcaagcagaaatttatggcacttacgaaccaaacatttgactttttttgtaaatgaattcacctttttttaattgttcttatatttttcataaaaccccccatttagcagcgaccacaaaatcctgcatcagctgcagtgccacaaaatatgtcgccgaatgtggcgccctctccacaacaacaacaacaaatgtaccaggtgaagtgctaactgacgaggctcaaattatttttcgtctgctcagatgcctatgtacaaccacacgaacgcaggcggaactccattcagtccccacaacgtttacaaccagcagatgatgacgccacaaatggcctcgcagcagcaattccctccaaacgcacctgcaacaccagcgacaccccaaatgtcgcagtcaattgggacgccattgtccgtgcacaacattcaacaacccggtgggataaagagcatttcgttatggttttttaagaaattttaatgtttatccatttttgagttcaaatcaattctcatattccaaataagctaaaactgttacattggattatacaatttctaatttttttttgcaatctcaatggtagtaattcctcgaatgatttttagtcatcattaaaatgtatggagctgggtcgttcccccccccccttacctcatcgtttcccccggaaaatttaaaaaaaaaatctcaaacctagaaatttttcataaaaaaattcttgggaaaattcttagtaacaaaattccaaaaaaaattttaaaaaatttttcagcgttcgaaaatttatgataaaatactaagttttttgaaaaattttccaaaaaatcgctgaaattttttcaaaaattttttttcaaattttcttgctaagaaattcctaagattttttttatgaaa

SEQ ID NO: 10944 - DNA, 3066 bp, Heterodera glycines
  unsure (1)..(3066): unsure at all n locations
aatacgggagaacatcgatagcctgaacacgcttgctgacgaagttgggtggtgtagaacaaacaacggacgagcagcaaaaggtgggatggggagcaccttggaacacgttgaaccaccacatctacccaaaaatattgcagacaattaggctatatcatatccagttcaaactgcaaatgtttaacatcgacgtggttttcatacatcaatttaattccttttttaaggttgaaccaatggactcatgaataaaggaaagaaatatcgcgggtttaatattgctcttctttttccgtctcattttttattcagttatataaaaaagttcgcaaataaaatttttaaaaagccttttgactacccgctttttggttattcgtcaggtcacaaaccgctaaaacgaaattcataatacaaatagaccctgcttttttccaaattacggttcgcatcacagatgttgatcatttcatttttagggtcgctgaccacgaatacggcatcttgttggcttttagaatgtttccatgcaaataaatcgattttgaaccaaaaaatgcaaaatttgaaatttcgcaaagaattaatttagattaaaatgtgaaaataattgatttcgagtgttatttgaaattttgagaatgaaaaaaattcaaaattttctgtaaaattttttcatgttttagggttcgtttcgtgtccatattttattttcgtgttttgtttccgattgcacttttcccttatcaaatctgcgagcccttaaatcaaaatgccttcagagatatttatcggacattcgaataaaatttatttggaatatttgatccgaaaaacaatagatctcgttaatgcttcatccgctacaagcagttcgctatcctcggtgacatgaagttctaaaagcttcaattacaacaaaaacttttaaggataaaaaatatagacggtaagtgtgctatataactattcgctttattcgaaaaatatttaaagattgttttaactaacccttgagcgtcttacacaaattcttccgacttgctgtctccatttctggcataagagtgttgatttcatacaggaaagtgctacccgctcgaatggaaggattctgaagttggctgcaaaagcagtattcacattctccataagtattttttagccttactatttgtctttcaagtcatctaaaaagcctgagagtgtacagtcctcgcgcacggaatacatttggacagatttctgaccgcagaccaaacattcgggatcacgttccaatgcaacaacgttgaaacagataccttccacgttagcaaagttcaagtaattgttcagagaacatgagatgcttaaataagtttgatagtgcgttttagttttcacggtttttgaaactatttttagggaaatgagtagacgaaccccagtataaaaaaacaaataaacaccaacaattgtgagtcaaacagttattctaatgtgaaattgctgccactgaatgcttactttgatgccagtttcaatgcctcaagagcacagcttcctgagatatataacgttagctttaaaaaacaaaaataaaacccgctatgatggcattggttgaagccactgccgggattatacgtttgagcacgccttgggtgagtcgcaaatcgacatcctttatttcatactcattcgcgcgttgttgagcagcacggaaagcccattcgacatgagcagggtcatcagcatccaatttaacgtctatggaaatggaaaatggtgatggagttatttaccattttcaccttgcccaaaaggcttctccttttcccaaagcacaacttttacatattccacacaatgctcaggaagccgaggtgtgtgagcaattgtacacaacggaaagttgacctgaaatagattcaaataaattttttttagatcgtattaatatatgatttcttatatgaattgcatttcgtgataagaaacacacaaaaacaaaacctaacctggggagtgtaaagatctatcgtgcactgaatacacggcgtcatgaaaggaataatcacccgtgaatttcctttgaatccctctgttccaccatcgatcaacggcactatggtgttggattttgggttatttccgtcatcaaattcaaccaaagaacacttaatgcattactatggtagacttgttggtaagttttaagaaccaaccacagtcgcattaagccaacggcgagcttcaatggagtcaagtccgcaaataataatgaaaaatttacgataaaattcgagagatttgtcctggattttgcaattatggctaaataaatctgatcaatttcgaattttatttagaagttagatttcattataatgaaaatctgttaacaaaactagtagcaaatatggtaattttttggacaaaatctgctaataaattacgtcataattgaaaatcctgacgggccaatcggcaccgtcgggctccctcccttagaaaaaccgtgctgcaaaaaaagtgggtgaaagaaaaagtcgtcagaaaagttttgagcgttttttcaattactaaaaattttggcctctgaggaagggggggggggtatttcgtattttgaccccctgcctctcgtccatgtatggatacatgcctgaatttttcatacaggtccagctagccatttttcggcaacctggatttggtcaagcaatactggtttaaaattagcccaggttcaaattagaaaagataaaaacaatcatacggagtaactttacagccaaacacccttttctcgataaaggcagccgccacctcagcttttgagcgtccaatgtcattttcactaaaaaatacacacaataataataataaatacacacaataataataataatagagatcaaaaccgaaagagaaattgtcggttttaatttgagagatcgattgtgtccatatcaataatatgaatgtcatggaaaccagataaagcctaaaactgagacngtaaattaaactaaaaaatagatgcagaaacatgccaagtctttaaggatttcacag

SEQ ID NO: 10945 - DNA, 3123 bp, Heterodera glycines
  unsure (1)..(3123): unsure at all n locations
cacgaaatttatgaattanttgggttttaaaattattggcttccttgggnttacaattaaatagacaaattttctcgagcgcttgacctgctccggnatttaatgcccagctcgcctaaactcaagaaaaaaaaagcaaaatttctttggcttgaattccatccgccaaaaattggaagaaatatttttttacttctccgttgcaaccctgcccacaaaaggtggccatgaaaattgtggacaaacggtcgttggacgaggaaaatttggccaaaattgagcgcgaaattcgaatcctgcaacagctcagtcacccgtacattgtgcgactgtacgaagtgataagaacggaacggtacctgtacattgtgacggaatatgtcagcaatggcgaactgttcggtgtgttcaagaaaaaaaatgaaaaaaaaaaagttttttcaccgccgaggtctgaacctgggccaggattaaagtgcgaacaaggaaaagcaccactgcgccattaattttaagtcagctaattcttgctaaagaaccaaatcgaaaatgcaaattaaaaaacaacagtatttgctgagaatgttcggtttggtgccccctccgtgacctcctccctcacgcaaattttccaaaaaaaaaaattactaaatttttcttaaaagccacaaaattaacaatttcttggtgcgaatttctttaaaaaatggaaataaaaattgcaattttccggcggcgcctgtcggcctctctggacctctcctgttgcagaaatgttttttttaaaccgcgtcacaaaaaatggcttgaaaaaggccttctctcataaaaccctgagcctgctggaaacaaaagctttcaaaaccaacagatatgttgatggatcgcggacgccaaaccgaggccgagtcccgacgactctttcaacaaattgtgtctgcaggtagaggtggtcgtcgcgtcgtcccaaagatgcaaaaaaaaaaaaaaatttttttttgtttgaatttttcatttctttaagtggcctattgtcatgcgcatggcattgtgcaccgggatttaaaggccgagaatctattgttggacaagcgtggaaacatcaaaattattggtgtgttggtgttttctgttttgctgacagaccgacaaatggtcgacatcaatcaattggacaaaatgcctacttctttggcttgacacaaacaaaatcttgcccaattaatcagttttttagcgtgagaatattgccatattcaacacttcctctcatttgtcaaactgctcgctttagacctcatttgtccactttttggtgacatagtagtcaccagccaattatttttggtattttgtccctttttggagcaacatttcatttgtccacctttttggtgacattttgtccaggcaatgtttttttttttgcattttgtcttctcaatttggctacaaattcatgccaattgtccttttctgtatattatcctattaaaaaaaacaatatttcatttgtccatctttttggtgacattttgtcccagccaattatttttggcattttatccatttttggttagaaatttcgtgccaattgtccttttccatctattttttgttatttttcagattttggcttctccaactaccatcagcctggccaactgttgtccacctggtgcggctcacccccatacgcggcacctgagctgttgctggcccaagagtatgacggtcgccagtccgacgtgtggtcattgggcgtcatactgtacattttggtgggtctttttttcgaaaaaaataatggacagaatgccaaaaatgccattattataaaacaggtcactgccggcttccccttccctggcgattcggtagacaagctgaagcgcgcggtgctcagcgatcacttgaaaataccgttttgggtctctgtcggtgagttcaatgaccgcataataccgtaccgttttgtgcatgtcgattatactataaagctttgacaatatacagtatgcctccgattttactctgtttttttttggtttcggtcaaatatcatttcctcaattttttgtgacttgttaaagttgatgatgaagccttgtagctctgttatggtgcagtaaaattttattcctaaaattctaccgtagcttgacttattaaaatacaaaatacggttgtaaacccatctatcacggtaccagccaacttttcttgcatcactcactactgtgactgtactgtaccgaattttttccaaattgctcaccaagtcatcctaccgtatcctggcatcatggtgtgccactgtaaacatattttcttacagaatgtgctgatctgatccgcaaaatgctcatcgtgcagccggccaagcggtgcacattgcagtacatcacccagcacaaatggttcacctgcgacatgcccgagcacatcaagcagcagttgctggtgccgcagttgtcatcatcagcagcggcaactacagtagacaaccaacaagaaaaccgcgcgccgtatacggtaggaggaggaggaggacgagcagtacagcagcaacaacaacagttggacccgacaggtggttgcgctcattcccccccccccctcccgtcgtttccacacgaaaaattaaaaaaaaaaaattttttttaacatagaaatttgtcaaaaaatcttaggaaatttttcataataaaactcccaagaattataatttatatttttttattattttccaaatatagtgttgatcttcatgcaacagcacacgggctggtcagatgagcaaatcattgaggtgagtcatcaatcaataaacaatcaatcgcatcataagatatgttatttaattcacgattgtattattatttcatcaaaatttttacaaaagcctaataatgtatttaaaaaaaattatggcaccttaaaatattcatttattaaattaaatctgtagtttataaatttatttatattttatttgaattttataaaattttgatcaaataattagggctgtcaattttatgtaaatacatatttttttcctggattctccatgctctaattagtaggaaaaacactttcttttttgtgtttgcgagcaaa

SEQ ID NO: 10946 - DNA, 3018 bp, Heterodera glycines
  unsure (1)..(3018): unsure at all n locations
aaatgtaccattaaaaaataccaaaaatatttttttaatgtannaaaaggtgatctaaacctatctaggtcatttttctgccatnttgtgccaatttaacacttcaccttacgaagatttatttccaaaaaataaccattaaaaaaaatttatttacatacatattntcgtacatattttggatttttatacatatttcgggatttttcttatatatttatgtacatattatgaccactttttgcacatttttttgacagccctacaaataatatatacctatggttattttttaaattttgatgatatatgccaatagttttgaatgtttaaaatacagggatatgttgcttagatagtaaaatcttgttcaatatttaatttgcattttttggttcatttttaaaacaacgactccgctctatcaattcgtttaaccaatgtgccaacgtagcgcagtggtgttttgttgtgtacatagcaaaacaaaatgtgataagggttcgagtcccaccagcggttttaccatttattgtaccatcatttggttcacaatgatgaaagtgtgcctgccgagaatggaaagcttgcggcttttaaataaagcaaaggcgcttttcactcaaagacgacctgaggcacaggggccatctgagtgaactaaatgaatgcggtacttttttgtgtgtgtgtgtgtgtgccgcgatttttccaaaaaacttttgggcagtagaaaggggtccgggattgtgccgaaaaatctttacccatttttgtctaaaacatttttttatgttattaattcctgtggaatggttgtgctatgaattacaagctattcgggctagatttttaaaacgttgaaagcatcctttgaaaaaaagtgaagcagaatgccttggtagttcagtggtaaagctgtccaaggacatggtttagtcgtgggttcgattccctccggcgccccccaaaagtcgccgacagaaaattcgcgtgaagatttttttggagcataacttgcaaacatttttattataatttaactaattattaaatattaaaacaggaagtgttgggccacaactacgagtcgtccgtgtttggcacgtacgcactgctgttgagccgtctgtccgacattcgcgaggcggaagcggttgcagccgccgccgcggctgcttccgcctccggcaccggcattattaccaccaccggtggcaccagcagtggtagtaatagtaatagtagtagtaacggtggaattgcggccgccatgatggcatctccgcttgtcttcggtggcggcggcgccgcacgcgcaacagcgacggccatggcgctgaacacaattgtgggcggcagttgcaccaatttgcagttggacagcgagtacgcgcggcgcggctcgcgcggctccatcatctccggccgtgccaatgtggagccggccgagcagcaacaccatgccaccatccccgcccatcacctggccaaactgagcctgtccaccagcccggactatgtaatacacacgatgcggcagggtacaataggcgcatggccttaagagagatatccacaaataaagatcggcgcgggcccgcatctcggcgcgggatgcactacgcccccccccccccctgtcgttatagaaattttacgaaaaaattttaaaaattttctagcgatttttcaaaaatttgatgatgctttttcaaaaacatcgctttaaaattttaatttttttttcttgaattttaaaaaaattttcaatttttttcgaaaagtttcaattttgcaattaaaaaatattccggaggaaatgaactgctccggcccaacgataatgattgtttagctttaacaaatttttcaaaaaattcattgcttaatatgtcttttttacaaggccaccgatttttgcaaggacattaaaaaggcaattattatcttaaaatttggcacccatttaaaaaaaaatttttttttttttgtattaattaatttttaaaatttttcaatttttcttttactatatgatttttaaaattttttagcttcttttttttgttgttgcaaaatcttggcattcataaatttcagcaagagacggatgacagcgacagtgccagcgactggagcatggtgccgaactcgtccgcgggcgcttcgtcggcagatgacgcggcggctgcggttgtgccaccgccaccaccaccctcaacgacgtcggtgtcgccaacccaaccgcaacaccaccacaaccatcaccataccgcgtcatgtgtcgctcctcctgccgcttcctcctcctcctcctcctattacaagtcaaagcggcaccaccactgtgccggccgacgaggcgttgcggcggcggcgccacgcgcgaccgcgacaccagcggcaacaacccaatttgatcagcaacaacaacagcgtgcggcctatgtggcgttggaacaacagtaccaccagttgaacccgttgctgaacgctggtgggtggcataatttgggggcaactaattaattgcctaattacacaatttttactaattcttattgacagccgcccaacaatttgcggtggacacgtcgcgggccgcgtgggcaaacgcagcagccggttggtgtgccaaaattggattttttttaaatacacaccatcccaaaaaaaaacgagaaatcaccaataattaggagagatacacacacctcttatatcggcgtactattttctttttctctgctaacagagaaaaacagattttcttatttccaaataactttttattttttcataacttttttttccgacgcattaaaaatgcatggaatttgtttagcgaaagcttttccgttccagtaactttcaaataataccaaaatcatccaattttgttgaaaaaaccttcaaaaacagtcattttttaataaaaatagtatgtcatggagcgggctcgaacctccgaaatattgaaaaaactttggcactacaaattgagggccaaattga

SEQ ID NO: 10947 - DNA, 5115 bp, Heterodera glycines
  unsure (1)..(5115): unsure at all n locations
cgctgatcacgaataagtgatcagattttacttctgaccttcttaagacctcagaatccctgtgtgattggggattatgaggcatcattttgagggggcggggggcaagttcgaatccgggcggtaacacattatttttctttgtatttttggcttattttacaatgcttttaattaatttgaagattggttgtaaattttaaattttttttaaataaataatttcattattattttttatctgtaaaaaataatatcatttcaaattaaatgaatattcaataaataatttacaacgttgtttttaattaataactaccatttttttcattgttttatttatttaaaatattttttattttattaataataaattatatttttttatttgaattaaatttttttttataaataaatgttttgttttaaaattaattatttatttattttaattaatttaatattgtttgttatattaaatgatttaatataaaattaatttcttatttatttttaaataaaagaaggaatttattttataatttttaaaaaattattaacacattcgattttaaattatatttttttataaaaccatttgcttatttatttaattttgaaaccatattttacccttttaaactattattgtaccattcctacaattttagtacctactaataactgttgtactcttctaatcactgttttgcctcttctaatcactgttgaacctcttctaatcactcttctaatcgctgttgtacctcttctatttactgttgtacctcttctaatcactgttgaacctcttctaatcactcttataatcgctgttatacctcttctaatcactgttgtaccacttctaatcactgttgaacctcttctaatcactcttctaatcgatgttgtacctcttctaatcactgttgaacctcttctaataactgttgtacctcttctaatcactgttgtaccacttctaatcactgttgaacctcttgaacctcttctaatcactcttctaatcgatgttgtacctcttctaatcactgttgaacctcttctaatcgctgttgtacctcttctaagcactgtcaaaaattatgtatttaaggccttttaatgacgctgatcacggatacgtgattagttttcacttttgacatcgttaaggcctcagaatccccgtgtgattggggattctgaggcatcattttaagggggggcagattcgaatccggacagtgtacattatttgatttatttatttttttggtaattttcactgcatttaataaattaaaatagtttggttgtaaattatttaaattaatttttaaaatgcattcgatttttaagttctgaggccgcgaagcggccgaatgattactacaaaattaaaaaacgggcgcgaagcgcccgtttggccccaacaaaatttaaatgggcgcgaaacgcccgtttggccccacaaagtctaaaaacggtcgcgaagcgcccgttctgaggccgcgaagcggcagaatgttccccacaaaattaaaaaacgggcgcaagcgcccgtcctaaggccacgaagctgccgaaaattcccaaaaattaaaaaacgggcgcgaagggccggtttgaccccagcaaaatttaaatcgggcgcgaagcgccgtccaagcccaacaaaattaagaaacggacgcaaaagcgcccgtctgaggccgcgaagcggccgaatgttccccacaaagtttaaaaaccggcgcggagcaccctttgaggccgcgaagcggccgaaagtcctccacaaaattatgaatgcgtcctcgcgatgcctgtagaccaaaatcccttatcacatccataaattcatttcaaaaccgcgcatgcactagcaacgaagtcctttgcgcgaagcgctcatgtcagcgcccgcccatatataccaaaagcatactgtctacaccgagcaactactgcgccacacgctagttactatatacgttatattgacaaggagtttcgtttgcaaaaacaaaatctcccggccgaaggccgngagcgccctgaaagtggtggaagggtcttacaactttttgaggcgcatctgggaaaactataggttttttgatccgagggccaactgagtaccagggactgaattctcacttttgtttgcatttgaaggcccctaactttttttgtaaaactcgaatcaaaaagtgcccgctgaaagggcactccgcctaagggtcctctacaaggtggtattttttaaaaatttttttgagcaaacccctggcctgtaaaaaatggcaactgaagcgtgctcaaaaagtacacttcagtaccagatgaatgccacgccagggtttgatctgaccgaagggctgccagcggacttattgtagagttttggaagctcgattttctgaaatttaaaaatttcgaaaattttcaaaatttttcgagttaggcctaaaaaatggttttcgggtttttgaattttatgattttttaacgaattttcctggcaaaacggagaccacttccaaaacatagtttttcgagctctatcgaatggtatttttttcggaaaaatttcgatttttttccggaaatagaaaaaatttttggcctaagcgggacatttgagtcccgggcccataactcgtcaggggtcggttttagccaaaaaatgccttagaacatttttgtagagcattttaaatgctatcgaatggtgtactatatgaaaggaaattttcaaaaattttcgagctaggccccctagaaattttcaaaaattttttttgggttgaaaaagagggtgaaaaatatttttctggggtaaattagggtcctgagcacaaatatgatgtttattttaagtttcagattttttggaatattttaaaaattctttattttttggcaattttttggccctcgggattttggcctaatatttgaaaattcataacaaatcgaagggttgatcaattttacaggaataaagccttaaaaatagagaaaaatcaggagaattttatggactttatttggaatttctatctaaaaaaggaaaaaagttattccagaatttctggaaaaattcgaattttcagaaaaaaattcataactcggttctgaaaagatattaggaaaaataaaatactacaaaaatccgcagttttttgctctattatataaattttatttggcatttttatcacttttttaagaatttttataaaaataaaagtgattttgagattcgggaccaaagggggtgcacatggtttttgagtgaaaaaattttttcgacaaaaatcttccaaaaacatgtctttaggggttatttgggccgctgatcacgaatacgtgatcagattttacgtttgacatcgttaagccctcagaatccctgtgtgattggggattctgggacatgttctgaggggggggggggcagcaggttcgaatccggacggtgtaacattatttttctttgtatttttggcttattttacaatgtttttaattaatttttgaagatttcttttaaattatttaaatttattttttttaaattaaagaatttcattatttatttttgaatttgtaaaaaaaaattcatttaatttcaaattaaataaatattcaattaataatttccaaggttgtttttaattaatcactaccattttttcgtgttttcattgttttattcatttaaaatattttttattttattaataataaattacatttttttgaattaaatttatataaaaacttttcattatttatttaattttaaaccatgttgtacctcttctaatcactgttgtacctcttctgattactgttggactcatcttaagacctcagaatccctgtgtgattggggattctgagacatcattttgaagggggggggagttcggatccgggcggtgtacattaatttactatgcattttttgcttacttttacattttttaattaatttgttttgtttgtattattaataataaataaaaatttttaatttaaattaaattattttggtgaacaaatgttttaatttaaattatttaattttttatttaatttaatattgttttattaattattttaaattattttctgatgaataaatgttttatttaatttgaattttcgagaaattaattcctttcaatttcaataaatattctatattataaatttctaactttatttttaataagtaaaaggatttttttaatttgataaatttataatacatccaataatacaattttcttatttatttcattttaaaccatgattctacctcttctaatcactgttgtacctcttctaatcacttttgtatcactttttcactgttgtacctcttctaatcactgttgtacctcttctaatcacttttgtaccacttctaatcactgttgtacctcatctaatcactgttgtacctcttctaatcacttttgtacgtcttctaatcgctgttgtacctcttttatcacttttgtacctcatctaatcactgttgtccctcttctaatcacttttgtacctcttctaatcacttttgtacctcttctaatcacttttgtacctcttttatcacttttgtacctcatctaatcactgttgtccctcttctaatcacttttgtacctcttttatcacttttgtacctcatctaatcactgttgtccctcttctaatcacttttgtacctcttctaatcacttttgtacctcttttatcacttttgtacctcatctaatcactgttgtccctcttctaatcacttttgtacctcttctaatcacttttgtacctcttttatcacttttgtacctcatctaatcactgttgtccctcttctaatcacttttgtacctcttctaatcacttttgtacctcttctaatcacttttgtacctcttttatcacttttgtacctcatctaatcactgttgtccctcttctaatcacttttgtacctcttttatcacttttgtacctcatctaatcactgttgtccctcttctagaagcttttgtacctcttctaatcacttttgtacctcttcta

SEQ ID NO: 10948 - DNA, 1492 bp, Heterodera glycines
acttttttcgaattttccttggaaaataacctgtttgtcgtcgcttgctgtttgcatcatcatgcgcagtttgccggcggaatgtacgcaccgccggcctttgtcagccgctcacttggattggcattggaagcgccaatcgtttcggccgtccgttcaacaaaagcgtctttgtcggcggtacccattgacaatttttaaaatcaaatctaattgtaagatagttttagattagaaataatgtcattggaagcaaaccgatccacttttagggactcaaaccaaccgaacattcttggccataaatttttttgcttagcaaaatctttaatggtactaaaatcaaaggtacgctcagaaagaaaaagtgaaatttaagcctgagaaatcgagagtaatctatcagttattgaatcttaaaaataaagcccgtgtgggatttagccgggccgccagacgtagatccgtcagagaaatcgttcaaaattaatttggcgaaatgtttaaggattaaatattctgacagttaaatcggtagtcagaggaaaaacaaaaaaaacaagatatttattttacacaaaattaaaaatttgagaaaatgaaatcggcgaaggtgaatcatctcctcgcttaaacgcagcccgggtcagtcgccaccgccttgcgctttctctccgctttcatcagtgtgcgccactccctccgttttcgttggattcgcgcgtgcttcttcagtcccggacatgtcccttgcgctggctctacaatctgtggaacgcgtccctcagcgaattcgtcctccacgcgttcatcgtccgccataaacgcattctgtcgctcatgcagcagccgttcaatttgggcgccttcgttccaaacgtccggctgaaagccgtaataaatgcgttccgtctgcggcatgtgcacctttttcgccgcaattgagccgaactatggggcagaaaagcattaatagtaaaataaattgatcaaaaaaagtggctttctttactcgatccctcgggtccaccggtgaattgcgacgtcgcaataactcctggatttgttcagcttcctggtcaacagttcgtagtgattttgccacattgtttggtgcgtctgttcgtccccgtgtttggcacagtccgccgaggccattgggaggaaacagaaaaggcgccatcaacggagaagggaaggaacggcaaagtgccagcggcatcgaagaaaataattgaaacattgtaaaataataaaactaatttagtttgtaaaaacaataaattaaattaaataaaaaaaagttcaatttaaatttaaaatgtgtggaaaatgggcaaaaccatttaatattattttttttactgacccaatgagcaaaacaagccattatttattatacataaaatatgctcaaaaaacaaaaatggcaaaaaaaaaaaaagtgtaattttgatgattgttttggcgatcattttccgtctggcagtcg

SEQ ID NO: 10949 - DNA, 1367 bp, Heterodera glycines
tctggcagtcgcccttcccaggtgccccgtcgtatctccgtcgtcggaatcgccgttggccgataaagccgttcgatggcccattcgtcgtccacctcctcgccctcctccactgtcatctgctgggctttctcatcgtcctcttcctcttccacgacgatagaaatgtcctctctctcaactccgcccaaaaggtccacgagtttggccaacaacggacccatcgaagcgatgtgacgctgtccaatcagcaaaatggtggaggtaagcagacgaccctctttctaacgagaaaaacagttatgtgtcaatgttttttttgtgcattggtttacggaagtgagcgcgtccattcgattcggagacggcggaggcatcggacgaacatcggacgaatgaagcgacgttggagaggaagacatggagaagagggactgaaaattgggaaaaaagtaaaatttaagagaagtgtgccaattcaccttcaaaaagttccacaagtcacgcattaacacagccatttcgtgatttgtcgtctcggggagcatttcaacgcaaatgtcgatcagatcggggaaaaaatcagcctgcaattgtggaaatattatagaaacaattaatttaaaaagatattttaccgaaatgagaagtgcaaagagttgcctgcatcgctgcctaattgcgacggaaatgggcaaatctttgagaggagtgcactccaattgagaaagtctgcagaagaaaagcgaattattgtaggaaacagctgaatatgttattacacattggcaaattgcgctttgatgagcggcaaacaaaaggaaaggccatggaaacccaaatcggagagcaaaagcagcaaatcgaagaggagcggacaacggtcaatttgttgagaaacaatcaaatacctaaaaagaaattctgttttaacaatttaagacaaatttgtaagaaaatggtgggaggaggggaaaagtaggaactacgcaaaatgaatgatggtgaaccagtggatagtcgtcactcactcactgtgggctcaactcccgctcgtgttcatcccaatcgagccaagtgtaatgggcggtgagtccgtcgccagcaaaccgatcgacgagcaattggccctattttcaattgggaacaatagttactgggtcactgacagtttcaattaacaaagtaccaaaaactggcacatttccgtgtcgtacggcccatttccgacagggccgggaagtgacgcacacaaattttcgaccatgttcaaaaagaggagccggcggacaatgacactttcgactcggttcaattcattctcctcttttttgtggccttctcccatccacgctgttttgctgctg

SEQ ID NO: 10950 - DNA, 1843 bp, Heterodera glycines
tcgacacgtcgcctccgacgcggaagagtgccgttgtgcgccacttcggcggccgaacgccattccatggccaaatggcgaatatcgcggaggagagagtgctggaggggaagaaatgaatgacctatgcattgggaaactgggctcgattctattaaaaatcccacctctttctttttgtcggtattcaaaaaatccaagcatcgaaaagcgtcgaaattgaaccgggcaccgacatcgcggcacccgcccaccgacgggttgaaacagtgtttgtcaccactcccacaatcggtggagaataatttgtcataggacttaatttgaaaatgataatattttttagactggcacttaccccaaacacttcgtccatcaacgcggccaacaaatgcgttttgctggccccaatttgggcagtgaaaattttgccggaaatggcgaagcagcggcacacaaagtccaccccatcggcgggagtgccccagtggcctaaaatattttaaaaatataattaagtagatgatgcaaattgaattcacttctgtccacaagccgaagcattgagacaataagcgcacaaattttagtgagcaatttgttgtggtaacgaagtggaagttgcacttggggcacaataatacacatcaaacttaaaaagataggagggaggggaattaaagaaagcaattaacaaagcattaattatttaattggcaagccaacaaacctgtaaaaggtgtccaaaacgcgtaaagaaggggcaccaacactggaaccattttgggactccaaaaagatgtcttcagtgccaccactttgctgaagaagcgagtcaacgtagtcgagggtccagccgagcagtgcgtcttgcaattggccacgaaggtcgggcaaagaaatgctaagcaaagaaattataaaacatctcattttggttgtggaatcccactgattgttgtgagtttcacaagttcacatctcatgggtcgtcctcccatgctcaccccaagtgccgaattggactgtcttccggcgcggtttgttgccatcggattaatgtcagcacattctccaccactttgctgccattttttgggtcggtgcttccactggcatcggtggccatcacaaattggtcccattcggtgccaaagcgacgggcatcggccaaagcaagcaaaatggcagcactcatcagaccaagttcacccgacgactgttgtcggtgttggcaaagttggggcaacacagcaatgacgagggagaccaggttggccagctgaaatgggagtcaaaagcaatttgttggaaaagttgaattttcatcgtaatgttcccgcccgtttgtcctgcctctttgtcgtcttttgccgcataaatgagtcgggcaaccgttcgtttttgccattcctcgcgatccgacacagtccaaaaaaggatggacaacagtttggcatttaatttcccactgaaattcaaaaaatgcctgaaatgatagtgggagaatttcaccgattgcccccgacgagcaccgatcggagcagagtccattggaattggagatcgctgcggaactgctcgaagaatgggatgtcatgccaacgagctgagggcgccaaaggcgaggaaaaatcgggactgcacatacgacgcagcaaatcagcgatgagcacgtcctaactaggaaaaacacggcttaaaatcacccaagtaaacgttaaacaccccaaattcaatgcccaattcatgggaccaattctgaattggcatcggcaaaattgtcggctgcgaatgagtggcggtaggaggaggttggacattcattctaaaggaatttgct

SEQ ID NO: 10951 - DNA, 3377 bp, Heterodera glycines
gggttatggttttgtttgtacacttggcagccgtacgttgctcctgttttatggaagttaagggtgggatgtctgagcaaatgatgctcctctcaaaagtgataaaaattaaatgtggtcattaatttatatattatatgacatgaaaagagtattttttcaaaattttcccggttttaagtatattttggacgatcaagatcacaatgaagtgaatgatctgattaagttaatgctaatgactttttaatcatcataaaaagatatataaatttgtttgaccataaaatattcagttttttaataatttataatgctaattgtaaacattagaccactcaaaaaactcgaaacaattgtccattttcaatttaaaaaatgttatcagaaatatgtgaaaagctgtgccggaagtaatcaccgagttggggacgaaatgagcagggaaacggcggccaattgccaacggcaccaacaaaacggcaccgatcagcggagaccaccgctgccccagcagaaggggtcggtgatcggactgacggatatgagaggaaatgcgatggcactgagccaaaaccaggcagcttactttgatcagctgagaaagtattggaactgaattgggtggcagaagcaggcggcacgggacgaattgggagagagttttattcttcttttcccttaaaattgattattatcccctcattatgctgctgtaattattttttcactgaaaacactttccttggttttcgggtcgtgaactcgaatcggatacccgttttgacgaattccgaacctctgacccgaattcggacaaaaagtcggaagactcaaaattatcgaaatatgccgtttttgaaccaaaaatgctaaattcgaagatttggactttagattttttgttcgagtccgggttcggaattagcggaaatagataccgggttcgtggtcagtaccatctaaaacgcaaggagcttgttttatgacaaaaaaatttcactgacgcattttccattgacgcattttccgggcgccctcccgccgcctcggcttttaggatttataaaacccccattttcatttcgttttttgagcgataatcacatcaaaaattttaagcaacttcatatttctgtgtatgattgaattttgaatttccatttcaaaattaattagtgattgctagggctgctaattttatgtaaaaaaatttgcgaaatatgtaaataaaatatgtatgaaatatgtacaaaaacccccaaatatgtactaaaatatgtaaataaattttttttagtggtaatcttttggataaaaattcttcgtaaaaagtaaaacaggcacaaaatgccatgaaaatgagggcttagaatcacattttagtacattaaatactcatttttatttcccattttgaaaaaaaaattgattttttagggatacattttcaaaaaaaaaatttgaatttttcgcaaaaaatttctataaattctaaaaatatgaaaaaaaaatgaaaatgtgtaataaaaaattgcaaaattttggatttttttgggggatctaaaaaattttccttaaaaaatccttaaaaattgcaaaatatgtacaaaaaaatgcgaaaaagtccaaaatatgtataaaaatatgtacatatgtaatatgtagaaaaaccccgaaatatgtaaaaatatgtaaataaaagtcccaacttttgttcacaaacacaaaaaagaaagtgtttttcctactaattaggctatggagaatccaggaaaaaatatgtatttacataaaattagcagccctagtgattgctgaacagaagaaaaagaaatatttatgtattatctttgaaatgatgaaaagctgaaggtgatcgcccttaaataggctcgaagtctcatttaactcaacatttggccaacaaataaaattggcagacaaattgaaaggcaaagggaattcgttttgttgtgttttttgcgttggattgccaatgagagtgaatttcgcaacggcagtaaaacaaacattccgaaaaatcaaacaccattcattcatcaattaaaaagtcacctttcggcttttttttgaatttctatggcataaaaacgaagccaaaaacgccgccgccgcttctgctgaagtttaaactgcttttgcccattctgtgctgtgacgttagtcaaaaaaccatcaaatgaataatttttgacataaaattattcataatttcgtctaaaatggatcaaattttataatattgatatttttcgatagccctaagtgttttctattatcctgcaaaatttttaaaaaattctttaagtttaaaaaaagttatgatctgagaagctcaaaaacccaagttttttttgaacatttttagtcataactttcttgaaacttaacgaaactttttggaattttgtaggctaatagaaaacacttagtgctatttaatgatatcaagaattaaaaatttagatgctcttgaacaaagttatatcaaaaaatattttcatttgatggttttttgactaacgcccattatgatggtttttgactaacgtcatagcaccattttgactatattcgcatcaacaatttcatcagcaacaattggaaaacagattttgaaattttttcatttaaattcaatggaaaaaacactaacgaatttaattaataaatttaataatagttaaatattccaattggcattttcctacaatttcttctttcccaaattgagggggcgttggccaacgacagtatcccacggcacatacggtacttttgaccatcggatggaatctcatcgctctgcttctgttttgtgtaatgttttggacactcttttcacaactttcctgccacttgtgcaccaccagcaacaaaatgtttctttatcagcacgagtgagttgagaaatgagacaatttttgagttttttaaagcgtaaattgactacacagtacggtcggtcactaatcgtcgtgccgttttggttggttcatctgcttgctgatcagtcagtctttaccaattattgcttctgctacgctccgccgtcctccgtcgtctttcaaaattgcggtcagaacatgccgccaccaccgccaccattgcctcccattccttggccttgttgcattcttctaatgctgccaccaccgcctcccattcctggtcccatgccgttgcttcccatttggccccttcccccgctcatttgtctgcctctcccattgcttccaaacattccatgaatttgaattggtgccacgaggagaagcattaggaaggaaattgccagcagcggaaaggaaagcgcattttgcctttaaacgaaaaaaggagaaatatttcaa

SEQ ID NO: 10952 - DNA, 1221 bp, Heterodera glycines
  unsure (1)..(1221): unsure at all n locations
aaaaatttcaaaaattgtataaaatttttgcttttattccattaatattccattctttaggggtgtattttcgtcccccgcgggggagaaaggtcaccgggggcggggggttttcggggggtcttaagtcccgggggcggggggtgaaggccaaaaaacctatcccgtccccggggacgggggcggggctcgacccctacattagaatgttgaatctgttaagataaaaatgccatacattaatggcatacaaacaagcgataaatgaattgataaaacaaaattgtctaactctcgaaaataaagatagccattaaaataatgacaacatttgcgagaaatttgataaaaatgcatccaatcaaaaagtttttggtctacaacacggttaatgggttaattaatggtgggcccgtttaaaacaacccgtattgctccgggccgccccccgtaaataattattttaaaatgatcgcaattcaatgagtaatcctttcattgatcagagcgttcggttcagcaacatcagttcagcagtttctgttgccagagttgtgtcggcattgcccagcagcagttgttgctcaaccacttgaaacatggcatctcaattgcaagcagtgaataatcataaaaatgactgaatttactaatttagaaataaaaaattaatttttcaaaaaaattttttgctaattttcaaattcaaatatcaatcattagctggtagcactctcctccccgcgatgatcagttttgtcgaatgaaaaaaggattaattaatatttgaaattgtttatttattcattctcttatcggttgggtcatccctttgcccaaagcgaagtggacgaatcccacaacactcggataataaagtgaaaagaacgcataagacacacccaatggtcctatttatggaatgccattcaattacctttcacttatgccctttgtccacagttttacgattggaagagttatgccattctgcgagaataaagcaattggcacagatataaagcataaatgtacataattgctgattatggacagcaaaaaatgagcgttcaaattgttcattaccaattgtccatcattaatcattcactaattgttctttanaggcgccttaattactctctnaatggcattnngttgtgttctcatttgacacagagcacaggcagtgccaaagaaatatttgtgcttaactcagca

SEQ ID NO: 10953 - DNA, 3295 bp, Heterodera glycines
  unsure (1)..(3295): unsure at all n locations
aagtgtacttctgcactgatttcgtaatgcgacggcaggcccatgcactgaaagaatgttgaaactcattttngggaaaaaatttctaaaattcgggtcacgattggttttgaggggtcgatggccatttttgaacaccctgagaccccgggcaattgccaaacctttccctcttctttcgtctggcataaaatcggatgatcgggaagagtcccaaagacagggctaataaaaatcgagaagaaaattgtcataattgccgtggtaaagaaaaggctattgatttttccaacaccacgcgattcccaattcgaggttttcggtttaactttgtctgtattttgcccgcaggccaagccgatttctggtctctcgtcggcattctcaatttcggttttcacggcagtttgctcgttgttcgagtccacatgcgcgattaagttcatactaccaggattacctcttccattgtccattggagggtgattggatgaccctcgaatattcattgtgattagcgatttgaccaattcttccataaatccttgcgatgatgaggaagttgatggttgcatcacgttcacttcatgtgcctgttcacgccaattttgtcgcgattggtgctgtcgttggttccatccaacatttgtgccacgttggttccagctattgtttcctctttggttccaatttgaatttcctccacgtcggttttggaattgggcttttcttgcattgcagttgttggccaaatgcccgactctattgcagaaatagcaaaccgggttgttagaccaatttctctggctcatgtgctcctgtctccctcttgcccagccacgattgctgttgcctcggcctcccctgttgctagcacgttggcgctgaacatcatcagccgtgaagggcctgaacccccaagtgttattgcgttgctgtcttccaaagttgcgatcattttcggcatttggatttgaatttgattgctcattttcggatttgtccttcagcgcattaatcagatgagagaggcgagtgacatcatctcctttagaggcaagaaatagagcctcaagctcttctgcttgggctttgaccaattccaaattcttggcttgcgtaaggtcaacaagacgaatgaggaagctcatgtttggcttgagtctgtccaaaaattcctcacaaactttctctttgcgctgatcaccagacaatgatggatttgatgactcaactagcggagtcatacgccttaaaaattggccaaccgtttcatcctcacgctgtcggcacagtgcaagggttcgcttcgccaattcccgtcgttgaggcgagtccaatttggctctcagggcatccaaggcgctggtaagagttacgatttggtcagcctcgagttccttgaacagggtcctcggcgtgtccttgagcgctaatttgagacgcgtgactttctctccttcagtcagatttttcccggacaccgataagtagtccttgaatcgctcggcccaatcatcgaaagcgtataccgattcttctccaaataactccaaatttgaatttatcgataatgagttgctcaacatgttgatgccaaagaaagatcgggttgggccagcaggattgttggaagaggtcccgacgcctttctgtgtctgcgttgtcgtgccgccacctgtgcttaacaagccacggtttgtgcccttgttatccttcaacggcatttcaaattgtgaggagtcgtcctgctcgcgcactgtgctgttggcatctgttccatcatttgctcgttcgagatcgtcgatttggtcaaccaatgtttcaatttgggccttgactatctcaaaatttgagttggcatttgagacaacctccgagacccattttgtctttttgtccatgcaacggttaagagccctaatggaacggttcattccgtcttccaatttgaccaattcgttatgggcggcctctaagtcagagactttcactgccgtctttcccgaccaaaatttcctattaatgaccgaaattgtcatttcactcatgtcctcctcatttctcaactcatatactgtattgtgcccgcaggcggaagtggtgcgacgaacccctttagggttgtcgggaatatccattgctttagttggggagagagtacaattaattgttttcgattgcttaacaacaaaaaaaaatattagtttctaattgaaaatgtggtaaatcataaaatgaatgaccaataaaaacagtggaaaaatttccgcgaatgtcgctctatttgaatgaatgtgtaatgaacatcgccaatgttctcacgtaaattatgtgaactgatcgcatctccgctaaatgaagagcgctgccgcggcctccgttctcacggccaagtaatgaatggcgaataacaagaaaatttttcgcaatctttgaactttgaaatgggcactaattggacgaacattgaactcattaaaaataactcaaaaaatcattgaaatttaattttgccgtaatgtaaattaataaacatccgctagtatttaattcatagagcacttatttcacaattttctgaattatcatgtttctctaatgacgcattttgaactttggcacactgctcataagttatgtaaattttctgctgattaactcaaattaaaattctgatcattagcacttttaaagtatttgtaaattgttctttattttcaacttaaattcaaattctgatctgtctcatttaaaagtgatcactaagcgcttgactgtattgtgcccgcaggcgggtacccaaaacattctctcctccggcgccattactttgcccgcaggcactgcggctgctgtcgtcgtcgatcactcctcattgtcgtcgtcgatgaaccgtttgccggaatggcaaaacaaaccatccggtgctaccagtgagggaggcgcgtgggtcccccagacgactcaccgcttccgaataattagggaggacgatttgggaggatggatcccgggccctgggatcgatgttaaatcccccaaattgcctcgatgttaaagactaatttattctccggataaaatatgtgatcgaaatattccatggacggacgatatgagaaaagtgaattaattgatcgatggtaaatccgatgactccgacgactaactgatcgctggggaaaggaaaagtgtgaagggaacggaaaaggggcggggatgaaagagataagaaaagcgataatggaaagtggaaagtccgactgctgagggaaaatgaaaattgttttta

SEQ ID NO: 10954 - DNA, 1258 bp, Heterodera glycines
tattattcccaaacatttgccatcacaggatttggagaacagaagggccaaaatctattggacaatttgccaatcgctgacggacgctttggtcagtggcggcgtcgtcggcgcacagagtcaaaaaacgccgtacaaaacgacactgaaagaggtcggtcgatgcagtttattgtacattttaggggataggtatgcagcactttattttccttctgcaaaaaccaaaacataaatttataaattaaaagaaattttttgaaaataattgaaaccgctttcctgcattgtcacgtaaccgaacttattgacattgcgggaccaatttgaattttcaaaaattaattctcaaaagttccaccgttttaaaaaaaatttaaactatttggtttggtctaatttaatgtaattccaaatgtcgacataaggcgaaaatgcccagaccaaaaaactcatacagacaactgtaattttattgtaagataattagagatcggcctggacctggattcaggcctggatttttccaggtctaggtcatttttcggcaacctggatttttcctggacctggattttcctggatttttgtccaggaaatccaggtccaatgtgaaaaaaaatccaggtccaggcaaaacacgaaaaacctggattttcctggacaaaattttagaatttattatttcaagtgaccgatgtttttttcacgttttcaaaaagtgattaaataaattcaaaactcattattattgtaaattagatatttttagatgttcccaagcaattaattgattttttcaaacatttgttttggttttaaaacaaatttcaaaaaatccaggtccaggcctggatccaggtcccgaggagcctggatttttcctggatctggatttttgtccaggaaatccaggtccaacatggaatccaggtccaggtccaggcttttttcaaaatgtcgatctctactaatcacatgttttagctgttttctgcgcttccctttgagcatgccgctcgtctgcttttactttccaaagcgattgccaaaaattgcaattccctcgtgcaagaacaagcaaaagggtggaaggtgaaaaagggaattagtctttttttccttttttgaatttattttactcgtaattagctttttaataggtgttttccgaagagagagtcgacaaacttatgaaattctttcacccttccgtcctccgaacattggagagaatgaagaggtgagttgtgttatt

SEQ ID NO: 10955 - DNA, 1568 bp, Heterodera glycines
  unsure (1)..(1568): unsure at all n locations
cttataaacaacatataggcagattaagataaagatcttttaggccaagccaaaatttttgtttagtaatttattttgtttattttcatttttatttacaacagtgtccaattttctggtgtccaatttaccgggagccagtaaataaggcaaaaaattgattaatgtgacttttatcagaaataataatttttttcgtcatattttattattaaatttttttaaattaaatttatcaaattttttgctaatttaattatctcttcgtcccctgcgccggccatgccaatccccgcttcgtcgtccccgtcgtttggcaaaagtggtccccgctcccccgcccccgtctcctctccccgcgtgtatgacatcatttgcaattgttgttggttgtggttgtactgctgagtactgcttgatgaggtcggagccatgctcatcagtatggacatcgcactttgactactgaatttgacaataataaattgccatttattagttcggaattataattaattcaattttatttaaaaattattttatattcattttatctaaatgtaattttaaacattttaaataaaaattcattttaataaatgattattattattgtttagtaattaaaaagagaatgtgcatcaactattgtaattaattattaatattttttatttaataaaatattgagataattatttattttttattaaccaaaattcgatatgcattttaaaataaaattttttttagaaattgatgttgttaattaatcaattaattaattaccccgatggatgttgagcatttttcatcagaagcgtttccttcatttcgtacacttcttccgacgcgtttgttccgctgcaaattcgtccattgctcagtgccaacactcgctcaatgccaatccgatcgggcattgccggcggcgtttcttcaaaattattattttggaaaatttactaaaataatactttcctaaaaaataaatgtaaaaaaattaagaggaatttgtaatgctatttggcttaatgatcggggacccattttccggctttttgttttaaattttttttatcaatttaaattttcaaaatatgagtttttgtgcaaaattttattttcaatacattgcccttattttaccaaaaaaaccccaaaaatttttaaatattattttttaatttaaaatcgcaaaatcaatctccccgcgggggaaatggacccacgaaataatcgttttacaaattaatgagtgagtaccacccgctgctgctgctgatgaattgcgtgcacatttggcattggacaaattgccaaactcataaattttaaagggtctggatcgatttcgtgcccganattcgcttaagccatcgaatttttttattcttttttttcgcagtgagcgcatttttagggtggcgcttcaaatgccgccttaagtgtgacatggaaagcagcgccgacggcgacaaatttgtgacccggcggcatggcacacaacattattagctgtgctttatccgatgccctccctcccctcgggaaacgaatctctgggg

SEQ ID NO: 10956 - DNA, 1206 bp, Heterodera glycines
tctgggggaagaacatttcagctgattcgaatttatgccttggccgtttttcggaaaatccaaaattagaacgccttaaaccgttaaaatcctacaaaattcgggcatcttttgaattttaaaaatgcgattttaattaaaaaggaattatttacctacccagatctaataaatatttaatttttgaagattttcgagaatcgaggaaaataaaaccttctcttaatcacttagatttgccaggatatatttgagaaattactttgtatttattagagacgactgaccggacgagatcgggatcccacaagattaaatttggtatcccaacttttgggatccgcaccgagcgttttttaacttcaccgggataggataggggacctagggattgtctcggcgatttggacaagatcccgacctcgggattcgtctagagccttttttagcttcatcgggattgatcgggatcgggattttggcaggatctcgacctcgggattcgtgtcgattttttagcttcaccgggattaatcgggtcctcccgactcgggatccctcctacccgagttgtccggcctctagtatttattgcttctgactatgcttaaactaattgatgtgactttaattgccccaggacaaccttctccaaaaatttatgccaaaaaatttacctttttgtaaaacgaaaagagttttgttaaacaatggttttaaatcaagaaatcgttttccaaaattcttggctctaatgcctaagaagcatttgtttattttttttaattttgaaattcacaaagatgataactgcacataatatatccgcctcccctgtgtgcatttgtggatcgaaaggagaaaagcgaagaagaaaaatgcactccggatagggcccgaggggggggggaaagggatatatcccctgaggggatgtgccacgagaaagagggggaggctaactcaatttcctgtcggctttatgtgtgcgccgtgggccatgttttgtagtgggaggggcgggggtggtgaaaaacgagccggggcaacgaaagaaattaccagcccattgcctgaggcaatgagggggagggcacggcgtgcccgaggctgggggagggctgggaggctaagtgctgctcggagaggtgggcacggggacgacgggccaacccccggggacggcggacacacattttgccaaaa

SEQ ID NO: 10957 - DNA, 1803 bp, Heterodera glycines
aggcttggaaatctcgctaagatttgttcgataattattcctaaaatgggaaaataattttaggaatcaaaggcccaacgctaataaaatattcccatttttttaggggaggcgaaagccaacaaaaatgaatgaatatgtaatgattgttcagattccgttttcccacacaacaattttggatggcaaataaagtaaaatggcaataattaatttgcataaataataaatgtttttgtcggtgctcgagagtcgagattctgtgggtgccgcaagtttatcgccggaagcgaagggtcaggggagaaaatggtgaaaaaattatgtcaagaattacatttggactcaaatttgtgtccattaaattttctaatttaaaaataaaatcttattctatcattatcatcaattttgaaagtttgcgggaaattaatttaaatttgctgggattttgttaataaatttgctcaaatgcggcaaaaaattgccataatttttctcaaaagtaaagcaaattcatcattcgacagctcgggaatggatatgtcaaatgaaaagtgcaaaaaaatagtttcaagaataattttccgtaaattttccaattatttaccttcaaaaacaaaaataattttcaataaattttcaaattttttaccatttcttcttcaaaatttccaaaaatttctcccttggttttttgaaatgctaaattttagtcaattggagacgaaatttccaaaaaaaaaaatagactctacaaaattttacgatttcctccgttttcctttttttgaatccctccattacatttaacttaccatcgccatggttgcccttcatgtgcatgttgttcatcgtcgccgtgtccgtctcctgctgcaacaccaccacctcaacattgtgctgctctccatgctgcggttgccgttgttctcctactactgcttcgttttctcggcatttccaactgccaatgctttcgttgttattgttattgttgttgttgctatgataatgattatgatgccgccgattgttgtaagaatggccatcaccaaactgttgctgcttttcctgttggtactggttcgacagctgttgatgatgattttggtgcgtccaccgctgtttctgttcatgcttcaacttctgcggcggcggttggccattgtgccgttggttgttattgtggcccttttcaatgcccaaccgataagcggtggtgtcgtggtcggcatcggcaacaccaaagcaatgcctttgtgccattgtgcagttattgccgacgatggcactgttggtgctcttgaacgtgctcatcggcattgcaacactacctccagcatcgccactgctgctgcaaatgttgtgattctgctgttggccaacacccatgtactgttgatggccaagtacggtagatgccgtaaggcggccatgtctactgtaattgttggaatatggttgaaaagttgcactagtaaaaactccgaattttaattagctgggaactgggaacccactgagtttggctcccggaaaattggacactaaattgactgacaaataaccaatattaaataaatcatactttcgtgaccaaattaccgtaattagtgaaatagaaccctgtcccctgaaataaagccccccttttgatgggttccaattcagtaaatacggtaggtcattaagccactatttccaaccccttggattaaggccaagataaagcaggataatgctagtatataattaaaaaattttagtgggccgtgaaattcaaaaaaaaaatgcccaaca

SEQ ID NO: 10958 - DNA, 1423 bp, Heterodera glycines
tccgtttgaaaacaattgtaaaacaaataaaatttacaattgaaagaaaaatattaaattaatcaattattaaatatttaaattaaaaaaacctgctttttgctggataatgttgaaaattttgtggatttcaattagcaaaaataacatttaaaaatattttcaaaatatacatatatttaaaagttcaaatcgagtaattaatatgatttggcacggtaactttatcggttaaaaacggctaaatttaaccgatttttttttaatttgttagtaatttagccatttattttctcatttttaaattatttcttaattatgcattttcaaaataaaaattgattccaaaatttaacacagtccgggatcatttgctggcgattttttggccaaaaattgttgaaaaatggtgccgctgcccgcgggcatttcaaaattatgcccttggcaattcggcagcacttacactttctttgagcggcacattttccccatgagctgttgtgcccccccccccccgctttggcccattcataaaattttgggcgcccaaaatcgcccatttccggccaatttatggcaaaaacacagcgccaatttttgaaaagcggggaaaaattgcgaattgttttaatgtgcttatataaaaaaaaatgctttttggatttaataataaaatattttgattggcaaaatattttttcaagtaacgaaaaaatattttttctcttttttgtttaattaatatttttttaaagtgactagacactaatttaataaaattagattaaagaacattttttaatgaatatatgcaaatgatttcgactgaattttattaaatgaaaattttttaaaaattaatttaatattttgcttttaaaatttatttttcatacgaattggcattttaacgaaaaattattaatgaaattggcataagcaaattaaatattttgattaacttttacgaattcactgcaaacaattaaaacaaatattaatgaaaaaacaattttgtcaaaaattagatttaaaaattatttccatttttatagtatttgttggctttttatttaaaaaaagaaaattatttactcttactaaattggcattttggtagatttttactttttttttaaatttgggttttgagtgggcgaaaagaattcccccaaatttttgctcggatgccttcacattctttcggtggccaagtaacaatggccaaataacaaatgaatttgggcgctcattgtcggtgaaaattgaatgtctgaaatccaatttgctttttggggaaggcaaatcaatgccaaaaaaagccaagaaaattcatcgtacaacccaaaattggggggatttggggggggggggaagtgtgacggcattttgtattagcgtatgtggaaataaattgaga

SEQ ID NO: 10959 - DNA, 3057 bp, Heterodera glycines
cagtaattccgagtcgtcacgcgtgcggcaacaaaagtgttgcaatgtttcagcaaccaccaattcaaaattgtttggtgaaacacgaattgcggggaacaacaacgacaaaatgtgtggcgcttctcagagcgtcttcaaaacatgcagttcaactgctgcccatttgctaccgaaacaacaaaatgttcgctatcgcgtcccaatgtcgaaccattcacatactgttgaccagaaccaagtgattcatttctctttgtgcaaacaaagcccttaacatattaatccatgtccaagggttgctaaattttccacttttcgtaccccttggatatgtgttaaccattatttaaaacaattctgattttaaaatttagttgactcgaatggtttttaccgatgctgatgaattcaaattttggcgttctgtcatcgtcaattggtgagtgagtaatgattaggaattagagtttaaatgcatttcttggcgttaagaatttatgcaattcacaaaaattcaagctctattatttttaagattttcgtttaggtttactaattttgcttccttcaataaactcggatatttttttcatgccaacttttctggagccgatgttcgttggaattgcaaaagaatcaacgaaaacactgggattgttcaacgacttcgtgaacagaacggtcctcaaatgagcgcggatctatattccaaaagacataaaaataaacattttacgaaatgattattttcaatattatccaaacaaatagatttaggtgaattgcatcgcgatttgctcttctctctgcgtcggcttgggcaatggggcgggacggaccaatcgcaagagacatttcccccctccaatggtcctcttttgtcagtctctttgactgcccttttccctctctttcgttagatgcctttgctcacttcgttttggtaaaaaaacatttgacttcgatggcgcctataatcccccgagaacaagctcaatgtctgcaaaatgtcttcaaacatttcgcacactttgaaattaatagcgcaaccaaagattggactcaggaaggtggacattactgtagtataattataattacagtccattcactgtaaacattactgtcattttcagaattgcgtctttacaaacgcttgtttctcggcctgcggctttgcactttgacttttcctcctcaattgttacgcaatttgcaaattcttttcaaatgcatccgccaattttgtttcaatgccaaattaatgcgagaaaattgttggtcagcaaatttaaggatctcaaatgaggagaattcactctcaatctgtgaaattaatgaccagcgcattgagagagttcgagaataagtattgtgtttaaacctaaactttaaattaaggttcttcgagaattattcgttttattttttccgcaaaaaaatttggaatgtccaaaatcattttcgctgtttaaacttttggtggaacatgttacgccgtgtcttatccaaacgccaaaatggttggccgatgaagtgcaaaaagaaatgaaagaatttgttaatagtgggcaggtgaagaactgtttctaaaaaatattttttcttgtctctttaattcatttttcagactcataataaacaaaggacaaatgagaccattttgcctgccaattggtattgcgaccgcattaacagaactgaatatgaagcgcaatcaaaagactcggatcgtcatttgctcgaccttttggatcagattctgagtaatcaccatccaaattctttgcaacgatatgaccagcttaaaaaggtccatcccggcacattccgccgattgattctcccaattcattttcagttccgactcgcttatccttcaatttatgagaagcgtttcccaacacattcgtctcatttggttgtgggcactaaccttaatcattcttgaaactgaccggaactctgattgtgagaaggaaatctcattcataaataaatgttcttttatttttatggactcgaaaataactatttttgtaatataaaaaattaaattattttttacataattgattaaatgcaccgtaaaactctcgtcctaaaccgaccatccaaagcaattctgtgatccgtttcttttgcagttccttttgcgttctccgaattttaaatatttttgacaatgaaaatggaaagcgaaatgtctttttgcttgatccactgatcattggatgtggcctctccttcgaaactgtcagttcaaattggaaatgtccgggtcggcaaagtaacactcgcgttcgatgcccaaattgtattggtcgccccttcctcccctgtaaatgctggtcacaattcggaaccatcccgtttctccctaaatgctcgaatgattgttgtgttgaaggagtgcaactcaatgcttacccacgcgtccccccaactgttgcgcacaatccaaaactccgtgttcgacacgtcgtcccaaccccaacccgacaccgacacaatgtgattggtctgcaattggagaattaattagtggcgccgcgggagtccgagattaattagtctcggccaacagccaaaagcaaagggcaactcaagagtgacttttatcggtttcgagacaagcaattgacaccgacacccaaaaacccgaactattttcgactcggtgtcgagactctcgtgcagcccttcagagtaataaaaaacaaattgtttaccggggcatccgaagtttgttggaagatgcccccggtgtaattgaggtcgaattgctccgtggctccaattgcgcaagcgattggtcctctgttgtgtatttcggacatcatttgcagtctgattaaaaacaacagcaaatccagctcaattttattctttttcttttttaccgtcccgaaagttttccgtagtctttgacgtaataacgcgtataattttggagggcaaaacaatctgtgcttttaaaaatgtacacatttttatgttaagttctcgttgaaaaaccaacagtcgggccaacacgaaccgcagcgagagaac

SEQ ID NO: 10960 - DNA, 2591 bp, Heterodera glycines
gcaataatttcctccaatttgtttataaaaaagcatttatttgtttccaaaacctgcggtgaaagcatagtcattggccaacgatttttccgtgccacgttaaaccggtcctggagagagccttcgaacggagagcgacagtccttccgattgtcccccctccccccggcctttgttttgcccacccaaagtgccaaacacccaacagcctccacagtagaccgggatgtgctggttacggttgggcgaacaaaagttggttccggaccttcagtgctcgtgcgattaatttgacgtatgatattgtacaaatgaatttacgcacacatttcgccagtcccactggcggggaatggttgcctcaaagccaggcatttcccaactgcgcgggtacgtccgatgttctcggaatggtctgtccatcggtcgaaggcacgggggtttgtcccttggaatgttatgggcacggcgacggacgacattcggcggagggatggcattgttcggatttggatttgggaaggcggtcgaagggaaggcaattcgcttggagacggaaggcactttctgagagaatgattggactgctaaagacgacgcaagtgcggaccaaagaaggacgcagatgaagcattcgctgcgagatggagccgaatttgtcagccccagcgaccatccgatgccattcccaaaaagcacccaacggaccatcggcggattcatccgccgtccctgacaaacaatccaacatttaatttgcacaatccgaatgcatatttgaaattcacaaaaatagactttgaaaaaagcattaagttttaccaagacccaccggtgttttccatcaattctaattcatcttcaaactgtacaattgtgcctaaacatctggccaaaagaacagtgctgattgtaagcagcaacaaaacattaaaatccccgaatggaaattgcagaatcatcggacaatggaaagacgcgttttaagtgaaaaaaggggggggggggaattcggttgtaaaaaaaagtaccgataaatggaaaatgaagaaagggctggctcttaataataaattaatttgtcggtcaccgcaccttatcagtggcgggacatttttatcagtgaaaaagacaaaagagagaactgcgagagaacgttagggaagcaaagcaatgaccgaagaaacgccgacggattcattgggtttaaactttaaagtttaaagtcagtaagcatcagctaaatccacatgcgaatgaacaattttaaggctcaatgacttttaccactcaataaatgaagaatgcttttgtaacaagccaaagatggtgaataggtcgcgataaaaagcgacaaaagtaaaaataaaaactaaacttttgctgtgtgtggaccatcccttagttttattcgactttcaacgcctcatcgtgtcaaccaacattcatctatactcattaattaatttattttgcagctgttttgatgtactaaataggtatatgtatggacattgaatgtattacgaaattaattgagttatcaaaattcaaactgagaacgagaatgaaacacagacttgtcaatgctatttatcacagcgtccgggaaatgagctgctgtaccagaaaagatttgcatgtgtggcgaagtggtctgtgagaaggtcaccaaagggagggtcccaggttcgagtccagttcatgctgtagctgtatttcgatgattttaatgaataaataaaaggacaagtgaccaaaatgacttgaaaattgtttacgaatttttaacatttttttttgtcacgtgtaatgaaaatgaaaaccatcaatcctcgatcagtcaacgacatcgatgttggcctcttgatcactttcttcgttcgttttttcttcggccgcttgttcccgcatttcctcctccctcttaatttgtttgatcaaattttaatgccttccatgaactcaccagcttcaattcgtcgagtctgccggtgtccagaagccaattcgagacgaaatgatgctcaagctgttgacgcatttgttcagcgtccggcatcgtcttccaaagttgctcaagtcgtcgccaaacggaatgcaacgcttcatctcctgaaaatttagcaccttccaaattgaatcccaaatgtccattggtgcagtgggtgtcgacgggaacggcaccaaatcgccgattggcgtcgctgatgtcgacggcagcgaatcgccaaattccaacatttactcgtccatctccaccgttggcactggtgctggagttggtggtggcggctccatcgcttcttcgacggatgcagcagatgttgacggccctgcttagtcctgctgtggcgtttcggcattggggttcggctgtggagcgtctgaaatttgaaaaatggaatttttatgttaaaaattggtgaaaaactcacttttgttggcccatcgggcttttgtcgcctttgccattttggttcgtctctcctcccgcttgtcccatcttttctgcacgggtttcttcacgtcagacttttgttttaattttttttttactcattaattcctgaaaaaaataattttattat

SEQ ID NO: 10961 - DNA, 3032 bp, Heterodera glycines
tttggccgttggtttcatcattcttggttccgttttccaggttggaagcaatgcttccgaatccgcttccgtttggtgccgggatgatggttcggttgaagctgttttggctttggtctaaagcatttgaaccaaatcaacgaacccccacattcagcaaaacaaattcaaaaattcctagcttatatctttaaaagcgcatttttgtgcgcatttctttttgactacatgttggacaaagctctttttgatcaattcaaatttaattccaaaaaaaaattctttcctgtctctaaaatcttttgtcccatggaaaaattttttttgttttttttcacttactattcaaagtggcatgcgatgccgcagccataaagatggcgaattggacaaagagcttgaggcattgggccatttggagttttgatggtcggctttggggattaaaagggagttgaagaggttaattgatattcctaaagggatttgaaatctattaatgattttgataagggatttgaaatcggttagtgatcttcctaaagggatttgaagtcagttatgattttgctgggcctatcagcggctatttatgcagctcattttgggcggagtttgggcttaaagccgaccgatccgtcgatggccgtcagtcgcgtccgtacgttagcggcggctccgccccaatttcccagcgatttgtccgccgctttttacacaaaaattggcattggaattccaatgccaaaagtgatgaatcacttttatgcccatccccaactgctgctgatagcctcacaatctgtccaatttgcccacataagcacaaattagcatcggaattttctgcttttcccaaagctaaaagtggcggtgattcatcatcattttgcccatttgtggataatttgtccatcaaaacagtgatcagaaaaatttgctttcccagagatgaacggaagtggcaaaaaatggaataaattaaaaacgattgcacaaaaataatttttgtctactttacgatttggtaaaaaaaaataattaaaaattaattgagaattttcaactgtatttttaggatacggtatcagtaaaattacgaaaattgacaaattaacgtgaaaatataaagcatttgctaaaactgccaaaaaagcaacaaaaaaagaagcagaattggtcacactgagaattacatatttgacattttcctaattgatcaaggttactaacgatctgatgctgatcagctgtacagacagagattggaaagaagacattctctcgtgcgacacttccactcacgacaacagagattggcactgattcaattcaaaaactataattttttctttttgattacatttaatcagacatcaaatctcttgaataatttaatagaattgtagaatatataaaaattcttgaaaaaagagtgatttgaaaattaaaacttatgctctcgtgaagcacaacaactcgccgtagactcagaacaagaagtggacacaaataattgcattattcataaatattttatttcattatttggcaaataattaattaattgaaggaagactcatgttaaatttaatagaattaacataagtgattgaaaattaaagcttatgctctctagcaactcgccgtagactcagaacaagcagtgaacaaatcaaataataaaattaaagggcttaattaatacaatttcgtccggctgttttgtctttgaaattggatgctcgtacatgaaaatctgaaattatcttgaatttggaccatttttggttaattatgataagagattcaagccggatttaatgatcagtagaaaaaatattgatctggcaaaaaatacaaacatttgaataaaaaattaaccatttttcattgtaaatggagaaaattgttaagtgtccttgaattcaattaaaaaaatatcgtgatttcctaggaaatcaatacactcgtccttagaaagcgtgtttttccaagaccagtatcctggattaaagccttccttggcttggatctaagacttgtacttacttttaagttcatcgtaaaagttctcaaactaaagaagcagcagggcttcgatttgtccttatttataaatgatgtttctgatgagaagaatagaaaacttaccaatttaaaatgtcctcgttttcaagatttatccttattttgggtaccgatcaaaaattccttaaaagatgatattttcagagaacttcttttcaaaaagcatttattaattaaccatttctttcaaaaattctttgaaaatttgaaaaataattaagaaatttaaagaatgctttttgccgcactataacttttttcctcattgacaattaaattaggtaaagtttgctccttttaaaaacgcttgcttaatatgttctgttagcctgcaaaagagctctctcccgccgactatttcggtaatccagcgggatcccgcggggttggggttactgtaatttttctaacaatttgcattttcttattactagggctgggacttttagtgacgaaaaatctcgaaataattaactaaaatagtgagtaaaaatgccaaaatagtgacaaaatagtggcaaaaagtccaaaatagtgagaatagtgacataattttcagccaaaaattaagcaaaaataatttttattcactgattgcattgcaaatgagtagggctgggatttttaagggcaaaaaaacaaaataggtacataaaaaaataatttttaaaattaaaattcttgccacgaaaatacctttttgagaaaatttttttcatttcttaggagtgctttttgaaatttttttgtcgattcttaggagtgtattttttgaaaaaatttttaggtcgattcttatgggtgtattttttggttttattgcatttttgttaaggaatttcccaaaaaatgtcgaaatagtgaaaagagcaaaaaaaatagttaaaacctaaaattcccagccctacttattacgctcttgcaacattcaaatataaaaa

SEQ ID NO: 10962 - DNA, 1534 bp, Heterodera glycines
tgaactgtgcacagaatgcgctcttccgtgtagaaaacggtggtcagaaacagtccccgctggatgtgtttgacgaatttggagctggccgagaaaagatggcgaaggcccacgcggcgtttcttttcgcgttcggcgggtccaacggcacaattttggaacactgaaaagggcgcggagggatgtgtttactcgtccctttgtcccttcccttttgtccattggtttgtcgtccctttgtcccttcccttttgtccattggtttgtcgtccctttgtcccttcccttttgtccattggtttgtcgtccctttgtcccttcccttttgtccattggtttgtcgtccctttgtgtcccttcccttttgtccattggtttgtcgtccctttgtcccttcccttttgtccattggtttgtcgtccctttgtcccttcccttttgtccattggtttgtcgtccctttgtcccttcccttttgtccattggtttgtcgtccctttgtgtcccttcccttttgtccattggtttgtcgtccctttgtcccttcccttttgtccattggtttgtcgtccttgtcccttcccttttgtccattggtttgtcgtccctttgtcccttcccttttgtccattggtttgtcgtccctttgtcccttcccttttgtccattggtttgttgtccctttgtcccccccgctcacttttcgacaaaattgcgctttttctgtactgctccacgtgctcaactaattcggccaattctgacaattattctttgaaatgttcatcaaattcatcgcactcacttttcgagtcgggccttcccctgtcccaataatcctcctcttttccctcttcgtcctccaattggtcccaacctaaaaatgtgtgccgttcgtccattgcttatcatcaatcctttttttgttcttttcttgcttgagattcgtagcattgtcggcactgccattgccggagggccccacccccaaattgaggcgaaggaaacgcgaaaggcgaacgcatggcccaagggaaggccatcaacgataaacgattgggaacggacattgtccgcctctaaaaagccatcgaccgaagaaaattgggcggaacggctccattgaacttagaaacaattaagacagtaattaaatgtgaaagaccgcaaaccgcggagacgcacaacgatggacgacgaatcggagaagaaacgcaaacggaggagagcggcggagggggaaacgcactcggccgaaacactttcggggggaggggggaggcgggggacggagacggacaaatgggcgaccatttgtcggaggatagccagctgagaattgagtagctgcagacgcttctcatcgtcctaccgatcaaagaaatttgtcattttttatctgagaaaaagatcgaaccggaaaatgcagattttttttgcatcacaacctcaaaagctattggtaaaattaaaaaaaaaaattcgctttttcgcatatttcgctttttatttttctattgccccatccctggta

SEQ ID NO: 10963 - DNA, 3220 bp, Heterodera glycines
  unsure (1)..(3220): unsure at all n locations
atccctcgccccaaattccataagcatttccgccgcttctttcctccccaacattaaagcaacatccaaaagagtcattttttgtgggaacagtgcgtaaatgcccgtgctcagcacttccgtcgttttgatgccttccgtgtgttcgccgttgccgcggcttcggctcaaaacggcactcaatgcccccaaatcgccctgttccaacgcactgagtgcgcctttttgggagaaatattaaatagccacgcttaaccggcagcggaaaacgcaccgaccaaaccgaccatcccggccttcagctttttcctgggcccgtcccagtcggcaccccttccatttttggcagatttaccgcccgattcgacgcttccctgccgatggactaacgaaaagaaattttggaaatgtaaaagaaaattgcaaaaactcacaaaattttacggacaattcagtggccgtgctgagaataaaaaagaaataaagagaaaagaaaagaaatactaaagagataatgtgatggatggaagatttaatttgaattttcaaaatttgttaattaaatcaaagcgaatccaagcggaaatgcgcagggaaagggcccaattaatgggaattccacgaaagagcaatcgatcgatcaatttgaccatccctcgggggaacgacggacattccatcgatcggacaccttcacagattcagtcgcggatccctcaatgagaagaggcggaggaaacaagcaaatgtaaatggaattaaccgaaagggggggggggggtaaagtcggagggaagggaaagaaattcgagattttgccaatttacgtctggtcaatggcgatccgtcccacctgctgactgcgttcccatcacttcgagagtcgtccaggcttcttccggtgccccatacgcttttgtgccgaaacaatgaccgagcggccaaatgatgggcagccgatggatggacagaaatttggttggatttgtccattttgaattggtacggcggaagcattccgagaaaagagtctaagagaaaaggagagatttgttaaaaaggaaatggtcaaaaaagaaaaattaatgggagaaaaaaataaaaaagggaaaaaaagtgaaacggacaaaagggaaaaggcggaagaaattcacacaatgcgcgaaatttcgtgtaaacacaaaaagattggcgcattatgaaaaaggcgaggaaattactcaattagtctcaggcacgccccgggggaaattgtattggacacatggggagagaaaccaacggggggggggggaaatgccgtggagagggacggacgggcgaaggcattgggttggttttgttggggagcgcagatggttgggcaccgggggagcgataaatggccaaagggagaggacggaaacgaaaatggcaaatttggccaaaggacggcataaatcactgtccgccaaaatgccttcctcaacggtccctcagaagcagctgcactcaatcgggcataaagacaacaatgaaacaatggcagatgcaaagcgcaaatcaatttttgcggattgccgcagaatcatagccaaattgccttagggtgggccaatgcgattgaattggcaactgccaatggcacgcaaatttaatcgccatcccttcccttgaccttcctcatttaattcctttccacctcaaactgaccgaaatcgatgcttttctctcccgcgctctgttctccgttcgcccctctgtcgtccagtgactgtgccgaccccgaaaagctttgtggctgtggggttggcgagcgcaggaaaagcattgatggtgcgctgttgcggtgccgttggtggcgactgagttcgcgaccgattcgtgtgccaatcagtttggctcgctgctggtgacttgactcgcaccttcaagagacaaagtgagtcatttcggcatattcgctgcacctcttcaatttggccgcgtcccttccgcgtgccgtttttgcgtcgtttttcactaaatgcatagtcccccgcccctggggtgccatccccgccgtttgtaccaacgcacccatccgtcggcgcattgtcttccttcgattttgttcctgcacatcgtgacgaagacggacaatgaaaagaatggcacggatcaaaggacgaccctttcgagcgaccatcgaattaccgacaaacaattgggaatactttaattcacttgcgcaagaacggaaactaagtgagaaattcggcagagattgtgcccttccgaaaattactcaatccgtcgtcagtcactgcgcccggagaaagatgagaaaagggttgtcaccggcacaattaaatttgcgcgccgatgagcggagttggcgacggaaaatgaagcggatggaaatggactcggaaaaggggggggggggggggatttctacgacccatcaacgtcaaagtcaataaatcaccgcatgggccaaaatgaatgttttggggaaataacggggaatttcgcccgggttttacggcctacgtctgccgacagaaggcgaaaagcgatgagaaacgatggtttatccgaatggaataacaactcacgaaagatattattacaacaaaggaaaatacaacaaaatacccaatattctattctaaaaatcaaaatagttaatcaaataatagaagaagggcgcgccccactacttactccgccatcgaatgatcgctatggcgggccgcttcgcggtcttcaggattctttttttttctgaatttctagaaatcttagacatgttttgggttttttcaaaaaagatattttgttttttcaaaaatttcgcaaaatcaaatgataaaaatcatagataaaataaaagattgctgcagtgttgatgccagattctttatagcgcctaaaactatcatagaaaagtgctttcctttgtcaagatcatgacaatttttaagtgctgggtggcggtcccgataggctccgccgggataatttttacaaattttgtatgaaattcgcaatgaaagtggtttttaacccatcagtaagtcattcattattcattcatctttggccgttattttggtcaaatatttcttcctcacttccatttcctcaacgtttgcgtcacttcggttaaacggtgtccaaatgggttctccgcggaacagtcgtacagcttcgacgaaatcctcaagaggaggggcggnggggggggggggggggg

SEQ ID NO: 10964 - DNA, 956 bp, Heterodera glycines
aaaatccatggttaaatggtaattgaaaagcattatttgcctgtctgctgaggtcacccacgggctccgaggaaaaggagcacaaatcgtccggtgccaatttgacctccttgacaaattcgctgagatccgtgcccaattcatcgctgctgactccgtccgcaaaggcaatgaccttgacgtacgaactgtcgctggactgtccgccctccacttcctcttcgtcttcctcctcctccccccgacttatggcttctccttcattttccaaccgttggtcctgttcgccacaagcaaaatgaactttctcggctaaaaaaggtcaaatttgcattttaaaatagaataattgaaaaaggaaaaaaaattaagaatgggatgagtcaacaatttctattattgttttgcattgtttaataaatgcctagttttaccactttgagttgaagcgattttggtgcttaaatccccgaaagtgtccatggaaagggatgagttccgccgcattgtcaattcctgggccgaatgcactttcgtgtgcaaaaaattggcccctcttttggagagattgtcactttcgccggttttccccgaaacggtgtctgcgaaaaaagaaaagaactgttagaatattatcacaattaccgttctccggcacccttggcaatgtttgactggacgaactttgtgactcaagcaaaagtgaagcaaaaggaaaggaattgttgcgcatccgattctaaaataacaaatggtagcttaatgagcatctgattttttttatcaaaggcataaataaagcttctggttttcaggcaacaaaaatcttaaagataggcatttaaatggaagcccgtagccagaaaaaaaaaatttcgaagggcggaatcctaagaccttttttgctggcgaaaaatatttggctctaatgcactttatgagtccaatcagagttt

SEQ ID NO: 10965 - DNA, 3001 bp, Heterodera glycines
ttttacaggaaaaaataaataagataacaaaatacaatattaaaatgatgaataatttattttatgcaagataaatattaataaacaattcttaaataataagtaaatgttgttatcatattacttagcaaaacatacattttttgaaacgaacgagcaatgcactgatatacatttgggctcgagataaatataaaatatttaatacgtaaatatttatttacaaaaataacaaaaaatatatggaacattttgtttgaatatattttcagaaaactgtaaattcattaatacgtttgaaaaaattgtgtgaattctgaaggcgagttcgcgcatgtcaatgtgcgggtcggacttggttatgacggtgctacgtcatttcgcgacaagtgcaaaaagggcacttcgcgacagtgcaaaaattgggcacttcgcgaaaaatgcaaaaattgggcacttcgcgacagtgcaaaaatggtgtaaaaatggggcgtttcgcgacagtgcaaaaatgggcacttcgcgaaacgtgcaaatttaaccgaaagagaccgggcctcatcagtacggtgtctctttgggttaatttatttaaattaattattatttgtgtttcggccctaaaccgtatacacacaaagccacagcaatcaagcaaagcaaaataaattttattaagcaaactaaatattttatattggtttttaatttaatcttttaactaattatatttgaatatgattaatcaacgtaatttgttagtagcatttttttaatttattttgagtttgcaaggcttcaacatttgcattattctgtgtagaatcatttacacaaatacaagtctaaacgttttccattggctaaacaatatagcaagataaggggaaggttttcttggactttgtggatttctttctgctttccgtttgcatcctgaaaacagatcttattaacgtggtgatgttttgttagtcgttcaaaaagatcgaagatatattcggttttaaaatcttcttcctgtataagcatttcaccgccgctaatggaaaatgtcaaggggaacaatgccgataataaatcgttatcttaacgcagcttttaaaaagttacataattttcaaaaccttccgataacatctccaaaaattcatccaaaattagggcaaatgaggcccctccggcagctccgatgagagtggataatacggtttttgcagttttaagggtttttaaggaattttaaatttgttgaattgggacatttccaagcaattatagatcctgcggagttaaagcaaaactagcttattataaaattaaaagcatttgcataaattttttaaaataataacaaaaatttgctctttaaataatcaagtataattttattaaaatagtaaattgatttgctttttaattggttgattaatcatattcaaatataattagttaaaagattaaattaaaaaccaatataaaatatttagtttgcttaataaaatttattttgctttgcttgattgctgtggctttgtgtgtatgcggtttagggccgaaacacaaataataattaatttaaataaataacccaaagagacaccgtactgatgaggcccggtctctttcggttaaatttgcacgtttcgcgaagtgcccatttttgcactgtcgcgaaacgccccatttttacaccatttttgcactgtcgcgaagtgcccaatttttgcatttttcgcgaagtgcccaatttttgcactgtcgcgaagtgccctttttgcacttgtcgcgaaatgacgtagcacccatattttgaccattttttgtacatatttttgacatccctaggcataataaagagaaaaaaaaataataatttgtttgtttgcttatttaaatttagattatgggaaaaattcacttcgcaactcaaagttgaatttttttttaagccctgatagcctaaacagcattaaatctaaggaaattcgttcttcagtttataggatcaataattaagttgtttaaaagattaatttattttttcaaaaatttgttaacgatcaaatgatcggacacaatcactttcaatcgcttatttaaaggattggccgacatttgcggcgctgacacttgcggcgcagacatttgcggcgcccagtaaaagcttgaatgtgattaattattagagcccgccgggtcgggactcccgcgggatttttacgggattcccggtcccgcttttttcggtgaacgggattttaaagggagcgggatttttacggaattcccgttcgggactcccatcccggaaaactttgaactcccgatcccgctcccggaaattttttttaccgggctatatcatcatctttttgttttccttattgtcaaaaatttttattacagtatcccatttatagtttgaaaatgctgggtggggcgaagtgaaacgttttctgaatatgttacaacggcaaacgactcaacctttatctttgattaggttgcaagaattattgttaaattagtcattattaaaaaataaacttaaaataacaattctgttaacttaaataaattgttgaaatatttttggggtcatttaattctgcgccgcatatgtcgcatcacccaagggcgtagccagacccttggctttggggggggggggggggctgaagtcaaaaattcgatttttaggggtgtatttttcctttttacgtcgatttttaggggtgtattttaggttttttgaaatcccgaattatggggtgtattttacaaaatttttcgccgttttttgtcaaaaaattaatattttttgccattttggcctccatttttcaaaaatatggtaaaaaggggtccggcggggccgataggcgccgccgggaaaattttgactattttaacgcaattttgttaagaaaattgcttaaaatttcaaaaaaatttactgaaaatttttacttttttgggtttcgggggggggtgggtc

SEQ ID NO: 10966 - DNA, 735 bp, Heterodera glycines
tagaatttttggttaattaaatactcaaaagagattaaatgcactaacaaatcatgaatcagaagaaacgctaataagttaagcataagaatgtttaaaaaattattttcgaagtttaatttttttaaaagctaattaaaaacattaaaaaaacatgggcgacgcagctcggtcttgatccattggacagaaggtaagcggaattgaactcataagtttcatcgaggcataagcagaagctttaccaactgcgacaccccgccactaaaagtgaatgtgtagaaatgaatgaaaaggaaatattttgtatgttttgtgttaagtcgaataccgtatatgctctaattatcccccaccccagatgaaccactttgcgacctcttcaggaagcgggggaccataccggaaacaaaatgtttggttttctaagtagtttgaagtataattcacctagaaaattcaaaattaggtttatactagagaccggacaagagggtcggtcgaacggtttcggttaaaaaccgaaaaaaaaccgaaaccgaaaaaaaccgaaaaactcaaaaaattctcggtcgaacggtttcggttaaaaacccgaaaaaaaccgaaatcaaaaaaccgaagaaaatttttcggtttatttcgatttttcggtttttttttgaatttgtttattttttccaaaaaagcaataaaccatttttattaacagaaaaagcgaaaaatctgggcgcc

SEQ ID NO: 10967 - DNA, 5657 bp, Heterodera glycines
  unsure (1)..(5657): unsure at all n locations
atcagccgatagctttcggtggtcttagcgtctggcacaaccccagccgtggccatatcgccactcctgcggcaanggggccattcacaatttcgttaaaaaaccttattttttggaccatctacaaaaaaaaaaaaaaaaaaaccgctccaatgccggcatcagtctcgtcggtgaatggcagcacctccttgccatcccgaaagatggttgtgacctttcggtcaactcccttgccatccatgaggtaagagagtgcgccgttggccctcgacgccttcattttatccaccggaatggtggacacagcaatttcggctggcaacgtcgacgcatcggcacctccgctcatgaagcaccggcttccgccaggttggcacccacccaaggtttgcccactctcccgccctgtagtccgtcttgcttcggatgaaataggctgccattgctcatggcgcagctttatggccaaaccacccaccaccgaaacctttttccaattgttgtcgttgcgaaggaatgccaataattcattgaaaaagttgagcttataccaaaagtcgaacacttcaatcattttggattaggacgggacgtaatcacaattttctacaagtcaataattatttgtatacttctgagcttatcaggaactctctatatgtaagttgccgactctctacggtttagaaatctcacaaactgtttacattttcacatatttttatttttttttagtgtcaaatcattgcctaaaagaaaccatcaattgcaaattcaatatataatttcaatttatttaattcctcgcctgggggcctaaaaatatttaacaataaaatagtagaaaaaataataatacaaaatgtaaaaattaaaaaaaaaatttttttttttttgatcattattggctcatctttgtctttggcaacaatttggcacatcaatcggtcatggtccaaaatgtgagcacactccgaacacgctcgaacacttgcgacgtcagccaatagcaatgcgcaacttcagatcgctgcatcaacaaatgtcaaacagcacagtgccttgcctgagggcatgaacccgtagtttgaacccgtgtgccttcttctaactccgtcaggttaacgcttgaatcgaattggtgggggaaaaaacgctgattagtttcttccccatacaaaaagacatcaatggccataatttctgaggtgattttattttggatcacttccctaattattccacagcagctcgaagggacaatttgacttactgattgtcccagttttggaggagaagtcatttgcttcaaatcaattgttttgacccgagttcctaatagagattgtttgttccaattcaacgaaatttgtgtgaaatgtggccagttattgttagggtccaatgtaattgtcgtcacataacttggtgtactttggaagacaaattgatctgattctaagcttaaatttttccggtccaatagctcattttgttcgcccaaaatgtccggctgtaccagtgcccacagtatggggtgtgagatgaacacaaaccccaaaactgagctttcaatcggtggcagatcagctggcggtgggtgtggtgtcagaaaatattttctcaatttccatatgactaggcaatttttcagaatccgtcagttccaaattctcaaacaagttcatgaaattaacagaattttcgtcatcttctgtttccactaattcatttccatttccgaccatattttctgtttcttgcccgcgggcgaaggagttaaaagaattgttagaattcatcttcttttgttaaatctaagagagaagggaagaaaagaatgttcataaaatgagcaaggtgaaaaacagaaaatgaatggctaaggagagaaggatttattgaccgatgggtgcgaagaaggcggggcaatgtacatgacgcatacattaaactaagtgctagtgctagcataaatggatgcaagagacaacgatttgagagaaatgaaaagagggtcaataagttgggctattaatgaatttcacttaagtttagctttaatctatgaaaattttatccaaatttatttatttttttttaaattatttctcttattaggctaatgctaattgtaagccaaaacggttgaataaggtcattttgagatttctcggccgacatggtgtttgaatttgttgagttgtataggcattggcgaagtgtttaataaatgccataaacaattgagactcagtgctggcttttatttatgttattctgtccaaaataaatattgatggcccatgaattataattaatttattaaaataatagttttgtatcataaaggtcgaaactagcagcataaataacgcttagagccttattttgcgtaatttagatcaaaatctcggccgacaagggtttaaatttcgattgtcataccgctacctatgtgccgccatggactctctacaatcacccaaacgcagataaattagttaatttttttaaattttttttttctctcctttttctgtttcggttctcattggcattctttggtcattttttttttttttttgtctccttttttttttgtttttaaggcaattctctttttgttgccattcatttcccatgggactttggtggaaggcgccgttctttttgcacaaccaatcccattttttttcttcttcttttctctccaaggccaaagaattccttttttcccttgcacattttccttacgtttttgtccattttcgcaatttccttgtgccggcatgtttgcgaatgttccattccaccccgcctcttatttttggcaatcataggctccaaagaccaaaattcattccgaattattcctgaaatattttgcctttctttcaaccaaacgcaaaatcatattaaatgccaaaaaccaaaagtttttctttaattattttttcccatgcctgcgggccggacaaaagaattgcttgcatgaaattgctaatgatctttctgctattgagtttgaacgttcaaatcgtagagtccccacaagaaaatcaaactaaaggaatttcagtggataaagaaatttgtgaccatttttgtgcccatccatgccagccgactaatttaatttttccaaccgaagagagaaatgcaactttgggttggacttgtgtacacctaaagccaaaaattgtccctcaaagttggtcctcatttttctcgaaaaatgcttggacaattggcggcatcatttttactattgccggcatttccttttgtgtaattcgcgcatatttgtggtcaattgaacccgattcaattgaaattaatgtttgaaatttcttttcaaaatttgcaatttccccgcttttgactgcgtttttaattaattccatatgaccaaagttttgcagtgcccccccccccccattttttttctctccgtgccaaatatggcagccgacggaaagcaattcatctcccgtcccctctcccgttttttgctcttccccgtcgcgacattagctttttgcggcgatgaatctcccctgccgctcgggagaaaaacgttttttgccttttttttcccattagctcgccgctgttgtaacatttgaaaaaataaattgcatttttgctgtaacgcccatcgtccactcggacccgtcgttatttaaggccggctcatccttcagaaaagccatttcttgccttcattctcacttttcctccgctccatcattttttttcatttttccatttcctttttcaattttcaatttttctttttttagatgcaaaaacctactccttctaaccgccccaattcctctgtctccaaaacccttgcctgcgggcttgaaaaaattgtgaatttgagtggaaatgagccactctcggtgccggtgctggcggatcggagtgatccgctggggctcaagtcggtccaacccgacccggtgccaatggaaagtgccgaggctggcacaaaagaattggaagtgatggaagtggatgaaatgagcggagaaaaagggaaaaagggagaaatgggtaaagaaaaggtgaaaagtggtggaattgaagaggaggaagaaagtgagtgcagtgagggtgaactgctaggagacggtggatttggcaatttgcaactaaaccccagcctgagggcgggaaataaagcagttgaaaaggaagataaggggaaaccctatctggtcgcccaagtgagaagcgacggtgtgatcgcggcacggatgaaacttttctgggatttcccggaattggtctttgtcccttttagcctcttcgacaacgcccagccgatcgaaatcggcgatttgttccgcttacataagtgtgagtggacgaataacgaaacaggatgggaagagcgcggagattggctgtatgaagcaaccggacggctgaactaccaagccacggcaacggacgtgagccaattgcgccagcgcatccccactcaggccgtcggaattttggtcgatgtgcaaagagcccgtgaccgacacgtcaaagtggccatggtgtcagcacctgagctgagctgcgtgatgcgcgcctaccgtcgccacttcccggccgatttcacggataacgacatccgctaccgctccgttgtccgtcttcaacttcggcagatcaacagtccgccatgggtgctgtattcacagcagtttgcgtatgttttgccatctgattttggtaaaaaaaggggcgatgaactgctcgttcatcacgcaaacgtcattgctggcgttgagcctgagccaatgggctatgagttccctttcagtgccgaattgagctgggcgaaggtccagctgggcgagaaagtcatggccgcggctgttgcggcacaggcattcgatgtgaaggctgatctgcggaagcacactctgttcgtcgagccggtcgtcatcaatgagatctcgacaagaagcgtgatcatccagttcgtcatgccggtgccgagcatcgaagagctgacggaattgtgcaaaatttgggaggtcgatttggcggtgggttgcaaagtcaatccggcaaccaaggcaaagccttgcgcgcatgggtatgtgctgagcatcgaaaaaagggcgttatgtcgggggtacgaaattgatgttaaagtgatcctttcctaccaagaagcgaaggatcaggacgcgcaggaggaattcgatcagatgcgctgcggcgaactcgacggatgcgttgaactcattccgcagacgtcagtcagggcactgcaggaacggatgttcaccttgcgatccaatgactgctcgaaagtggcgatggacgaaggaaaaggaaaggtgggccgaattatgtcgattttattgggccgaccggtaaaaccggaaagcccaaagggcaacaacccattaatgacttttggggctctttcaaaattgaaagagggacaggtcgacaccgcgctgtgcatgctcgacgaggtgccgcgcctggtctttcaacaggccgggcccggcaccgggaagacgttcagcgcagcgtcgatcgtggccactatcctggccacggatcccacggctcgtgtgttggcgctggccccgccaaatgtcgccgtcgtcaagctggtgctggagatgcag

SEQ ID NO: 10968 - DNA, 946 bp, Heterodera glycines
  unsure (1)..(946): unsure at all n locations
aaatgtcaacggcggaaatgcgtttcttgagctcctttgttcaatacaattgataaaaaaattagtaaatcattaaatatagcggtcctaatcctcccctaacccaaaaaaccgttaaaaatttttaattacaatcaatataaaaaattttaaaaaaggcttcttggagatcgtgtcttggtccatttttgaccattaaaacttgagtatgtatatgcatataaatagttagaaattgtacgaagaaactttcaaaaatttaaaatgactaatttaagcattcttgattaggttatatttaaaaaataaatacttatacacaatattttaaatataaattattcccataccctccggcactggtcctccgccttggctattatatccatcagagccgaactcagtgactgccactcgattgccaagtagtgctaaacaagttttaaagaacgaattagacacaaattaaataagcaaaatttaatttaaaattttttctaaaatttatttttaaattaaaaattttcactttacccaattcttggaaaattttctcgctaaaaattatataaattgttgattttaatttttcaggcgctaagttttcttgagaaagtcatttgcgcccacctttggcggactgtccaatgggcggcgccggcggcgcctccactcgattcgaagcagcagaaccaattggactcagcggaaggtttggcgccgcgcgtgctgcgctcagcacggcgccgccactgccgccgcctgcgcttgggctactgnaaagcgccggccgatggggcggacgcaaacgagccggacatggatgtgcaggctagaactgaagtgcagcaatgagaatttttgaaatccccgggtttttaattgggggaggggtagtaagtactcagacgggaggacctattttttgngggtcggagtcgtttgg

SEQ ID NO: 10969 - DNA, 3365 bp, Heterodera glycines
  unsure (1)..(3365): unsure at all n locations
cctagtcccattttttggacaataattccgacatttgggctaaaaactaataaattatttgaaatcaaaaaccaccctccccaccctataaataagcactaaaataaatatttcttatgcgagtaatttatgttaagaatccgctgttttcagagaagcctagaaaatctgctggaaaaatagggaaaccctaaaaatccttcccataataatgaagctcgagactcgtcggtcttggtcaaaggaacctctcggattttttccgtttttatgtctaagttttttttagctccctttctggcgccgctctctttaggttttcccaatttggcgccaacctccgttgtcgacccattggaccaccagcaacagtaacaatgacagtaggaaaaatggaatggttactgtacaacttgtgaccccaaaataatgttgttttcctgttgatgtccgtcgtctatttcgttctctcattttgttttgtgtgctattttaaaatggccgaaacaaaaattatttaattttttattttttaaattcgttcaaattagggaatggaattttataaaattaaggatttcgggggttcgggaattgcgccggatcggattcggggattaaaattatgtgtttacggaatattggtcctggtgtatttcgtgtcctgcagagactctgggaaaccccgaacagaaggaccccgggaaaaccctgacaggatcccaggaagattctgacatgacaccgggaaaaccctgacaggatccctggaaagccagagagtcactaaaatgggacctgtccaggtctctaccagaaattatttaattggaatgcggatgaagcaaatggaggcaatcaattaattcataaattagtgtgtatgtatgatttggatttggtttggattttcaatgctgattatgataatgatgatgagatgatctgcaagatcagtatgatgacaaatggagacaaagaaaggattgggaaaaaatgagttttcttcgggagtcaaaagctggtttctcggcagtttgtgtgcgtaggatgatgcccttttttgtcgagagtcttgggattagcttttgcgtggaaccggtcatcattagccgggctaattgatccgccccgccggggggcaaaattttgggcttttataaatgatgagtcacggcgttttctaattttaattaatttgccagtccgaattaccaccgaaaaattatttgattaaaatcattattattatattaattttgtcaaattccgagattcttaagcccgaaaatcccaaaatccttcaaataataaaataaaattaatttgtacaaaaatttaatgataatttattaataacccaataaatatttataatttttgggaaagaaataaatggtttaaacacaaacaattaaagtattaaatttgttatgaaaaatattttaaaatttcccaaaaaataataaaaaaattaattgaaaaattataatttgttgcaaatcatattttcttaaacctaaaatattaataaatttttcgaaagcaaatcactaataaacccaaattaaatgcaaaatttatttaaattaaatttgtttaaaaatatattgagaaaaatttgaaaaaaatccataacttgtgtgtttttagaagaaattggaatttttcgcgtaatagcgcgatctcaacaatggggggagggcgatttgttgtgctattcttggacgacaaacaaaccgcgaccaaacccattagaaaacccgaaacggcgcccgcggcttcgacaccgatcggagccgtttggcgacgatttgtttgcgtttgtttccgcttcgcttcgcgcaccgtttttcatcgtcgttttttttttcattttttgtttgctgtacggtgccccgcggcgcgggcggacaattacaccaccgcgcgatcaccgcaccacaaaaacaacaaaaaaatgggctatcaataatttttttttattggaagagcaactacctatttttttgggtgagcgggattgttgcaagatgtgaaggcgaagtgatcggagtaccaccccgcccccgccctccttttggattgatcagtttgaaattcgggattgttgcaagatgggaaaggtaaagtgaagtgatcggagcacccaccccctttttggattgattggtttgaaaatggtcgctgatcaggaaattgaagaaaaactaactgatctcagatgcgtttaaagaaagcgaaatgccttgcaaagaatgaatggcataatgagaataagaagtatcattttgaagctgatcaaaaatccaaccagtgggaacaactgatcgggaatctctttatttctaagtcttcggaaacgtaattgttttaattgaaaatctaaatgttataagcaccgatcagcaatgaggcttcgattgagaacaaattttcataaggaaactgatcgagagttaatgtcagaagaaattgattaggacagcattagctgatcggaagtttgccgtcattaattttttaatttcttgagtcccaaaattaatcattggcataaatgccaaatgatgacactgcattcatagaatattttgcatattttatgtatgaataacgaagttggatggtttcagatttctcggatcgctgatttaagcgagcatttggtcacaatgttcgtgcgcgccattttgaccgaaattttgccgtgagaaaaatccaattagagagaccaaacaaattaattaatcattcatttcccatccataaatggtagtgtgccaccggcacaatccctcaaaatgattttggcgggatgatcagcagtcaaaacgggatttttgtggtggtcatccgccgcgccagactttcactgtttgattaatttataataaatactatttatttgttattactggaatgttctttcttgccgagctggatttcggaagtgagtaattagtgatcaatccaatccattcattaaaacagagaacggaatgggatcaggaattcgtcaaaatttcgcaggatttagagtgattagtttacgcgatttgttttgaaatccgagaatgggaaaattgcgagtcgagagtttcaggatttggggtgccgaaaatttccgaagtaagatcagaatacggggataaaccatgaatttcaggggatcataaaattgaaaattcgtcggtaaagaatttttgtatattgaatgtagaaaatgtaaatttatccaaatttatcgggacatttatggaatgaatttgaaatagtgaatttttaaatttataattaaaattgtggaccaanatattgcagatttattttaagtctaaatcgggagcagaattaatggaaat

SEQ ID NO: 10970 - DNA, 2610 bp, Heterodera glycines
  unsure (1)..(2610): unsure at all n locations
ccccccccccctttctcctcntgggatacacacgcttatattctggtaaattaagaacgtaacaaatggctcagttggtaacgctttgcgtttttgaatatttaaggcaatgatgaaaaaattgatttgtttaggagctaaacaatgacaacatcagctgtaatgatttgagcctttcaattgccattttcttatttttattgtttttcattttttgatcagaatttggtgatcattgcctcactttgcgtcgcgtggttcgaactttggctgatgcccttcagagttttgcaacgcgaacagcagagagaagtgtaaacaaagaataaattaatgaatcgagaattgaataaataaaaggatcactcagataatgccaaaacgaactgccgggattaaatgccaaattaatcactaattacataatttccgatcattattttttcgtttaagaatttccagaaaaatttcagcgaaattgaagcgaatggtgtcaatggaacggacgaagcggggcgaattgcggcacagtctttgatccgccaaattataaacaatgaggaggagcttttccaaacggcgatggaggccgattcaagcggtgaatgatgccaaagatttgtattcatttcgaaatgattttagacgaaaacgaagacagatgcaaaaatgtgagtcgaattggcagaatttcgcgtcgtaaatgcaaagaagcgattgcacgtgctcaaaatgtggcggaccatctgagcagcacagttcacgcgtggaaagtgctgcaaaagggcggcgcattggaagtaaaaaggcgaaattagcaaattaattaataattaatgagtggtaattaattggaaaaggtccgcttccacgacgagacgaacagttattatgtgaagacgaatttcgaacacaatgcccaaggtgggaagggattaaaggggattttgaactaattgagggggattgaaagcaataagcgatttgaaactaattgaggcggattgaaaacaataagcgattaattaagcgatttggaatgcgatttggaaggaaagccataaatggaacacgcagttgttggagtcacgaataattgcaggtaaagtgtggaaaaaggggaatggacatattttttcaatgaattaaattgggataataattttaaattatggcatcagcaaatgccaactttcataccgtatgcctttcagtgattgacagtaccacggacatcatcattagtgtgacgaaggccgccggcggcggatacattgcgccaaggcatttcattgatatcaggtggattttgaaaaattgtgcttaattaaaatggaataattacttatttaaattaaagtataattaataaaactttagacgctttgtcactgacgaggcgggcattgtttttgtgggtgtttatgtttcggtcgaatcggccgaggacacaattcggccgcaccaaccgccggagaaacggcgcggcggagggggcgggggactcgaagttcggttggcactttcgaatttgacaaatgctttaaagacagcttcaaaagcataagcattgttttttccctttcagcggtcgtaacggtgtgaatatgatccgaatttctcagctgggaccgaacaaatcccttttcgaatggattatgaacacggatttgcgagtacaaaaaacaaacaaacaaatgttgtttgattaatttctcacttttcagctctcaatccctcgcatgctgataagaagggtcccattattattgaattaattattttaattaattaaattatttttattaatttgcaatattttttcagacattgaccactttcttcgccgactattgtcgaatgattgcgaactttttacatgaaaatcccagcggaatcaaatgaagaatgtgactttcaaaatcaatggaaaaccaaaaaagtgatcgctcgcttctccaaacattggcatctgatcagtccgcgttggtttggaaaggcccaaaaatcattcctttgccattccttccaaatttttgatacagacaaattattttataaatggctatgtctcttttattgtgtatttcttttgtatcatattaaatttttgtacggaaaatattcgcttaaaatgccattgtttggcatttcgtcaataatttctgacaattgccggatggaatttgcttggccttggaaattgcgcttcctttttgccgttttcgcatcgctttcggttgcatcggtgcagcaaatagcaaatgccccagcagaagaaaatcaaattgacaaaagcgactaccaaagcgatgttcactaaaaaggtggaaatttaaattatactaaaaatagaaaataattatttgccaattaaatatgtcattaattaattgcttttgcattcgcttttgccaacctcggctcattcgttctgcttcttcgtcatttttttcggccgatgacaaagcaaacaaaaaagtgagaataaaacaattanatggaattaatactttggacaaaactttgtgttgcatttccttaaatattttaatattaaattgactncaaataatacaaattacaaatataaaaatctgaattaatgcc

SEQ ID NO: 10971 - DNA, 2547 bp, Heterodera glycines
  unsure (1)..(2547): unsure at all n locations
agtgctttgtgatcagtgaaagactcaaaaaatcaaaaaaagattgatcagagtgaactaatagtgaatttaatattttgattttccagtcggcttttgctcgtttncaagcgagactgtaaccgagcgaattgccatcccggctttttgcctgttgggccgttgtactgctggctgaacaatcgactgaataatgcctcctttaccgttacacgtttatttgctgattttgttggctgttctttgatttcttatgcaattgatttactctttttttgtctttattaaatgtaaatgactacggtagtaaattcaacaacagttttaacatttattacaaaatgattaaactaggtaattttattcactagctacgctgtatacgatatttgaccccgagagtcgaaacatagactcaaaaaacacgggaattgctcaaaatccagccctactgataaggtgttagttaacaaattcaaatatgtcatgttggccttttgcctttttggttgtggcaaatggaaatggaaggatcgcatcactcattcattctcttgtcatttgtcagttgttgcatttccatgtgtaaatatttaaaccgagttttgttttgtttttctgtgtttctctttgcctttgctaatttctgttcaatttcagcagcagtcaaacggcgcgtcggtcccatgagctgtttgttgctcatgtccaaattcgcagcgagtaaactgcagctgttgcgcaacgatgtgctctttggggcccgtatttgtttcatttgcttcctctggtggacttcaagttcgggttggtcttcttctgccggtgtttcacggaatggacgagaaccgttttcagaattcaggtctcagcattgtcaacaagttgacccttcaggtggccattatttctaaatgtttaacatacgcttttaatttttcaaaattaaaaccgtaatgaatgaaaaacatgtccttctttggtttgttttccctattaaatcctaccattaattggtttggctttaattcccctcccctccattgcgtgtccctccaattttaaatttttcctccctccattttatccgtttttctctaatcccccactttagaggtatcccttccctctgaccattgctctgtcctcctgccttaacaatgtgctctattccctgcccctactccgctttttgtccatctcttccgtctccgtgcccaccgattatttgcttcgcattgttttgcccatttccgtcggtcgcgcggtggccaccgtcagcgcatattttgcgctgtggaaaatcagtgtcagctacacgcagacaagtcaaattgggaagggatttgtaaaagcagaaaaatgttgggggtttgggattagcctcttttttgcagccttcacggaccttaaaaaattacacagccaaaaatatgacacaaaaaaataacacaattaaaacaaaagttattttgagtacgtagctcatcttaaaaaggctagcactttcgcaaaatcaggcgcccaaaatcatattttttccccaactaggccgggccttgatttttatgtgacccaattgggcaaatttccaaattttaacagactttgataagccattaaatgcgctttttgctgtctttttatctgtccattttgccctttcagttaaatccacaatgcctttgttcactgtgctcatttctcgtcttttgcttggcgaacgtcagcccatgcgaatttacttgtctttgttgcccattatcacaggtgttttttcactggttttcactaaattttcaattctcatttatttttaatttttcggtgtttttattacgactgcgaccgaattgcaattcgattccttcggcctttgcttctcattactttcgacgggaattcttgcttttttgaatgttcttgccaaaaaggtgggcttaagattaccattttcaacagattttagagagaagtcaattcgaacaaagttcgaatgctcggtttgggaggggaacatagaaaccctctacgattttaaattgctttttccttcccatcccacggctttgtaattttaattttgcaggtgctcgatgagacgcgaatgcatccgataaatttgctctctctgaactcccaattggcttctctgctgctgttccccttttggctgttcaccgatgctctcaaaatgtggtcgaacattcattcgacaaatgttcgtcgtgtaacatttcattcattccaatggattcattttgtgcttttgtttcagcgacacaatcagtcgcccgacccgcgctttctctttatgcttctcctttccggcctttgctccttttctcaaagtgcttgcgcatttgttttgatacatcaggtggatggacgcacaaaaggacgacaaatgcatttcattagagataaaatttttttaaattttccttgtatggcaatcattttaaatagagtagagcgggaccgggaattttgggcttaaccgggaccttttcaggttgaaaaaccggganatttttggcggggaaa

SEQ ID NO: 10972 - DNA, 1545 bp, Heterodera glycines
ccaccacctcgctcctccctcctcgtcttcatcttactccttctgcctcatcctcctccaccagctcactcttccctcatcctcctccaccacctcactcctccctcatcctcctccaccgcctcactcctccctcatcctcctctctctactacctcactcctactcctcctcaatcctcctcaatcctcctcaatcatccttctcctcctcatcctcctcccacctcctctttcatctatcttactcgtttattttatcgctactccatccactataaaaaataattaattaattattaatgaattataaatttcaaatattttttttaggaactttatcctcgttttttaaaaaacttttttttaaaattttttttattagattattttttaacaatcaattctcaatttccattctttgttctttcgttgtttgttgacgagttgtgttctgcgcacccatcattccacaacttaaattaaatttaaaaaaaaataccctaaataaattagcaagaaaaaaaaaataataataaataaatgtaaataggcggataagccctatgcttaaattactcgcctcttagtttaaatttggttaacacacctaaaactcccaacctcccaaagagcggttgtggaagtgcaaccacccgtcgtaccacccctcccccgccctatcatcctccttctcctcctggcaatcgtaatagggcggaggagggaagtaaggcggcggcgatgaaggcattggcaacagaaaaggaagaggcatgacaggaggggccagatagtctaattttagaaaaaaaataattaccattaacattccaaaaaaatgtcattaaaatttaaaaaaaaaaattgcatttatatttgaattaaggatgataatttaattaatttcaaaaacaaaagaacatttattgaaatggaaaaatgggccaagaaatgaacaggaatgggtacagttgtggtaattaaatgacttaaaacacaaagtttaattaaaaaaggcatttaattattaaaaaaaataaaataatctttcattaaaagtactcgttaaatgaacccaaaaaaatagtttagtatcccgaaaaattaggtaagaaaaatgttatctaatgttctaaaaatgggagttgaaataattcgaaaaaaattatttaaacaaaaattaattaattaattttaaaaaagggcattcatttattgaattagtaatttagtgaatcaaaaaaagaccatttaaagtatatagaatgttaattaaagagcctaaaaagacacaatttaataaagaacgtcatttaattattttttaaaaatattcaagaacaataatccatttaccagtcaaaaaaaaacattttaatacccaaaataatccatttaccagtcaaaaaaaacatttcgagccctaaaaaaatggacaaaagtggtcaataaataatcatttaattattttttgaaaaatcttttcaaaaatttaccaaaagtggtcatgggcattagcaaatccactcccgcctcctcctcc

SEQ ID NO: 10973 - DNA, 2346 bp, Heterodera glycines
  unsure (1)..(2346): unsure at all n locations
gcaaacgttccacttaacataccggaaggaagagggaggggattaacaacacaaggaaggggggttaaaggccgctaatagcgggcgtaagcatttggggggggggggaaagcgattaaggtactggggagagtactgtatccattgatcagcccgtccgctctctctctcgcgcattctctctctctctcattctttgcaataagtttgggatttatggatcgggagagggagaggaagggatccccaaacaggtcaataggtttgggctcatgattggatgaccaatcaaatcatcgaaatcaatcgataatttgattgggaatattatctacttgccaggcgggtgccactcattttgacaattaaattaaccggggaatacgggaatgtgctccatatccgtttgttgttgtaccccacctttaactggcccagtgaattagggagttttgagaggggatttgccatcgccgtttctacgtaatatcgccccggcaattacacttaacgacagctgcgtcatgatgtgtatagcatgagtgacacacttcctgatctaaggtgcaattcagaaggcgtgtggcagcggatttggtcgggcaccataagtgagtgaaccagtccggggctaaggccgcgtgggtgctgtttgccacaaaattattccccaaaagcgggagcggcggaagcccactgggggaaaaagtgattgataagttagcagtgggccaatggtgggtgattcccggggacaatttgacttcttcggattgggacaagccttcgcgttcaagagtcaatcccaaccgtaaacgaaactgccaagtgggacatttaaacaactcgtagacgaaaggtgaggtgggtgcgacaaatatgcggtaaaacaagcacgcatattccggagaaagacaccccctacggatgaacccggatgcctccctacaataatttaatcccggaaaatctccccctaactcgggtaccgaatgaggggtatgaaagacaagctctactcgttggccaactggcagcaacgttagagaagtgacgctgtcaaagtgacacgtcgtcccaccataatcggtggtgcactcttctgtgccggcagtgaccgataccacttcaagcccagcatttactaccgtaacccaaaaaatggcaacaaaaaacgcaattattggtggggccaaggcgtatcccaaacggctcagacgtcggggtctgggcgactcattcccttggcccaagctacctcccattaattggccctggtgaataaaatttcactttcttcgtccgatccttcctctcttacagtgggtccacgtctccatcttacggtagactcagggatttctcgccgagtattagccctgaagaaattggcaaaaaagcggctcggtggacatcaaaaccggcccgccttagtacccaacaaacacaaatgagaaataagaccgcaattgccacggcaagtgttccgaggacaaaaggtaataagaagggagcacagtgcgggttaaggatctgttcccaacaaaaattacacttaattaaattacacccctccaccgggtcacattgcactaatgaggaaactcgctcccccgctaaagaataggtaacatggcattcataaccgctagccagcaaatcaggtgggagtgggagtaaataaggggtcgagtgtcctctgctgctgcatacaccctcacaacagacaagtccattttcagcctgggggttcaaaaacacccaaaccccttcttcggcacacgaaaggacacgtgccgcggaatgtactccgcttgcccaaaacaacaccaaagccaaaatagtcatgagcggggggcgaagtgcccacttaaaactggatggtttcaattttctcccttcgggggcctgcccaattggtggcggagggcggtcagcccatttgaattgccccggggccgttttcctcccctttttggcccttaaatccgttactctttcgcctatcccttctttgtcggtgatcgtgggcgggggtgggacttcattccattctgcggtgccttctaacggtaccaattgattaatcggccgttcccattctctccccgttcccagtaaaattttagcgctccgtggcttctccgcgggaaacagagcgaggattcgccccaagggccagtgattcctcgggaattcctcctgttccacaagtacaacatccccaattttgggaggaccaggagcggagatccttgngccggaatgggtgtcctgggtgcggcccctcaaattaaaaggtactcccggctccaaaccttcccaaaacgccggagggactcatta

SEQ ID NO: 10974 - DNA, 2465 bp, Heterodera glycines
  unsure (1)..(2465): unsure at all n locations
aaattcacaaatggatgataaaaatttataaaagagaaaagccggatgttttttttaaattaattatttttttattaaaattttatcccatttattccgacttttgcgtagcaattcggctgacacgaatggttgatgaaccgcgcgaaattgccctttttggtggcgtcaattacctgcgaaaaaaaatgtgaaaatagattagaattaaaacacttttaagcttcaaactgcaaatgaattgaaagatcgtaatattaaagcgaaagcgtaagaaattaatttttcatgaaaaattccaaaatatttgatttggaattaaatttttaaaatttgacaaaaatttgtaagttccgattcaacacaaaagtagacgtacattgtggtcgtcaatgcggaacaggtaggaggagccgatgccctgccgctcgtaggccaactcgcgcacgttggccacctctggccggattttgtcgcccacatactccacgatcatttcgtcctgcgcaatcggttccagcgcgaacaggccccagccgtggatgcgcgagcgggcaaacttgatcatcttggagcggtactgaaaacgggaggaaattatggaatgtttttaaggaatcttttaaaattcatatttttaacgcctcccgagcccccacccatttatttattgttgtgcagaaaattcaacagatactgtaatcatgatgactgtacaagggtgttaaaatttcacgtgaaaaaagcgatgagtgcaaataattttttgaagaccgaaagagaggaaaaaaaacaaatcacgaaaaaataatagagggatgcgacagcaatacaataaaaaaaaaaatttaggatgagggcacatcattttcgaattttgatgccaattttacaggagagggaaaggaatgtttgaatagggatttaatccggaattttttgcaaaatatagtggcacaccattttcgaagtatgattccaatttaacaaaaaaaaaagattaattcatgatctgaatacctaagtgggaaaaaaagattaaattaagccatgtgcatgaatgagccaaatacgtaaacaagtgctgaacagacaaacaaagttaattaatacgtacgaagaacaaggacaaatggaaaaacattttgaagcaaagcaaaacaacaattttagagaaaaaataaataaatttgaatttaagggataaaagaaaaacgggagggtgataagttagtagacagacacaataataacaaaaataaattggacaaccacaaaagaatctaaaagaaaatggaaaagccaaaagttttaacaaaaaacaacaacaaaatttttgcagatttttgggttaaactttaaaaaattcaaggtacttttagcgtttggggtaggcggattttttttttgcttcctcagaaaaccataaaaaattgaatcgcccacatcccccaacagcaaaagtgccaaatagtaatgaaaaatgatggatggcacataaaaaagcaaaaagcgaaaaaaaagaagcaacaaaaaagcggggacaacaaacaacaaatagccaggccatgttgtccatgacaccaccaccagacgcaccttcgattgcgccgtgctcctcgcagacgtggtggacaacaatgatgacgatgtgccaccagccggttgaacagtgccatcacggcactgcgacgacggaggcggtgaaacaaagttaccaccacgacaatcagcaccaacagcatggttaattgtaacggaggcattagccgccaaagcggaggcggcggcggtaacaacaaagggttttttatgcgatggcagcaacatgggacagcgagtcttaagcattacaccaccaccaccaccaccaaagccataaccgccagcaacaccaccacaaattgccggcaacatgaaaggcaatgatgatgatgaggacgacgaggataaaggcacgccattcgtctcttcttcctcctcctcttcttcttcttcctccatgcctgccactgggttcttcttcctcttcttcggcgcggtcaccatttccttttcctctcctcctcttccatcaccatcatcatcatgattatcatccatcatcatggtcaccttgagctggttggcacgggcaaacagcgtcgtggtcgtcaaggaggaggtggacgcggcggcaacggtgtcgccaccaccagcagcaacggtgccatcggcgcctatttccatgccattggtgtttgttgttgttgctgcggtggaggcggacgagggcgacgcggttgatgaaacggtgccgcacgcagcgggcggcccgggcacaaccccacaggcggctgcagcagcagcagcagcggcggcagccaacgaccgagcaatggcacgctcgctcttncacgcctggctgacatggcgtgccaccgtctcgtccttttttggggggcaaatttgatttggttgatttt

SEQ ID NO: 10975 - DNA, 1486 bp, Heterodera glycines
tggagttccgtcagtcggtccaagaatttttttttgttagtaaattttaatgctaattctgaggtggggaagttaatttttcctaccaatcaaaaaaaaatttttttttagtttttcaaggcaacggtggacgcagaatggatgtggtggatgcccgacccttttttctattgaccaccgacttgtgccagcagttgctccttctccaggtccctcttgcgcgtgtagtgtccctcggtccgggcactgccggtccggttcggcatgacgccctccagctccgcgtccacgtagtagtagatggagcccggccgtctggcatccgtgtacggtttgggctggaaaaacaaacaaaaaaaatattaattttaagtaaataattgaaaagggaatgcatttttggaggagttaagaggaaaacaagcgcttattgtgggagttgaacggtcagttaaaaattggttttgggcgatgggttcaagtccacctggctgcaaatttttttaaaatttgattcaagaaagaaattagtgattacaacggtggggttaatcataaattgatcacatttttttaaaaattcttttaattaaaaaactctaaaaataaaattttccaggaagaatgtcgtatttgctagccaaacaagtgaattgagaaggaaatgcttataatttatataaaatatagagaaagtgaaatgccacaactcacaaacacattcggcgtctcgcaaatgccctccggctccacccagacaaacggctgctgcgcctgcacatccgccgcatcggcacacggcattcgacgcacattttggaaggccgactcgttgatgtccgcacacaaatcggccaggtccaagtccttgaatgccatcttcaggtactcaatttcctccagctcaagaccgtcctggaggagggggaatgattttagacataaaattaaaaaaaaatttccaaggctttaacaacttggattagagaaattttatgatggattggacaaaaacagggatgggccaaaattttttataattgactgaatttttgcaaaaaaacatttttaatatgggggaagcaacttgttaaaaattatagttttttacataaaaaaatctttgaagaaatattttttatttagattattttcgaaaaaaacctcaaaaaactcaatgaaatatagaaaacataaaatttttattttttaaattcgtcatgacggaagtcaaattgttattttgaaaaaatttttgtcaaattaaaaaattcttcgataaaacaaatttgggtgggcgttttttttcttcaaaattacaacatatttcattttgtttacccgcatgtactcgctcagcatcgcgtcctcctctgctggcgaccgcttggcccactgcttgacggagcgcagttccgcctcgcggagacgggccagcaacaggtaaagaccgcttccaacgcagcggtggcactgcaatgcacaa

SEQ ID NO: 10976 - DNA, 1183 bp, Heterodera glycines
tgattctccataaatatgaagaaaatcgctagaaaattaaaaaacatagtttttgaaattttcttcgaggaaaccgaggggaggggcggggggggggggaaacgaactgctccctgcttgtccaccttcaccttcatcatcctgatggtcatcgtcggcgccaacactggtgatggtggtgacgcgacgacgtcgacaactacgacgcactttgttatctccgtcggcggatggacgacgcccagcaattgaggaggacgccgatgcgaccgatgacacggacaccgacctgtcactgctgctaccgctgctgctggtggctgaggtgacactgtccctcctccgtcttcgggacctgtaccgatgacgggaagatgatgatgatgaactgcttgaagttgttgtggaagttgatgacgacctgctgccgccgctggtgctgtgactgcttcgtcgtgatgaacttgccatggatgtttcgcgcagctttgttcggcgctgactgctgccaccggtgatggtggcggcataacgatggtgaccgcttcgccgactgtcgtcgtcggtgtccatttgctggtcacttccgctccgtgtccgtcgccgcctttcatcgtcagcctcgagacgtcgcctcttcttaaacgtgacaaaaaaaaaaattggcattttagcgatattttaggggtttttcacccaattgttcctccccggcccagtcgaatttaaagatacacccatttttcaaggcgcgctacttcgtcagctatccacaattttttttttaatttcaagggacagagaagagagaaaaaaatccaaaatattttatgtaaatgcttttattcaaatttttcagtgccggggacaaatattagccgttttcgaccaaaaaaatgtcaatttttttttaccattttttgataatttttattttgatttctggcccgtggccatgtgggcctgcgattaacgtaattaaacccacagacataggtatataacaaacagtttgaccagagttcccaagtgtcctttttttaagattgtcgtttttttcacaaactttttaaatttttgtgcttaatgatttattttgctgatataaatgctaccaaaattactaattctcaaaaaaaatttcccggcggcgcctatcggcaccgccggccccccaaatctt

SEQ ID NO: 10977 - DNA, 2936 bp, Heterodera glycines
ccttaggctttctacataaaacataaaagaatgagaggggcccggtcctccccactgcgcctcttcgtcctcctttccttcatctttctctcgcgcttctccgtgcgggaacagttcgtcggcgagctctgaaagcgtccgcggcctggagcagtgacttgcggattttgtagatagcttcctccgcgcgttccagtggcatccctttccgaaacggcgcgtatgtcttcctcacggggctcctctccgcgctgcgtgtcgtaaactgcggcactggcgctggagtcggtcttcttttaagcatttcgcgatttaatccctcgggtggaatacagggacggtcatttactgtcccgacggccgatttgagcatgtttgtgaacaagcgcttcccgctcattcccaagttcctttctctgtcccctctttcttctcttcctcttggtttcgacgctgagtccaattcgctttggcactcaaagcgcgccacggcgctggaatagaaaggcctgcgctctcttggcggctccggggggttctcaaagcgctccttctcctttcccaactcctttgcctcttcttctcccatttcttctctgggtttccctgccagttttgccgtcaattcctcaattttgtttcggatttgcctttgcttggcctcctcttcgacttcttttacaatatccgtgatctctcggcgcgctttttcctcggcatccttctggcttcgctcttccttttctgcttctgttaagcgccttttctttattcccctggcgattattgtgtcattttcttctctttctgccttctttttcggttttgtcttcgcttccttttctttctttcgcttttcttcctcctctcttttgactttctcctccctttccttctgcgcttttgcttcttcggcttccttttgcgtcttttctttcgcttcttccgcttctttctgtgatttttctttcgcttcttccgcttccttctgcgccttcttttccgcttccttccgcgcttcctcttccaattccttcctcgcttccgtttctgcttctttccttatttaggagtaaatttccgactttcctaacttcgaagtcatcaaaagaaaaataaggacaaaagtcatccaaagaaaaataaggagagcagacatatcattaaattgataccattttgacatcgtggaggcaaatgttaatgtagcgcagggaaaattttcaggagtaaatttccgactttcctaacttcgaagtcatcaaaagaaaaataaggacaaaagtcatccaaagaaaaataaggagagcagacatatcattaaattgataccattttgacatcgtggaggcaaatgttagtgtagcgcagggaaaattttcaggagtaaatttccgactttcctaacttcgaagtcatcaaaagaaaaataaggacaaaagtcatccaaagaaaaataaggagagcagacatatcattaaattgataccattttgacatcgtggaggcaaatgttaatgtagcgcagggaaaattttcaggagtaaatttccgactttcctaacttcgaagtcatcaaaagaaaaataggacaaaagtcatccaaagaaaaataaggagagcagacatatcattaaattgataccattttgacatcgtggaggcaaatgttaatgtagcgcagggaaaattttcaggagtaaatttccgactttcctaacttcgaagtcatcaaaagaaaaataggacaaaagtcatccaaagaaaaataaggagagcagacatatcattaaattgataccattttgacatcgtggaggcaaatgttaatgtagcgcagggaaaattttcaggagtaaatttccgactttcctaacttcgaagtcatcaaaagaaaaataaggacaaaagtcatccaaagaaaaataaggagagcagacatatcattaaattgataccattttgacatcgtggaggcaaatgttaatgtagcgcaggggaaattcgcgtgcgctcacactgggagctctcccgaacggagtgattggcctcaccgaagaatggttcatggacaaacttcggctgctcgtctcctactggacaacggcatgctgcatttacgtcacattcatttttgggcgcgatgtcctgatacccttggtatgggtctacttaatggggcccgtcatcgttaccatccgcaatttggtgacgggaaatcagtggacgcagcggaacagagctactcgaggcacacggcgagcaccggcaatttcaaggattgaagcaattgagctggtaccgccttcaatgccccaggaaatgagagcgaacgaaacgtcaagttcacatcaagaggaccccgagccgtcaccgttggtgatggagctgaaacgacaaatggtcgcattccgttcgaagcgacgttttcaaagccgtgggaatgtcgcggctgaacgacagccgcgaatgtccgttgagcggacaaatgaggagaacggggaggagtgaatgaagttgcgaacaaggagtgataaatgaatggaaagatgggaaaaatagggcaaacgggaaatgatgaagggaagggaggacaaaaagggggcgaagggagggacggcagcaggcgagcacgtgaatgaggggaaggaaagcgataaaaagcggaggtggcgccttctccgcatgaaggacgcccgaggcagtgcaaaaacgccgatcggaccatcgcggtgcgacgggcgaaacaacacatcaccaaggcggacagccgatgaaaatcggcgatcatttgatggaaaattgcgaatttgcgggagagcaaattcgcccggacccttcccctcccgcctttctccggtgatgtgcccgcctcccgcgactcacccccctttttgggcccccattgtgccatttttcctttgaatttccccctc

SEQ ID NO: 10978 - DNA, 1641 bp, Heterodera glycines
ccaagctaattaaaaaataaaagcatacggttaatttgaataattagcttatttaagccttgcgcgcgtcaacaacactcattaagcaaaagcaacaaatcaagaatgggaaaacgtacattgtctcaagaacatgtcgatcaaaagccaaaaatagcattttaccaaaacttgaattcgactcttgtgtcttcgagtgctggtacataatcagtgatgattggacttgcttgaatgatttattttttttttcattcagttgagcattttgaacaatcattcagttatgaagggttagtgcaaccagcgaatttcgatgacatatgttcaacttcaaaaaatcaccatggaagctttggctctgccggatgcactccggtgaagaaaatgcattgggatgagcacaacaacgcagcagaggaagaccaatgctttggcccaatggttgaatttggcggttgcgaggcgaaggaaacgccggagaaagttgaactgaacgaaagcagcgaaacgttggtggacgatttgaaccaacagctcaaagagttgaaggaaaagctgacgagtgcaaacgaaaaacttgtgacggttgcaaatcaaatggacaagacattggacgagtcattcgttggaatggagcagcaaaacgaatgggccaacaaagaaagcgcaaatggcacgcgggaaaagacaacgaccaacaaaggactaaagggcaaatccacacaaacaatgggctcctggtccatgggcttcggtgctccttttggaaaagacaattcagcagttccgaggatgtcttcagatttggaatggttggttttgtgtgggatttacacttatattttagttttttttcacacacctttctaaatattttacaataacaccaaacaaataacgcacttttttgtttatgtcgaaatttcaaactttttatttagaagaatggagatatttggatgtttttaatcggttgactgaattcatttgtctaaaaattaagcaaaatgcggatggagtgcagggagctgatgagaaagcacatcgaaacgctcagagagcatatgaaagtgcgcgtgtttttgctgcacgccaaaaggaagggaatggcagcggctgagaagaaaaagtgccagacaaaattcaaagcattaatggacgaatttgacgaagccaaacggaagataaaggcggactttaagcggggaaatgcggacaaagtgggaaatcgaagttaaatttaaattttaccattcaaattgagggaatgatggcgaagcattacgtggaaattggccaattgcagagggagacgcgaattttgcaagcgaaactccagcaaattgtcaacgggaaaaacgctgtcgcaaatgcgtcgcgattgtacgttgtttttacgttttatagacttatttgcaagaaataaaagctttcacatggagctgaacaaaatgtcgccggaaaatttttttattttaaagggggggatttgctgaccggcccttacaatatatataattctgttgtccattgttgttgggaaaaatggatttgtttagttcttccgtgacaattcaccagcaattcgacaatttgttcagcttcgtaaacatggacaaacgcactgattttgtggaa

SEQ ID NO: 10979 - DNA, 3914 bp, Heterodera glycines
  unsure (1)..(3914): unsure at all n locations
attggacttgcttgaatgatttattttttttttcattcagttgagcattttgaacaatcattcagttatgaagggttagtgcaaccagcgaatttcgatgacatatgttcaacttcaaaaaatcaccatggaagctttggctctgccggatgcactccggtgaagaaaatgcattgggatgagcacaacaacgcagcagaggaagaccaatgctttggcccaatggttgaatttggcggttgcgaggcgaaggaaacgccggagaaagttgaactgaacgaaagcagcgaaacgttggtggacgatttgaaccaacagctcaaagagttgaaggaaaagctgacgagtgcaaacgaaaaacttgtgacggttgcaaatcaaatggacaagacattggacgagtcattcgttggaatggagcagcaaaacgaatgggccaacaaagaaagcgcaaatggcacgcgggaaaagacaacgaccaacaaaggactaaagggcaaatccacacaaacaatgggttcctggtccatgggcttcggtgctccttttggaaaagacaattcagcagttccgaagatgtcttcagatttggaatggttggttttgtgtgggatttacacttatattttagtttgttttcacacacctttctaaatattttaacaccaaacaaataacgcacttttttgtttatgtcgaaatttcaaactttttatttagaaggatggagatatttggatgtttttaatcggttgactgaattcatttgtctaaaaattaagcaaaatgcggatggagtgcagggagctgatgagaaagcacatcgaaacgctccgagagcatatgaaagtgcgcgtgtttttgctgcacgccaaaaggaagggaatggcagcggctgagaagaaaaagtgccagacgaaattcaaagcattaatggacgaatttgacgaagctaaacggaagataaaggcggactttaagcggggaaatgcggacaaagtgggaaatcgaagttaaatttaaattttaccattcaaattgagggaatgatggcgaatcattacgtggaaattggccaattgcagagggaaacgcgaattttgcaagcgaaactccagcaaattgtcaacgggaaaaacgctgtcgcaaatgcgtcgcgattgtacgttgtttttacgttttatagacttatttgcaagaaataaaagctttcgcatggagctgaacaaaatgtcgccggaaaatttttttattttaaaggaggggatttgctgaccggcccttacaatatatataattctgttgtccattgttgttgggaaaaatggatttgtttagttcttccgtgacaattcaccagcaattcgacaatttgttcaacttcgtaaacatggacaaacgcactgattttgtggaagttcaaaaaacggacgggagagattcgttggcaaacttttcatcgtttcaagacggttttgtttcttttaatttgtttacaaaaaaactgctattggattttttggcgaattatttattttcccatggtctgtctgatgctttaaaactgtaaattttagacccattgaatccacaaatgccacagccattccaagcgacgatctctccacaaattccgccgcttaatttcgaccaactttctgtcaatgacattgaatatgatgacaatgatggcggcggggaaggcttacttaacaaaacgtttactctccccgaagaacagaatgacaatgttcatgaagaggaggcggagaatgaaaatgggagcaacgcggacgagggaatttggcaggaacaggtgggaaaggaggggagctcaacattcgcctctatttctgtatcgaaacggggaaaaattgaaacggggtatataaccggggattagctttttctttgaaaattatataaaatataaagtaaatgttttgaaaaaactttaatccattcacagatagttgtgtccaatctgtcgacgagccattcagaagtcggaaatgtcactcagaacagtgacaaaattagcaatgaagttcaaatggtcgaatgccatgccgatggtcgttatttcaataaaaaaacagttgtttgggtcttaaatctttacgtatttaaggcgttgaacactcaaaggaaggctgtggcgacaatgtgagcttttctgaactgaccagcatcgccggggggaacaccagcgacgacattacctcaatcccttacccgagtgaagcggacaaaagggcgaataaggacgaagacaatgttgngaatgacgacaaagcaaatggagaggaacagcagggattggtctcctcccaaaacagtggttcaaccccaacctcgtcacgtcgtgtcaaatacaaaatttgtgcggaagaaagagggacaaaagtggaagtgtcggctcacggacgccaaatggacgtggaacggacgcattgcgtagttcaacagcagcaaccaattgaggcgattgaaagaagcaaaactggccaaaatgaaatccaaccgatggacgacggatcggccgacgatgacgagccgagcgaacgtaccgcagcggaggattcaacccaatcgagggaggtggccgactcagtgttcgaagagacaacgcaaaattcaaattcatcgccgaccaacaaaataggggagagtggtggaccaacaaacacgggtgaatgcacaccaaatgcacaatctgtgcatggcaaacgacagagaggggaggaggaggaagaagaggtggaagtgatctcggcaaaaagtttagttcgaagttcggctttaacgcagaggacattggcggaggtcgagagtatccccgaagaggtagggggggggggtggcgaaataacgagggcaaaagaactgtctcaggaaattaacttacaatcagtgcaatttttcatagaatgggtgctctgcttcaatttttgtattgatttaatctatattattgctagctttcaatggcttcacattcggcgaaatccttgccaaactcctccgtttccaccatgtcatctgggaaggggatggtggtcgccgtggaacccgtcgctgaacaccagcaacaacaacagacggacgattcgattgcggaagaagtgttttcggaggacatcgtttccaccttcaaaccgtcggagaagtcgctgcactccattctgtcattgcgtagcaattcgatgagcaccagtgcgcgggacagcatgggcaaactgaggagggactcggccagcgaagcgctgctcaaactgagaacgatgaattgcgtgccggagctgagaagtcctcgcgagtccaaaagtccacccaagtaaagccattacatgttttcagcagtcccaatccaaaaatttacagacccctgaggtcgccacgtggcattgaccgttttatggccaaattcccgcacaactcttcccgagaggccagtttcagtgaagagctgagtgtcaagggagaaatgctggaggaattgccgaatgcgagtcaaattgggatggtaatttttgggcaatcggtcccactcactttacccttgaattttttagcttttcgatgttagtggagcgtctgttgaaggaactttgtccaaattggacagcactgccgactcaaaacgtggacagtcggacatttttttgggcacggacaaacgcacggattccgtcgaatccaataaaatggagagaggcaattcgttgggcggtttcggtgtgccggaaggttaagtcttttggcgaaataaatcaaaaacggttctgtttgagtttgttcggctggtgtcaaggcacgggcagagaagacaagccatgttcagttggatactaacagaattctgttggcacaataggctacgaccacctcaacatttggccgactcaggaaat

SEQ ID NO: 10980 - DNA, 1260 bp, Heterodera glycines
ttctctttcatatagtcgttttctgtcctccttctctttctctctacttcctcttttatttcctttgtcttaatcatctataaatgtctaaccaattctatttcaatttattcttttcttctcttccctctgagaatgttttcagcataagaaagaggatgttgtttttgctcttcccgttttttgggtcaacattttgccgaaaaaacataaaaaatgtaaacagtgaaggatagagaatggtaatttacatatttttagttatcctattattcattggcatttgttcttcagaaacataaatatttccaaacgaaatttaaaattataacagtattttaagatagcaaactaaaaaatgtcaatttcgaacaattcaatgaattgtggagatgatttcacaccagcagcagaaaatggaggtaaatgatgaaaaaggggaaaatatctcagtgaaattattttaaatttaaagaatattataaaaattttagaagtgaatggcgattcaattagtttggacaatgatggacaatttgatggaaatagtgaatcgattgctgatcaacaacagcttaaggtgggctaaaaaaacaaaaaacagagtaaaatgggataataatgaatttatatggtacaaaagtgattttgttaattgaaattcaggaattccgtgaaaagtttgccaaaatggaaatggaattgaaaatggccaaattggaactcgaaaatgtgagttttggtataaaaaatttttgagtaaaaataaatctcaaaaaattaaaaaataaaattatgtttagaaggcacttgaacaaaagttaaagcaccaggaaatgatgggtgaacagaaggcattgaaggaaaaagtgaccaaaattgaacaggaaaaggagaaaaacggtaaaagaaaataagtaaagaaattggtaaattttaaggaattaatttaattgaataagttgataaaatactggaatttattaaatcatcattaaaaactttcatcagcgaaagcattctctccactccaacgtaaaatattttgtttaaaataaaaatttgaaaacccaagaatttaattttttaagcaattattccaaatctgagcacatccgaggaaatgagtgttctgattgccagaattgctgagctgtatcgagcgaaaacaattgaagcatctgttgcaagcagctctgatttatttggacaagtcggaaacggtaggaaattaggcgatacagtatcaaaatatactgt

SEQ ID NO: 10981 - DNA, 3263 bp, Heterodera glycines
  unsure (1)..(3263): unsure at all n locations
ttttttctacaacttttttaatagttaaaatcataagcaaaaatcatttttaaaaatttatttccaaatntaaaaatcaataaaacgcttttttgaggcgctctttttccaaaaaaactttttgggaagagggggcaggcggcgccgggaaaacttttgaaaatttgattaaaatttgttaacagattttcactaaaaaatgatcaaattttgcgattttgggccattttctaataggagttttgggggcgcggcggtgccgataggcgccgccgggaaaaaaattggaaattttgatcatttataaacaggttttcactgaaaattagccaatttataggtaaaattttgaaaaattttatgggaatttaatccaattcttaggggtgtaaaagtcgcatttcgcgccaaaaagcgaaatgcgaaaagcgaaacctaagcacatccctgtactttacttcaaatattgtttaatataatctgttctattttaagtagggtaggtcgggaccgggactttttggctggaaaaaccggaaaaaccaggactttccttataaatttctaaaaagtattctaattgatgggtcataattttgcccaaattacttttttgccgtcaaatgccagcccataaatagaggggagattcagcgcaaaagatcaaatgttcattcattcatttacatgcgaagatgaattttatttccaattttcatattttttttatttaaaaattttaatttgtagccagtccaattaataccttattaattcgaaaaatgtcttcaaattttatcggttcgccaaattgctttttccgtccaacagctgatcagggtaagagaaataattaaaaaaagaattacgaaaaaaggaaattattttatcttttttaaataaaataaaataaaaatttatcaccattagcagcagcagcagaagaagtggacaagtatgaagtgttcagttggcacggagatttgagcgaccaattggcagcacaatttttggtcagtgatcagcagctgttgaaggtgggacatttcagaacggacaaatgagcacagaggggggagcacaaatgatcacagtgggggggggggagggggagagaggccggacggatcagtcacggacaaagggccgaccaattccgagagcaatcaagagacattttgccaaaaatcatgcaattaatgagtgaaggaaattggaaattatttagtggactgaaaaactttttttatttaaggaatgccgagaaaaacttgccagtgccgaattgagagaaacgaaattgctgtgcaaaaacggggaattgaatgcagagaatgtaagaaaaattaattattaaaaaaaaatttaaaaaatgacgaaataactgagagcgaacgcgcataaaacagaaactttcaaattttgtaagaaaattcagaaggcgcttaaagcagagttggagaaacaaaagctgatgtcggaaaacagtgaattgaaggcgaaagttgataagatggaccaggaaaagcagcagcaattggacaaaaaatacggtagagacaatttaaaaaaataaataatttttattaccgtactcggacagtactgtatgcttcaaaattatttcagtttctgtcgatgtgttcaattcattggtggagcgaatcaaacaattggaaaatcggcagaacaaagaggagggcagaaagggtaaataataaatttgaaataaataattaacggaccgaaattttgcatactttgaaaaggcgaaaaaattttaacggaccataagcttttacaattttgatcagttacaaattttaaatgaacatatttaattagctgaccaatgccaattatttttaattttcattttctattattcaattggatacattttttagcagaggaaaagcagcagaaggaaagtgttggtcaacagaacaaaaacaccgaacagaaattggatggaaaatatgccgtggtggacaaaaacaatgttttgggtgggcacaattggcaaattatttaaaattaaaaattggcgttataaaaaaaatgcattttttgagaggggacaaaaccctcgtattatatcgggattttatacatatttggtacatatttcggacttttttcttacatattttcattttttttacatatttgaggattttttacggaaatttttggaaattctcaaaaaaaaaatccaaaaatttcggcaaatttttcatttttttacatagctattctgagaatttttgaaaatttttagaaatttcttgtgaaaaaattaaaaaatctttttttaaatgtacccctccaaaaataatttttcaaatgttaaaaggtgattttaaacattttggtcatttttatggcattttgtgcctatttaacactttatgaaaaaaaattttccaaaaaataacaatttaaaaaaattttatttacatattttcgtacatattttgggtttttatacatatttcttacatatttcgggatttttttttacatatttatgtacatatatgaccactttttgtacatattttttacagccctaattataaatatttaggtgttaaaaaattaatttttctttttaaaatgtatttattgctaatttagttgctttagtgacgtcatcgggcgaccattcgccgccggcggttgtctcagcgaaagttgcaaaggtgggaaggaaaccttaattatttcacaaatgccatttaatttcaggaagtgcctaattcgcagcaacaaaatggctgggatgccaaagtttgccacaaagacatcgaaatcattggggaaaagcaattgacgatcaattgcaagggcagcagatttggtatttaatataaaaattaaaaaatgtaattaattaatttctttcttaattaggatggcactctgtttttgcgaaatttccaattacgaacttttgtcgtcccggaattttctacttcgaaatgaaagtgttcaaattggaaaggtgttcattttgatgatttcttagcgttttatttataattttgaatttattttaacagttttgctgcgattggattcgccacgaaggaagtgccattggacgggtcaattggtcaaattttgaacagttacgggtaccgaagcgatggctcatttggctgtaatggcatcaatcggccgtgcaaaatgccaatgtcattatttggttcgtcattttcccccgtggcaatgcaatcggcggacgtggaaatggcata

SEQ ID NO: 10982 - DNA, 4963 bp, Heterodera glycines
  unsure (1)..(4963): unsure at all n locations
tgtctgctgcatggctgctgctgccagtgttgtgcgccagagtttaccgcattttccccgtcctgctgctggcggttaggcccatcaatcattaggatggctaaaagggcaccaccacacatccattttagggattttaaattgaaattactaattgatggcccattatattaaacaataagatcncaaactcgttaaaaatgggttgttttcctcctgttctttcgaatccctattcgaaatatctaaaaaaaattttgcactttttaaaattagtttttttccaacaacaaattgcaatccaccgattttactctccgtttttcatataaatgccgaggaaatgtgtgccgtatctgtcgtccaaaaagcagatattgtgcccgagggagggccctttaattaggcaatgaatggcacagacccacattttgtgcctcgaggggctgacattattcggcacctcgcaaggcaagccaggccaggaggccactcacatgcgtatcgttgacatctcgcgcatattctattcagcagttcgtcgctcgtgaataggggcaggccattgttgttggttgagtggccaagtgagggggggggggcgggcgacaaggcttatgtaaagaataaagcggcacccaaaaatgagagcccccgggggaccaataattttaaatgtcgtttaattacacaaattaaccacttactatgcccttggtttggtagcgtataaatttaaaaaatatatggcatataaaagcattaactagagatgatatacggtaattaaacccagtactttcttataatttttgaaataattttcaatttttggagaaaaatttatttcattagcctaatgtttaagagatgtttttcgttgcttttaaagctatttaggttttttaaaattgaaaaatttaccgatttaagcataagtcaattgtcagcgtcgcagttttgaccacttaattttttaataaaattaaatttttcttttcaggatttaactaaccgaaaagtattttttaatgaaaaatggctacaattccatgcttggaactcatttttcctattgtttggctttttgtttcaacattcgtcaaccccagcaagttcaaccaacgaattcacctttcagtgaagttcgtaaaatttattaaaaattacaaagtttttaattaattttctttcctttttcatggccatccattacgttgatccgacaaaaaatggctttcgtgttgtgctgcgggatgaatttttgcgctcacatatgacaccaaatcttctgcccacgctttatctgaccgcgttgcccctacgacaccaagacggacctggtgcagaacaccagcaacaacaccagcaagtcacccgtgtgttctaccctgattcgttggccgatgaaaaagaggtggtccgaacaattttttgaatatttaattaataaacaaatttattttgggtgttgcggggtgccaatgatggttgtcgtcggaaaaaaaaattctttaataaattattctctaaaatcagtacatttctgataaatcagagtatacggtacccttggtcgaacccaagagcgtagccaatgggtcttttcggcgggcgccgccggtgctattccaagttttcagactataactaaaattgcaacaaaaaaaagtcgaaatattttgaagttttttcttaataaatgttttacaggccataaaattttttttgctttttgtaaggctaatagagcatgtgaaaagggctttcaaatgttaccaagaattgttatttttccaggtgactgttgatggtctgcacgagaaatgttggtactatttgtgcattgaatgggagaacttcaatcggcacaacgaaactacaggcacagatgtaaaaaaacttaattaaaatttcttttagcgattttgaaaaatttctgttcatattatatgaaaattcgattgataaaattaaattacaaaattttctttaaagtgtcgtctctttcgcacattggaccgtcttggcaaaggtgcggacagtacggtgtccgaattggaacccactgatttctcctcacaaatgatgcaattccggctccgttccgtgtccgattttccgatgaggtaggtgttggattacgaaaatttcaagaaaatttacagcaagtataaaatttattaattattgatttatttttggcactattcattaggaatctctctttcctcttatctctcgttttcacagtctgtcctcttatctctcgtttttctctaactgtctgtcctcttatctgtcggttttctaatctaactgtctgtcctcttattttttgctcatactctcatcatttcctttttctttctttaacattggtcttctctcaatttgcttaagtaattaattttaaatcaattaacaaaatccctgttaaggctaactgttgggttggagggtggtaaattggcaccgacaccacctgcccaagtgtttcaattgtccggtgaacggccatttgtcgaaatggagttgattttcacgtaaaaccaattttctttattatattaataatttaaatattattttgagaaatttaattttattattttgacagatttttgcgacaactgatggattacggtcagttatgtacggttgaagagcctatggtcatacggtacacagctttgggccgacttgtgtccggcatcagcatccgaaaatgccatttccgtaggacaaaatattaatttttcaaaataatcttgatattcacaaaataaaaaattatatattaaaatatttatttagttgttatttcttaattttaatattaatccttgacttttttttcgaaaagaaaaaaatcacatatcttttttttgtaattagctttaaccaattaattaatgttttatatttctttttaattttccgataaaaataaaaaataaaaaaatatattttttgagaaaattttttaaatattttatgatttaaaactgggtacaaatgaattaaaatagcatatttttaaaagttaaaaaaaatttaaccaattaaagcttgcagcaatattttttcaactttaaagacaatttgaccaccacggactacgagctgtccattgcgggctcagccgaggcaagcccatatattcggagcagtagcagaagcaactgcagctgttttgggaacacattaatgaacatcatttttgtcacattggccatcaccacactgctcaatcatcatctgttgctgatttggccaatgttggcacagcaaaagtggcaaaattgaatagtcaaaacattggacatgaatttgaaaatcatctcaaaaaatttttaaatcaaatgatgtgtatgttctacgggttgtattgtataaatttctgagttgcaaatcccaatttttctgatggataatagtattatcaacaaatttctggaaaaacagaacctcttaagaagcaaattaaaaaaactgcgcaggttagattccatttgaaaaaatattcatttaaatttttatcaaaaaattagttttgaaaatttcaaatttatacgttttaaattccaacttttcataagattttaaatttctgaaaaacaacacctctttagaaccaaattaataacaaaaaatgtacagatacttccattaaaaaatattcattcaattgaattttatcaaaaaaataaataaataaattttatatttacctattttggaaaatatagtttttagatcagcaaactaatgaactctaatatttacaaattttcttggccagacagtttcgtttaacttggaaatctttattttattttatgtattaatcggtttatttagaaatacaatttaaatagaattaaattaatttaaataattatttggcatatgaacaaatatatggaaaaaaaaattttgcgtctgttcatcatatttctcttttcttgctgattatttttgactgtttctgttatgtgtaggttgtcttgatcctctgtctaaaattaaaaaatgaaataaaaatcattatttaaaagccgttatccctctttgnaatagagccaaggcacaaagtgcaaactttgaatttaaaaaaatcgaatataaaatttcggtctcaaaaatctttgtcaattttcaaaccatattaaatttataatttttgaattgggaattattattttttttcacataaattgagtttttaaattatcatagaaatttgtaaaaaaaatttgaaaattgttataaaaaatattttactacaaaaaaatctcgaaaaaatagaaaattaaaacattttaattttttaatattaaaaaaattcggcaattggcattccgacacatccatgtatcatgtatatactaaattaaattaccgtaattgatcattttaaggaatgcggaagaggaggcactggcgcggcgccgtcttcgtcgctgatggaacagtcgaagtgccgccgccgccgggttagcaccgccggcatctgtctgacagcaaaagccttcaatgcactcatagccaggaggacaagtgccgtccggtgcgcatgggccggactgctcctaaaacgaccaaaataatcgttaaaaatgaattaggaaattaaaattaattaattgaatttgaatgatgacagacctcgggcgcacatgtgccagtgtctagtcgaaagcattggccctctccttcgcccacacatgcataaccttttttcaatttggaaaatgatttgaatgttacgaaaaatcaatcaacaattaattatagtagtgctgctcgtcttggtctcgagaaattgtcttggggttttgttctggtctcagattgtcggaaatcgagaccaagaatttttttatacccataatgattgactttcgataaactttaaaaaaataatgtttaaatgaaatttaatattcatgggaatttc

SEQ ID NO: 10983 - DNA, 1114 bp, Heterodera glycines
  unsure (1)..(1114): unsure at all n locations
tgtttncactgtttggtttttcntgaatggggatactcgtaatnttggtacaaaatatagacaaattttgggaaagagaaactgtacttaattaaaaaataataattatctgaatctttttaaaattgttattcatttgaaacaaatttgaatggcgtgccatttattgaaaactttggtttatgtcataggcctgtaatgccaaataaatacggtaattaaaaattaggaatttaaatacagttcaaatattttgcgtgggagaaaaaaaattgttttttgtcataatgcaataaaaatgcttgatgactgttttttgagagaaggaatattaaaaccataaatgaaatttaaaagatctaaaattaccatcaccattttttatgatattttatttgcagtaaaaaataaaattttattatagttttaaatccaaaagggaccaaagcaataaaaatttaaatttattcgtctgaatatttattcaaatatttttctggccctttataaagctaattttctattttattttatctttagtttgaaatgactctttttattctccttgtgttttttgttttcttcgcttatggcacggctcaaccagagcccgtcttttgtccgggtttttcaaaccaacatgactgtctggcgccaaaaattgtggacggaagcattcacccggcgaattggtcaaaaaatttaatttgaaaattattgagcttttttaataaattttttttggaaagatatctaaaatattctgcctttggattaaagctcgctcattaataatatatccttaatattcaaagatttaaaaataattcttcacatcaattaaattttattcgggattagcatcttttaaaggtgccattggttgcgcaacacatgccaatggaatacgccgaacattggccagcgttactgcttcagaaaaccgcactcgcaatgcctggttttttttatttggataattttttaaaatattaatatttatttaggcccctttttgcctgattgacaaggtttacttgcttttaacattgtcttttgcgtaaaattaagcagaaaattacaaggacgtagcctcaaacttgggggggggggg

SEQ ID NO: 10984 - DNA, 897 bp, Heterodera glycines
  unsure (1)..(897): unsure at all n locations
agatgccaatggtacccggtgagaaaagaaattaatttctttaggtaattatcattaagaagggggatgccgagtaaaatagcaaaaaattggcaaattcaaaaaaatacggggaagaatgttgaataattgctaatttatgccgaaagtttaaatttggttttattttcgttttatattttgaagccaacgaagcaaattagggattgaaacagttaattaataaattattcaggccggcgcgacaccgcaaaatccatttttcccaatttgtggaacaccgtataaagaccgaagacagaacaacagaatgcaaatgcttttatgagatgaagtgtgatacaaatggatttaaaaattacgtaaagcaaagagattgtattttaattgtttaatttacgaactgaattataaagaataaattacataaaattgacgactatcatgccgtaatttggcttaaataattactagggctgggaattatatggaaatccatatttttttcctggactgtggaaggcctgaaacgcacgaaaaacatgtttttagcttggtttgaagcttctaggatggatttctatatccatattttccatatttttccatatttcgcgatttatgtccatatttccatatttttccatattttggcattttggtccatattttatgtccatattttggcatttttcaaaaaaacctctattagaacggcccccatcagctaaattagcctttttgagcccaaaaaccgaaaatttttcaaaaaatcattttttcgccaaaatttctcgagaatattgaataaatttaaattttcttaaaaattaataaattatgtcaaaataagcaaaaaagcgaaaatttcgcttttgttgttgattttcgnctaaa

SEQ ID NO: 10985 - DNA, 2639 bp, Heterodera glycines
cccccccccccccgggggggggaccagtttttttggttccccccctttccccgcccctgtactcagacccccccaaccccccccccccgggcctttcccccccgggggggggggggggtgaaaatacccccttaagaatggcatattcgttgaataaaggcaaaaatttatacatttttgattttttaatcatcttttactttttatgaaataaagtaaattttgcttatattttttaaaatatttgtggtttagtggttagtgcttcagcactaatagaaatctttgttatgagttcaacaccggttgacgttttccttaaataaattttttttttcctttaattaattttttttctgattaatacagggtttcttcgtgcccccgccaccgcccccgcgactctgacccccgccaacccccgcccccgcgaaaagccacccccgcccacggggctcgaaccctaatcttaagaaaggaaaaattcttcttatctgtaacaaaagcgcaaggaattcgctgtagaattttgtgtacagcaccaaaatatgaatttacttatttttctcactaatctcaaaaaaaccaaattcgtttccaatgttcaaatgtgtgtacaactttaatatccttttaccgtgtcaaaaaattctgctgcatcaactgcaaattcaaaatgggtccgtatcgttttggcgccgacgttttggcgccaagctataataaaaaaaagaaaacacccaaatttaaaaattttgtaaaacaacaaaaaaaaacgtatttttcgcgaaggtaatactgccgatggttggttgccccccttttttgaagaaaatttttttgttttcaaaagtcatgaaaacatgcttccaatggttttcagggtcgctgctcacgaaccaggcatccatttcgaccaattcggaacccggagccgaaattcgaacaaaaaatcgaaaataaaaaatttcaaaattctctttttgttctaaaatagattaaaacaaccaaaacgttttggcgccgacgatttggcgccatgtagggaggaggtagaaatgatgagaaatcgttataatttttctgacgaagtctatcaaagagccggatttaattcttcatttactctttttcgctttggcttatgttctcttaattttgtatttaagtaatgaatcgtcaaattgatacgaaaaaacaaaagcctaaaataacgcatgaaggccagcttcggccggtgggctgatcgaatgaaagaatgtttcggagacggcacattctcattggcacctccaatgttctaccaaataaattgtttccatttcttcattttgttaattattatatttaacgaaaaatttgcttggcgccaaaacgtcggcgccaaaacgaccctggcgccaaaacgtcggcgccaaatcgtcggcgccaaaacgtcggcgccaaaacgacctggtcccttcaaaatcgtctctgatgctcaacaaataatgtgccagtgttggatttttattttgaatgtaataaaaataaagaatgcaaaattaagcaacaataataattaaataaaacattaaacaaatttataaataaattaaaagtttttggtgaatattttcatttggtcatttgtctaatgaatacaatttttgatgaattcattagcgaaaacatcaaagcaataaacctcataaaaagcattgcccaacaaacaaattgaatagaattatgggatttaggcgcttatgcattaagcacaaaaagtccaaaataggcaaaattaggcattttaaaagtcatcgtaggaattccacaccaagctgaaaactcgtttttcgtgcttatctgtgatctgtgcgtattaagtgcgcaaaaattttatcatttgcttaaaaacgaatccctagtgatcagaaacatccttaatcaattccgtaatcagagcccaaatcacaaccaagtgcagtgatcagcaacaactctcataagcaatcagtgaccagcccaattctcaaccaaatttcaatgatcagcacacatcttcagtcaattcagtgatcacaaattcttttgggtattttggccctaattagcaatcaaaaaacttagcgtccaaaaatcatccgatgacgtttcgtctggcacggcattttccatgcagttcgtcgaattaatttaaaattttaacgaatgaacaaaaggtctattgaaaatacaaaaccgaccaaaagcgttcaaccaaatggtgttcgatcttttaatgattatgcacttttcctttagatggcatttgttgcgtgaataaaatgaaaactataaattaacgaaaaacttttcactttatttattatcgaaacaaataccatgtcgtgacacgattttttcattttgaaaatttttagtttttcttttttattactcaatttaaaaatccttttaatattttaaattagttttaataaattgttttcgctatattggtggcaaatgagttagacgtgaccactttgcctaattttaaggcatttactatatttttgtggtcttcgcctcttattttttcttattttttttataatgttttgtttttcttatctttaagaaaaatgctcgaccaaattgttaattgcataatcatc

SEQ ID NO: 10986 - DNA, 1789 bp, Heterodera glycines
aaatgcaatttaggaacataatatggccgaccggcttgtcaatttggcacttattgccggtggggctgagcttgtcgacgcggccgatttttacagggaattgccaggacatgctgacaaagtggtgatgctctaccacaaggtgtccccttttcagcctttgctttcactcaccaaattgctttctaattaggccgggcttatcggtcgtgccctcgatttcgcttttcgaaccgaacaattcggcgccttggatctgatcacgcaggaattgaacgaacattcggacccttccgttttggcacgcgccgctgaattcttttcggccaatcagcaggacggtgtggacattttcagtgtttggcatttgtcacttacaattagcagattttggaatttcaattgcatttctataccaaattgccttcctttaaggccaagccgttcgtttgttggtttatgccaaaaaagtaaagacccttttcggaatgattttcaccgctttttgtccgtttagtattcacaagcggtcgcattatgtgctgataaaaatgtacaaataactgaagagttagaaaatgttttgacgccaaataaattaggtataattaaataatgaataaaataaattggacaatttttaaaacttagaaagtttaccctcgggggaacggtcgcttttgctagaacaaattgcgcgctgtgctcttcagcaagggaattatcatattgcggcaaagaaattcacacaatccggcaacaaaatagaagtggctaattaagactaattatcatttcgttttaattggctaattaaggcaatgcgcgcccttttaaagtcgggcgacactcaggcaaacaaatgcaaaactccttttgttttttgctcgcatattctgctgctttagcgtgtccttctctttgctcagacggcgcgagtcggcgccatttatcgcatggcgggtaattacctgcaaacgcttaattggaaggaggacgcgcaactgatgcgccaaatcgaagcattttatgtgaaggcgggcgccatggatttgctgtccaacttttacgaatcgtgcgcacaagtgggacgaaaagcaaaacgaaacgaaaagcaaaacgaaaataaaaagcaaaacgaaacgaaaagcgaaaatgatagaaacgaaaagtactttcgggaataaaagtaggatttccatttgactttttattgaaactgaataaaagtgcaaatttggaaattgaggtggaaatcgacgagtaccatgactacgaaaaggcggcggcagcgtacggagaggcgtaaaaacactgaaaattggcatcttttgatgcgttttttgttttgtttagcattcaatgtttggccaaaaaattggctgacggggacgagaagaacaaaaactatctgacagagagaagggaaaaacttagccaaacgttggacataatcgcgcactttaatgagacaaaagggtgcacttgggctggggtaattaattaattatgggtcgtaatttggagcttttcagtttgtatgagaccgacccgggggaggccattagccaactgagcgaattggcacaacggaaaggcatcgatgagcacgtccgactgggcgatatttacgctttgatggtggcccattattacaagcgggaaaattacagaaaggtggggcaaatcgcagaagggcaatgccggtggggggggggggggaaatgacacaaaataaaaggaaaatgaacaaatgccaaaatggccaaagtggcacttggaccagtgc

SEQ ID NO: 10987 - DNA, 1444 bp, Heterodera glycines
  unsure (1)..(1444): unsure at all n locations
cccccccccgcctcgtccacctgatacccgtcgatgctttggtccatttccctcactctcccacaaatctcccaaacactttggcggtcatttctctccaaaaaatatgtgcgcaatttttcctttcccttaatcaaacttttgtttttgctgcttttttccatttgcctttatttttatggcccctctctctgtgaacaaaaatgacggattgtttctgattgccaaagccttcgcagttttgctgacgtggattttggatggcatccctaaaatccgttaattttgtgcgaattgttcaaacgcacccaaagattccattcgattggccaaatgaattgtgtcaccaaaaaggcaatatctaacgacaaatttaaacacaatttatgtaaagaaagaaacaccttggcatctaaaaaaatgattggtaaagcactcttaagataagggaaaatggaaaagctttacttttactccgacgacgccggcgacgacggggccggaatggacgccaattcggatggaaatggccaattcgttggtggggttggtcacctgcaaaaagcacagaacggagtacagcaggagaggggccacccctgacaaatcgcgactccatcagaaaaccaatggcaacattcagaattttctccgcgtgattttgggactctttcggcacccctccgacgatcatataagcatcgcctgttaatgaaaagaagcttttgcttattgtatctttctgttttattcctttgtcactaatttaccaattgtctccactttgtacacgtcgtgaaggccgacaattcgatcaaatcgttggtataggtcattaagcagtttgatcacatccttaattagccaattaaggcaaaagagccgacaaatgaagcattgggcaaacaaacgtaaggcgtgcagaaggagcaaatgttcgtaaaagtgacgatctgaaggaacactttgaaaattaacccatgtgacagcttaaaatgtgccgaatattcgtccccattcccggcccaactgctttcattttcaatttcgaattattagcattatttacaaattacatctgtgaacagcacggtcgcctcggagaattccgctgcgtcgaccgttgcgccgcgccgaagagactctgccacgctgggcggcatcagttcgcaaagtaacccctcaagcagttaattaggcaaatttagtcattaattgattaacatggtattatttcattctctctcgcctcagtccgttgcttttccgcctttagcgcattggccaaacacttcaaatttcgtgtcgtctcctccaatcttcggctgaccattanaggttaaatgtcctaatttttctcggcatttgctattgcgcccacttgagctccacttgngacattcgcgactgattcagcatgattaagtctcgagtgctgtcatgg

SEQ ID NO: 10988 - DNA, 2514 bp, Heterodera glycines
  unsure (1)..(2514): unsure at all n locations
caaaaaaaggaggaaaaacattgactgatcgggaggatgaaacgaaacttcccgaggaaggacggcacgcgatcggtcggcttatgcttatgccgttctcgacctgtcaattggggcatcgcttcacatattattggccttgtgtgctgatcggcccacttggttgatcacgaaaatcacatgctccgtcatcatcgtgtccatatgctcctgctttcgctcttgcactttcataatcacttctgtgtcgtaaattcgtcgtgccacctctctgatcacgcctttggcatatttggcatttaaaagccttccccattagttcgtttacccttaacgattgggtacagtccgcaccgtcgggagtagtaatgcaaaatcagggacccgtccgattggggctcacaccgaaacgccggccctttcagttttgttcggtagacgacatgatcaatgaactgtgccaatcgccaacgattagcacagattgtttttgattgatcttacataatgtaatgcgtccaatgcatccaaaaagcccttgagaattgaaaattatttcaattttcacccaattgcacctccaaatcgggcgaaagtgccctcagaagttcgtcccaccctgtctccatcgtaaattggatcagaaagccaccgtaagcctcccacacttcctcgacggggatgcctaagggaagtgaaggcttcaaaagtcgatcatttgacatttcaaaggcaaccgatcactgatcccatggcggacacgatccgaaaggattcctcgtctttgtaatatttgccaatttcgttttctgtcccttcctcgaatttggcaatttctctaaaagccataaataatgtgcaaattcattagcaaggtaaacattcattttacaatattttagtccaaatttctcttccgtatttgcgcgtcatcaattgccgaaaactttcgtggatccatccgaactgagaaaggaaatacgtaagaaaaagaaaaaataaaaaaaaggagagggataattaccatttgtcgagaattaaggagaaagacaccgaataaagaaagaaagaatgaaacaaatgtattaaatcggttgcaatttctttggcactttctcatttgataatttatcccaccacaacggcactttgtcattcgttattctcactccatatttttgctctttctctcagttcgtgaaaaggtgccatttcacaaaatgcaggagaaagtttgtcactgttggcagtcgcactaagtgacagctgatgaatgactaattaattaatggagtagtcttggagaagagcagtggtatattttgcatgatgaagtcaattaaaagcataattgacagacagcacgcacgacggaaccaatcaaagagtttttattaagggaaaaggaaaatgaaacaaaaaatgccaaaaaataaaggaaatgccaacacaatttaacatgatctgattgccatcggcatattcacactattcacattcataattggatgctagggatcgtttagtgacttccgccagggattagatttctaatgagttttgaaaaagtcatttgcgattttattttatttttttaccccatggcagaaataacgtcccaacacaacgtaatatttggaagtgccgagttcgatcattggcaccgatgcgccctcagttcggcgcgtgtcgcgaaatttgtttcacatcgtttgcactgcctcgaagcgctgaccccgcagttctctcccaattttgtccctgctgctccggtggaatgcacgcggaggtgcgcctgcaaattgctggcgcgattaaacgctttgccgcattcggcacacacaaacggcttcaccttaatcaggcgaagctaattatgacaaagtgccaaaaagcatttgggaacgaataaatcatcagaccattattgaatgtttatcaaaatccctctattcgcatttcgatttgtgctcaccgtcgtgtgcgtataagcatgccttgtcaaattgccaggctgtcgaaatgctctcccgcaatgttcgcatcggaatggcttttcacccgtgtgaattcgcttaagcaaaacaaaaaattagctatttttcaatttatttgcgacttttcccgccatttgcctttgtcccttcggcaggtggccctttgctcttctctctcatcattcgaattcgattaacaattccgcaccctttgtttagcccccgccccttcgcctgcttttcctctcccccttttccctctttttgctcggcctttcgcttccctcccaatggctaaccccaatttgttctcccattcattggctcaatgaaagaaaggaaagaagcggccataaggaatgaatgaaaacaatggtcagcaggcaaaagcaaagcaaagcaaaactgatggatgaaagaattgacaaaagagggggggggggggggggggngggggngnnggatggnacaaaaatgaaaagtgaagggaccgaaagtgggaggagaatgagggggg

SEQ ID NO: 10989 - DNA, 3407 bp, Heterodera glycines
  unsure (1)..(3407): unsure at all n locations
ctccatttaccgccagcanttgggtgaagaaaaggaaacgaaacaccaaacaaactgttgcaaagcgatcactgaccaattttaacgctaattgttttgttatactcattaaattcctttacctcatatttttatggacattcatagttttattgccgtaacgtattggaactcagaatctctctgcttgttccgtttgttgcgcttaaatctgtgtttaaattcaaatttgtttctttttgaggtaaaaaagtgccattccgtttttattagtttaaaatcatttttcttttttgcgtagagcttacttcaaaaatttaatattatatattttgttttatcgacaaataaattgccaaaggaatgccattttatctttgattagtttctttgggtccttatcacttatcagcgaatgtttacccataagttccttctccatcgtattaattttctctattaggttaattcaaccgaccaatgttttcatgaaaaacggaatcactccaaaaagaataaatgaattagctgctgtcaaaggacatcagtagattaattcatcccagcaggaatctctttttttgtttatttccttcatttaatatacataattgtttcattccaaatggagggaatattcggcactcagcgggggggaggggacattctaccgaataacgacaacaacggcaatcacaacgacaggcaaccgttgctactcgaagaaaatgaaaaagccagctacgggtcgctggtgcctacagaggactcatttaggtagaaaaccattcccaataaaacattaggcatttaagcggggaaagaatcgaccaaagaggcggagggaaaacggaaggatagaaaactaaaagcaattccatccatctctgaagtcgagaacaaaatcgtataaatttgaatcgctgtcggaataagctgtgaaatcgaatgtcaagaatattgaccaccccttgtattattttatatcaattgctcggttggcaccattttactacgcagcgaaattctgaacagagttacagacccgatactgaagtgtctaaattacaccggcacataagctgtcagaaaaaggaccggctggatccaagtccaggccgagctctaattgtcaatttaagggtttacgatattttgggcgcgaatttccaattgcctaaattttttaagctgtcgaaattccaattgccgaattttgagggcgtcggcacttgacacttatttgttagtcccgggcccggtgtatttcgacatttcaatacgggtctgtatcatagttgccgccgcgccctaaaaatggtactaatcggggaactgattgatatatagaatatatcaaaatcattggtgtcattaacttgatcttttccaacgcttttttaaatctctaaaaatgtttcaataaatatgttaggcaagacaaacattggtggaaaaggagcggaaaactaaaggcctcgaaacgacaacttggcatagtaagtttaaagttatttttttgcgccttcttccttttttggcatattgttcaattaaaagcaaatttaagggatttgaataaaaaatttaaaaaagtaaaaaccataaatttggcaaaagttcggaatttgacctgacaaaatagagactgccttccccaatgctctcagatgggtctccctccccccaaaagcccttcccaattagcccttcctccgctcagtttgcttattcctcctccgttgattatgcgctgattgcttttggtacggtcgcttctgtgctccacggggccggcttccccttactttcgattgttctcggtgggatgacctcaggtagaatgttttgggttttccatagatttttcttcattttttagtttttttgagggccgaaaattccgattttgttcatggccaaacgccgcgtcaaaatgctactaattcctctgccatttcgccaatttcaaagtgaaagtgaaaaacaaattcgcaatttccttttttaaagagaggaattccaatcggaagtggccgctttctccgtgtactatttggtcttgggtttcgtcatgttcgtcacttcttacatccaggcaatctttcgatgccaaacattgccaattccctcctcattgtcagatcgcttgttgggaggcggtggcagagagagttgcccatcggcttcgtcatacttatttgaaagcgcttctccgccaggaaatcgcttggtttgacaccgttcagtccggcaatttgacggcccgcctttcggagtgaccgaccgactgatcattttttgtcaccgcttttccaatttagcgatttggagagagtgcgcgaaggcctcggggacaaagcgtcgctattcatccaaatgttctccgctttcgtcgccggcttcgtcgtcggctttttctacaattggcaaatggccctggtcatggtcagaatattccttctctttctccatttgcgttgcgtttgcccctaaaggcacttttcaccccggccattgccttcaccggcgcgtggatgggacgaatcaccgccacacggacgcaagtggagcaggagaaatacgcagtggcaggtgcaattgcggaggaaacattcagctcaatgcggacaattcatgcgctgaacgcggaacggcaggaaatggaaaggcacaaaaagggggaaaataccaaaaatggaaagggaaacgaatcaaaacgcgaatgaaaaggaacagaagaaaattaactcttttgcttaggtatgaaaaggcgttggaggacgggcggaggacggggctgctcaaatacctttacatgtccgtcggcttcggtgccacccatttgatcactcacgcgtcttacgccgtcgctttttggtccctcccccgtggtttttttttcaaattgacatcgctttaggttcgcttctcgtctcatcgtgtgggatgagcaatttgatcgcggcaccgttttcattgtttttttctccgttatgagcggctccaccgccctcggggcggcgctgccaaattttacgagcatttcaagcgcaaaaggggcggcacggcacgtgctcaaagtgatcaacagagtgagtttgatgatacatgctcaaaagtgggttcttattcatctatgaatatctatgaattcaattgcgattctttccctttttaaaatttgcttttttttgaaaggaaccgaaaatcgacgcttattccgaaggtggtcaaatgctgcgagaagtcaaaggcgaaatttgcttccgaaatgtgcgctttgcttaccctttgagaagagacatcgaagtgagtgtttttcagtgcgtccgaatgagtcccaattcccttttctttttaaggttctcaaaggcgtctctttcaaagtttgtcccggcaaaaag

SEQ ID NO: 10990 - DNA, 1409 bp, Heterodera glycines
  unsure (1)..(1409): unsure at all n locations
tgtttggcctgactgacagtgattttntaaaaaactttttgctttcaaaattaataaaaaaggaaatttggagtaaagttattttttataataccancaccgaaaaaattctttgcccccatgccaatgaatgaaaagtgccatttaaggcccaagagggcagaacgacaattgtggtcgctcatcggttggccaccattcgaaacgtcgaccaaagtaagtgacctcaaaatgccaattccctttcttttctttctattcttttcagttctcgtctttcacaatggccaaattgtcgagacgggcactcacgaagaattaattgaaaagaaaggcattttccatgggatggtcagccaacagcaaatccaacagggaaacgccgaccaatccctccagaaaatcggtttctgtccctctctttggaaatcgaccccaatgaaaattcgaagacaaaaatattttcaaaaaattttccagcgatttttttgaaaactttttagaaaaaaacttaatttttcatcatttagttttgaaaaaagcgctgtaaatttttttaaaggtatttttcttgaaaaattgctgtttaaaaaatttttaatttttttttcggagtttcggcggcagagttttgtcctgctccggaatcaacgacccttttttgcttctcaaaacgccctttttcaagaaacttttcgggacagtgggtccggctgcgacgataggcgctgtcttgaaaaaaacatttttagaaattctcccctctttcagatgaggcgccaaattcggaagaaagcgaaggtacggcggaaggccagcggccaattgaaaaaccgaacgacgaaaacggagatgcatttgaagacggaagtgaagagaaagacatggcgattccgttgttgggcgagggatcggtcggatcggcaaaaagttcgccgagaaaggcaaaggcggccgagggcggcggcactttgtggcgaaagcattcgccggcgatggtaaaacaactcaatgcactcactgctccaagtttacgcaaatcaaaattttagcataaatatttttgttatttcaaagaaagttttgtgctcccgccaattttttaccgcctctaattattttagccatttaattgtccttttttcggttctccgtcgtcgcaaaacttcttccgcctctttacgcacttcagcttcgacggatgtgttacaaatcagccaaatgcaaaaggaattggacgaggtcgtctctttttctcttctccctttctatctctgtccacttttcccctctttcctcttcctccccccctcctttctctctctctctcctctttccccgttctctctcctcctcttcctcccttcctccttcctttctttctttcttcccttcccttttctctctat

SEQ ID NO: 10991 - DNA, 6301 bp, Heterodera glycines
ttttggcaaaatgtccccatcggaaattccatcattcatcatataggcctgactgaccctattgtgctaccgatacggccacctgagcagaacacagccgacactctgatgggtgaactggaaaagctgggacagtcggacggagacgaagacgtgcatggcggaggaatgagcaagcgatccctgttgctcagtgaaccggttcaaattgtcatcacttgcattgcaccgccggttggagcagctccgcgcttccaccattatcagcactggggttacaatgaaaggcagttgatccgaatacggaatgtcggtgaccatttctgcctgttccacgcgttgattgccgcccgttcttacactgatcatgacttgacaaaaatgattgcaccacagcaacaacaatgccatcaaggggacgtaagcagcagcagcagcagcagtgatcatcttattaacgtgccgtccgctgctgcaacagcagtgatgaggaggccggatttttgcgcaaatcatgaagtactgaatcgtcttctgtccagcccgggtcgaatgcaagaagcggtccgggggttgatgctgcatgccggcattgaccctgatgggcaagcgtacggggtggagcatgtcccgcatgtccaaaaccattgggtcagtgccatttttgaaaatgctttctgccgcataatttggcaaattttttttttaacaggatcggctctatccgggaatgtaccgcattgtgctgtttgaggaccgccctgaggaactgccgaggcctatctggaaggggccgatgggacgctgctttgtggtcgctttgttcatgtccggcggacatttcgacgcaatcaaaaaagtcaactgttttttcaagcttagccgtaaatattgtattgactgcgaatgcgtctacaccactgatgccaaacacaccatatcatgcaaaagccggtgtgctcagtgtacaagaggttattttgtgggccgtgtgcgcaaaattttgttattgttgttgttgtacagtaggaccacagcagccatgtgcgagggaaccaggcgtcagcatacattgctctcaatgcaatcgcttctttttttcacgcaattgttttgatgctcatcggagcggacaagcgtgtagcctgctgaaacgatgcacaaaatgcaatcgaacattccaaaatgatgccaaaaacccgcaccagtgttacaccagtttttgcgggcgctgtaatgtacgtttttttttttaagcggacggataaggacaacaaatttttcacaaaaaatgctcaggtataccacgaaaaagatgctgcttgtttcatcaaaaaaattcctgtcccgaaacaaaagcaaaactaccgcattttgtgctgggacacggaaacgcggctcgaacacctacaagaagcgggtcatcagcggcacaaagttaaccatttgtcggtcaacatcacgtgcacggaatgctgcgattctgcgacaggcgaatgcgtagaatgtgcgatatgcacaaccgaggagggaattttgtgcagaaagaaggactggtcggttcttcttcctttcttaatacatgcttgctcacatttttgccgacaggagtgaagcgaatggtgatgaaccgctcagggattttgtcgaatgggttctccgtgcttggagcaataaacacaagacgtatttatgggtttgttgttttttttttgcttcactgactaatttagcctcgaattgatcagctcaaattcaggcacacaactcttctcgttttgacggacatttcgttttaaagtatttgggcgagaccagtcgacgtccagatgtggtcatgaacgggcttaaaatttatgagtttcgactgcagcatagccgtcaaaattctctgctcatctggagagattcttgccttctgatgcccgttcgtctcgatcaactgccaaaaacgttcaatttggactgtgcagagaaacctttttttccctatgctttcaaccgaaggttttttccgaaagctgtgacatttgtcaaaaaaataatgcttttaagggaaaactatgacgtgaggcttccgcatttgccgccaatagaagactactgtgctggctcaatgaaacaagaaaaatacgataaatttgtcagttggtaagcaaaactatagggttatttcagtggtgggggttccccatttcacataggtatgaggaaaataaaacaacaacacccttctatttgccggacgagcttcaatcctattgccaaaatgatacggagattcttctgaaggcaattgtgcagttcagaaaaatattgatgcgtgatataacagggggatacgatgtgctacccatctcgtgcactattgccaggtaaaacattgattgtgtgatcatgtgaaaaaaggagaagaaatgttttaagcatctgcatgagcatcttccgggcccaattcctttgtgagaatcaacttgccattgtacccgaacgagggtatgagcggaacgacagagccagtgtgtttgctattaaatatttggattggcgtgctaaaacggatgcggttaaaattcaacatgcgggaaacggcatggaaaagcggtggagacagttcaaattggacggttggatagaagagcagaaccgctgtattgaagtgcttggctgctactggcacggctgtgagcgttgttttgatcccggcgacaaactggtggacgccaaatcatgcagagaactgaatgaggagaccaacctccgattgatgcagcttcgtgaaggcgatgtggacggacatggcttgcaggtcgaagcagtttgggaatgcgaaataaacgcgcagttggcctgcaatgccgaaatgcgagcctttttctctgatttggggatggacagagggcctattgaacccagaggagcctattttggtggaaagaacgggccccattgaaagctatttgcagagccgaaaggaggacgaaaaaaatatcagtttttgatatcataagtctgtatccttttgtgaattatacgtgcgaatatccggttggcataccgaccatcatacggccaatggccgatgaaatgtgcgttaattggacacggccggagcagttgccataccgcggcattctgcgtgttcgagttgtccccccacggggtctgcgcgtcccggtgctgcctgtaaaaattgacgagcgacttttgttttgctgttgtcatcattgtgcaacgatgtttcgcaaaaaaagcacgcgccgcccacataaatgtccacacacggatgcacaaagatccttcaccggcagctacacgcatattgaactggaaagagcacttgaacacgggtacaaaattgatcgtctttggagagcttggcactatgatgaatggtaattgtctttctgtttaaaatttgtatgcgatattttttttctctgtaggagcgaccaaatttttaaagattatgttagactgctcatcaagttgaaggtttgcctgcagatttttgacccatttgtttaatcatgtgtttttttttgttaagattgagtctagcggtttccccgaaggagttagcagcgtggatcagaaacagcgctatgctgatgagtatcggcgcatttacgaagtaaacattgaattggagaatgtgaaaaaaaatccggggcttcgattcattgccaagcttatgcttaacagtctctggtttgtatatatgtccagccgattaaggtgcagcctatttttaggggaaaattcagtatgagaaacgaacttggcgcaaacaaggtcatcaccagaccacaagagttctttagtctgctctttgatcataaaattgtaagtttataacataccgttttgctggcttaactacaactaatgtgtgtccaggaggtttctgcaatcgtaccattctctgatcaagcgctacgcgtgctgtacaaaccaaagaaaaacttcgtttccgaacatacaacaagcaatattgtgataagtttgtggacaacaagctgtgctcgtctcaagcttcacgactacatggtacaagtcgaccaaagagaagattctgatttgctctatacagtaaacggggttttcgtgagcgcactatatttgtgattttaaggacacggacagtgtcattgttctacataagcgggacactactccacttgagactggagagtttttggggcaaatgagtgaggagtacttggattgcgatataaaaacgttcatatgcggaggttagtcgtaaatagcttattcaaaatttttatgcattaaggtgccaagcaatatgcctttcgtatgcgccacaggcggacaaacgaactggaatttgtccaaaaaatacggggaattacttttgatgtcaacaacagcaaggctctgcaatttgaaaaatttgttgaaaaagtgctcaattatggtagagttgatgataacgacgacgacgacgacaatagtgctgtttcgcctgctgttttctcctatcaaaagataatgccaacgcgcgacagcaaagtcataactcggaagcagttgaaaaaatatttaccagtgtgtcaaaaggggatcatcaacaacagctatgaagtgtttccttttggatatgaatgattgggccgccctcaataatacccattctcaccattattataaaaacatatatttaaattttaaaatattgcttataatagtttgcaacgcgcacacacacacacacacacacatgaatatatctgacagatgatgtcgttttgtgtgtaaattttataattcgttttgaaagtaatattctgcgtccttctgatctaaatcatcatggacaatggtaagaaagaagagctcaaggatcgcaaaaatgtgaaacgacgatacccattcccgttggtgtccgcacgagcacaggactcatggtaagtatgtgcaataagacacagcccaaactgcagatcaaaacccaggaggatcaaacttgaacaaatggaggaaaaatacgccaaaatggaagaggaaatgtcgtcggaagatagcgacgatgccatcgatttcttccaagacaccattgaggatattgtggaaaagtgggttcacgtggcatatatgtttggatttaattgttatattcctaataagaatcaaccgttccgaagaaaaaatcaaaaaatgggaggagaaaggcagcagcagcattaagatggagaacatgggcacaatggtcgaatggtaggccaactacagaagtgctgctgcagatacgttttttttgataaaatttgcagcagtggtgtggacaacggcgaaatcgatgacatggatgatcagcaggatgatgatgatgctccaacgtcaactgtttatttgaatttgggcaaagacgagcgcaccgcgaaaaattcttaaaggcctggatagactgttagataaatttaatccaaaaaaaatgcttgaaacatttattcttcatcgtgattatgttagagaaaaatagtaatagttaaaataaacatattaatcggtctcatgctcttctgaaacaacatggagtaattcaagtggaaaattgtcttggtgactgctgccaccaaattgtacaacacatggtaattggggatatttcagcacaatacgatgacgcgcatataaatgttgttgaacagttattcccatgaatccacggtaggcaaacatcatgttggctccatgtcgggatagcgcgtctgcggaaacagctacatttcttttcaggtgatgggtggctaatgactgtttgttcaagaatttcaaattttcttccttccttttctgaagcattttgtgaagccaagttggcgaacatcggttgaatcggcagagcactctcaccaagtcgcgtcgttctctttgtcgtcgtcgctgttgcttgcgctgtgcaggtccaactcgtccaccgctagctggtaataactgctgctgctgctcgctcgtccgcaacgtgagagacattcccgcgagtcgcccggacagatcatcagatccttcagttccacgtacagaggttcgctcctgaatgtaaattaattcatatttttccacaaacatttaaacttaccacactacaccctctgtcttccgcttgggaaagcatgttgtgtaaagttcgagtccctcgacaaggtcaagtgacccttccacgtacactggttggtttctgtgctcagtgttttcgatatgcacacagtcgactgcacgcaacggattccgaaacaatgactgaccgtctccctgtggactattttttatctcc

SEQ ID NO: 10992 - DNA, 1989 bp, Heterodera glycines
aatgattagtaaaaaaaattggaatttttgtttaattataattttgtaattgatatgtatgaatgacgaacttcattgaataaaagtaaatattttatgatacaaatttaattcggttttttatgtctaatgttttgaatccgcgtgcgccacccgcgattcgcggcgtttttgcgtgattcgcgaccgcggcaattttttgcgcggcgcgccgcggatttttggggtccgtatcgttttggcgccgacgttttggcgccagggtcgttttggcgccgacgttttggcgccgacgttttggcgccaagccataataaaaaaaagaaaaacacccaaatttaaaaattttcgaaaaattttgtaaaacaacaaaaaaaacgtatttttcgcgaaggtaatactgccgatggttgttggttgcccccctttttgaagaaaatttttttgttttcaaaagtcatgaaaacatgcttccaatggttttcagggtcgctgctcacgaaccaggcattcatttcgaccaattcggaacccggagccgaaattcgaataaaaaatcgaaaataaaaaatttcaaaattctctttttgtttctaaaataaattaaaacaaccaaaacgttttgacgccatgtaggggggggggggggggtagaaatgaagaaatcgttataatttttctgacgaagtctatcaaagagccggatttaattcttcatttactctttttcgctttggcttatgttctcttaattttgtatttaggtaatgaatcgtcaaattgatacgaaaaaaataccaagcggctgatgagcgcctcttcaatttggtgcagaattacatcccggtgaacccgaacaatgaaaatgatcacaattaccacataaatccaaattttcatattattttagaatttctccgtggaatttcgcgcaattatcatatgaacccataaattgtttccatttcttcattttgttaagtttattatatttaacaaaaaatttcattttttgtttccatttcttcattttgttaaatttattatatttaacgaaaaatttcatttttttataatttttacaatttcttcctgccttttttttcatttttggcttggcgccaaaacgaccctggcgccaaaacgtcggcgccaaaacgtcggcgccaaatcgtcggcgccaaaacgtcggcgccaaaacgacctggtcccattaatggggacggaacaattattaaaataatgaatattaaataacgaataaaatgggacaaaaattcagcagcactgctctcgagaccaaggctgaacttaactggattttcaattacggaaatccgtaaaccgtaattacttgggtccaaaaatgccgtaattacggaatccgtagttgcctccgcactgcttggatttctcgagaatttcgatgaaaaatgacaagaaattgcatcaatttccatcgaatttcgtgttctctcgaacagaagcactgcttatgaaaatgagcaagaaaattgctaacagagtttgcattttggaattaattaagaaatgaacgagagtgaccaaacgacggcgaaggaagggggagggaagggaggagtaattagtgactaggggaaagggagggggagtaattagtgcctaattgagagtaatcgattaaaaatattttatgttaagtcaaactaaagagaaaatataatgataaagtcaacaaaggtatcacaaagacaacaaattgtgtgtgcgattgatcgggcaatttcttaagccaccaatagtcaagagtgccaatcgccagtctcccgatcactcttcatccgtctgatttgatccgctcgtgcatgcttcttcgacggtcgactgataagagccactaaaattgattggaaaatctttctatttaattaagtttgcatttattgcgagtttactttcgtcgctgctgtcgaatgattctcgtcatccgcaaaaataattctgccc

SEQ ID NO: 10993 - DNA, 2672 bp, Heterodera glycines
aaaaaaagttgacccggcaatgactggaaaaagacagccaacagttaaggaacatttgaaaatggcttaattagcagaacggcaatttgcgagtcactcaccccccccccatcaaatgatacgtcatcaactgtttccggaagtgccagccgaggaagggaggcaagccactaacagagaaacgccgcccgccccgccgtcttcaaaatgtccggcagcaaaacgccgtgccaatttcccgtgaccccgccttttctcccttctctccctctatcgctgtacttacgtgatttgtttgaattgttttctgttcattttataatattttaaatatacaaaatgcgtaattcataaaataaacatttatttttttgtttaattctttatttgcaaatttggaaatgcatttttaaagaaagtaacaaatattcacataaattgaaaacaaaaattcaccacagcagggatgaaaaatcgttactaggtatatactcatttgtacacctttttcagtaccagtacgggtactgctctactccacttacgagacagggctgctgatggactgtttatgtgaatgagtcgcggcggaaagccatggaattggaaaattttgcatttgatcagactgattctcttttgccaccgatcagctgaagataataatgagcaacattagatgatgatcactgatcagcagcggatgtttttgtcaattaggcgggggggggggggttaattaaaaataaaacgatcagcaatgtgggaaatattaaaaagcggtggaaaatgccaccataacatggtttgttccgcgatctcttccagtccggccaaatcaaaattcatttggaaattggcacgtaccgcagcgaagtgatgacactcgtcaacaaaaattctttcatcctgaaacactccattgtcggcatgaaattctatcatcatcacctgcgcattcttcggaaacggtgcccaactttcctcggcctgtgcttcgctctgcgctccatcaactcattcatcttctatatggactttccggcggatcatagtgctgatgcttccgcgggcaaagtgttgacccaatggctttacaccccgcgtgccgacggcactcccaaattgttacggcttgactcggtgcagctccaaaaaatttggtgaagcttgaagaggtacagcagaccgacttttacacatattaattttgacttttcttttttccaggaattcagtcgtgatttttgacgtgccagtttcatcatggtcatcaaaatcctggcgtttggtgaatttgtttcgccgaaattatgcaaggaaaaccatcggacgggcgaaaagttgctgctgaggaaatacgggaatggacatcattttctacttttccgccgtcccatctcatcagcaaatgatgtccaatgggccaaatgggagaaggaggcctaagaatggcaattcgatgatcagtggggcagacttatttttgcggatgacgatgaatcattcgacaacagcgacgaaaggtaaactcgcaataaatgcaaacttaattaaataaaaagattttccaatcaattttagtggctcttatcagtcgaccgtcgaagaagcatgcacgagcggatcaaatcagacggatgaagagtgatcgggagactggcgattggcactcttgactattggtggcttaagaattgcccgatcaatcgcacacacaatttgttgtctttttgatgcctttgttgactttatcattatattttctctttagtttgacttaacataaaatatttttaatcgattactcacaattaggcactaattactccccttccctttcccctagtcactaattactcctcccttccctcccccttcctccgccgtcgtttggtcactctcagtcatttgccattgttttggtccattatggtcattctaatgagttattcagtgccatccccgcggggttagcgtacaaaaattgacaaaaattgtttttttcataatttttaaaaaaattatttaccaaattaattatttttttaatcatccattagccatacgattctttgcaaaatttgcgtcgcttttctccgtccgctctgcgcgagtgccccgcgcttcgatggatcgagtgccacgcgcttcaatggatctcctcatcgtcgtactttgagtttccggccgacgacagtgccaatgcgtcgtatggccaagcggtgaccaaatggctttttacgccccgtccggacggagcgccgaaatttttttgttgtttattcgatcaagtgtcgtggcaagagctccatttgttgtcaacaattgacgccttaaaagcggtgagtgtaaatattcgagctgttcgagaaaatctctggatttggcctcggtcccgtgtcttggcgccattaaaataaattttggcagagtatgtgccgtggcattcgattggtcttagagctgcccttttcggtggtcccccccccctcccctccggcgtttttcccttttcattttgccttttcatcactttaaactttttatgcttttgccaatacttcttctccggccaatttcttcatacaatttcgctttccgttctgtttttacgacgctgttcaattcgatgtgccgttttcgctgctcaacgaattcaccggcgaacg

SEQ ID NO: 10994 - DNA, 1610 bp, Heterodera glycines
attattttcaccgagtccaagcagtgcggaaccgatcagcggtgaccatggcacgtgggcccactcaacacggtcccagccaaggtggacaagcagggcggacagtggggtgttcagcaacaaattctgcacacccaaaacggtcatgaacagtgacacttggccaagcgtggcattaccaatgcacaatttgaacagcaccttttagggcagagaggaaatttaaaacgaaaaaacatgttcaagaaaaatgaccaaatcaagattttcacgagggtcctgatttttcggaaaatattaatcaatgccacagggtcaacaattttaaaaaaatacaaaagtggtttataaatgagggtcatttggtcatagatttgtttactaaaaaaataaaaaaatttccaaagcgttatacgttgtttttttggaaaacaaaattttgtatctaattagtaaattaatttttttaatgaaaaattaatttattaagtttggttgattaaaaataaattgttttcaaaaaaaaaagagtcgcttttcctcaaaaatactcacaccttataaaaggaagcgagtacggtactgaaaatggcaagacaaatgccgagacgatttgcagcaaattcgttgtccaatgcgaccagcagaacaccgaccattgccaccaaaacggcgacaaactgtgtaacgaaaaataaataaataaaaataataaaatttcaaagccggggtttagggtttatgctaatctctctccccccccccgccccctataaaaatttttgaaaatttgtaatataaggagcaaaattatcatcaaattcataaacatttcgctaaactcatggaaacatgaagaagttcgaaaaagtccaaaatgtagaaaaatccaaactgcagccctagcgatcagcatcattgtaaatcgcgctcaagtacaaatttttaagcttgtccggaaggtcggtgatgctcgagagtctcggtctcgagtctcgactcttgaaaagtctcgggttttttgatttcggtctcgagtttctctaggtctcggtcccgatctcgaggtcaaatctaggtctcgagtctcggaaaattgtgggtcttgcgcatcattagggggagggggggggggtagaataactcgaaaataacaaaatatatcaattaattaattagtaatcttgactttgagcgttgaaaatcgctctcggagcagagtccagctcagcacccagaccagcgctgtgctggcactcataatggacgacgcagcgccggccgaaatcagtcccaaggcttgggcgtacgcgtaatttattgcagtccacagggcgagaaaaagcagcgggcagagcaaagaatgccttcgagaagaaagatattagttaattcaattaaatacatatttatcaatcatttgtaaataattaaatttttgcccccccccaaacctcaaaaaatgaaatttttgagttttcaaaagctcttgctagtaaacaaaaaatattaagactttcataataatctctttcaaatatatttttttaaattcttgtaattattaaagaaaattttaagaaattaacttttttcaaaaaataataaaa

SEQ ID NO: 10995 - DNA, 1339 bp, Heterodera glycines
  unsure (1)..(1339): unsure at all n locations
ttttttctcattgtcagcagttttatttcacatttagcactcacaaattaatatcacttttaatgctaaaatttgatttgcttctgaaaaaacgtaatttttttttgttacaaaaaatagtaagaaacgggtacagtatcaaattggcctacacggtattcttttgcatattttcaactgtattcgtaaataaaaatttattaatatatattttaattattaataaatcaaagacaccagtgagaatggtgcatagaaatgggatgggtcgatcaccaaagtcgacttgcggaactgtacggacaatgcccaggaaaccgcaacaccaacaatgacgagaaaattgatcacaaactggaaagcgaaagacatgaattgatcggaggcgtttttaggagctaaaaattgtcaaaaattttttcgggtttttttttggggataaaagcaccgaaaatttacaaaaaggacaagcacctaaaagcttcaaatcatttggaatgtaaaattttttttacaagaattttacgtctgtcattaaatttgccattcatttcgaacgagacaccataaaaacacgagaatacgatatgagacagttggggaatattttaaaagaaaaaaaaaactattttcaacaaaaaaattgtagtttaattttagaaaacaaaaaattaaattgaaattcatctcaaaaatttaaccaacccaaaagattttgtccataaaaatttgcattttttctggcctttttggatttagggggtttaggtcctgcgatgccagaagtctcctctgcctgggaaatttgtgtaactatttgtaagaaaaaacaaatgtgtttttttggctattttaaaaatgagatttttaaaaatagggatagatttaaatgattcttttctaaaaatgccaattttcaaaaaatattttctctccccgacccattcttatcagtgcataaaaaacaaaatctcacaacattttcagttctggcgctttcggagtcagttctcttagttataatttttagtgtgtccatgacataattacttggcaaattctcactaccgcacctggcgaatgttgctgctcgccaacggcactctcgccgtaatgccagcattttttctttgagtggtgccatcatcaattcccattgctgctntttgttgttgtacttgttgcatttgttttactcattaaacaaatgccctcctcctcctcctcttcctgccgttggtccgcgttaattgttgtctttgatgttgccgccgcttttgctcctccccgcctgtcctgctggctgtcgccacgttttgccgctgttccgtcgtcgtcg

SEQ ID NO: 10996 - DNA, 3434 bp, Heterodera glycines
tagagagagagagagagagcgagagaaagtgagagagagagatagagaaagagagagagagagaaaaagagagagagagcgagagaaagtgagagagagagatagagaaagcgagagagagagagaaagcgagagagagagaaaaagagagagagcgagagaaagtgagagagagagatagagaaagcgagagaaagtgagagagagagagcgagagagaaagcgagagaaagagataaagcgagagagagagaaaaagagagagagagcgagagaaagtgagagagagagagagagagaaagcgagagagagagagcgagagtaagtatgcctttatgttccgtttttcatcgctttaaagaaagataattaggaattgattgatgtgtttgttatgatgttaaacagcaaacattggccaagtgaatcgttccttttactttgccagtaaattatgtatacctagttagttaatcattcgaattaattgtgtcttaattaaaaaccaaaatttaaattttctaacactcaagaggacaagacttattggtcatattgtaatattttttttttaatctatcgatggctctaaatgttatccaatagaattaataatttaaaaaaatttatgttgaaatagccaataaacaggcgaaaaaatgaacgtcatcaaatttataatattaaccaatttaataatatatttgacattaaacaaattctgtcagattgagcatattgatttggaaaatttgtaatattttttgctaaaattattataattcaaaaataagtcatttaattgtgtaaagtttgaaaatattttaaaatcttttagactgtcatataaaaatgaaaggatgcttattaacttctttatttgtatttttgatcaccatcttaattagtaataattatgttggatcagtaaagaaaaaattggaacaaaaatcttttgaagaaatatttggagaaaaatgggaagaaaaaagaaacgaagaacagaaaagaagagaaataattggaaaattttataaaataaaagagaaaattaagcaaaaaggaagaaaatattcaacaaaaggggggcaccatcgatagtattgccgactggggccttattcccggttaagttaaccgcggttaacgccttaaccgtggtttatttaaccgcggtttatttttaaccaaaatatgtattctcgtctttaaccgtagttaagctaaccacggttaaataaaccacggttaagcacttaatttattaaataaataaatacaaaaaataaatttttattctaaaattcgtgagaattaattttcattgattaaaattaaaaaaatatatatctaggctaattactcagcaaataataggtataaaaatcgtaaataattttttttatttactattggtgaaaatcatataacaagttacagaataatttttaaaaaatttcacgagggcgactgcctgcatcgccggcctcctctccttgttctaaaaagtttttgaaaaaagggccgcataaaaagttgttgaaatcgataatgggaggtgtaaaatatttgatcgcataaatcagagtcccaaatttttttaaaataagacaaaatggctgaaaaactaagattcggaccccaaaaataagattttttataaaattaatagtagcgcgaaggaaacgcaataatattatattagcgtaaaacccaaggtttgccaactggaaattttctaaatcagcgtttagcagacaaaaaatcatcatttggggtcaaaaatcattagaaaatcttattcaaaatgaaaaaaaaatcaataaaaatgttttttccggcgcgctttttccaaaaaaaattttgggaacagtttccccgtcgggaacattttttgaaaatttggatgcaatttgttaacagattttcaccaaaaaagactagtttttgagcctaggtacactgccggaggaaaatagaaatgttaacatattggctaataacagttaaaatgtttaattaattttgaatatcaaataattttacaattaatcatttttaattgctataccaatgaccccccaaattaaaaatgtgtgtaccgaaaaggatgagatgtgaaagtgcaaatcgttctgttcagccacataaaagcctgaaatggaataaagtggaaaaaatgagttttattcaaaaaataaaacattttgttttcgcagatatccgtgccaaagtttaaaatttttaatggaaggatggtatggtaaaatagaacttgttattgtacgatgtatatcgaccagggctggacgcaattgcggattgcggattgcggattacggaaattgcggggtttttggacccccgtaattgcggattgcgggttgcggatttttgggatttatccgcaattttgatccgtaatttgactattggattatttttcgagacgatttcttgtaagattattttttataaaatgaatttttttctatttttatttaaagaaaatatgtacatttgtttaaattcttatttctttagcaatttaaaaatgtccatctgcattggagacacgacaaaaagccgaagttgaagtaaatgaatatttgcgggatccaaaaattaaatccagggccgatccatcattatactgggaagttaattcacaaaaatggccaatgattggtgccgttgtacggaaatttctttctccgcctgcaacaagttcagaaagtgagaggcttttctcaacggccggtctaatttcagatgacttgcgaaagagtttattaccagaaaatcttgcaaaacttttgtttcttcatcacaatttgcttttaaccggtttctcaattgaatgattttgcttttataaatttgctttttaatatgcttttaaattgctttaaaagatttataggattttttaaaataaaatttaaaattatttaaaaaaaattttttttaattgcggattgcggattacggaaattacggaaattgcggggtttttggacacccgtaattgcggattgcggatttccgcaactgagaaaatcgccgcaattgcggattgcggatttccgtaattgtaaatccacttgcgtgcagccctgatgggaatcctatctaagtttccggtgtccaaatttccattagtgtccaattttctaatgtctaatttccggtgtccaatttaccgggagccgaccaatcccggacctgaattcaaacaaaaagtcgaaagcatattttccaacacatttatacaactaatcacttcgaatgcataagtgtgtttcgtggacttcgcctataagtatgaaaaaaggcaccaaaggtcaaaaaaggcacaaaaattacatgcccggcataaggcactaaaatcgtaaaaaaggcaaaaaaatgcaccaaaaagttcaagatagaa

SEQ ID NO: 10997 - DNA, 2714 bp, Heterodera glycines
acaagggaacacatcgaactgtatgtgtccaattttctttaaaaccacttttattgtgtatatcatagtcgagttactattgccaattttcggcttttttggctcatggcgacaaaaatggcaagaaaaaagtgatctaagtttcgaaaaatcgataaaaagcacacacaactaaaaacaatatttattatgataaagatgcgctgaaaatatcagaaagtttaattgattttactattcaaccttcaatattttcataggattttaaattttcaatcgtaatttagaaataatttaagaaaaaatgtaaataaaaattttaatattttggaattatttttgaatttacaaatttttttaaaatttttttatttatcaatgttgctcgagagtctcgggatcgagaccaagagggcctcgtcctctggatcaagtcttaatttcgtctctcgacctcgagtctcgcgaatttcctgtacgaataacacttcgtaatcaatttaaataatgaaaatttcataaaataaattgtgtcccgaagctcgaaacggagttcattttaaaaatgcaatagaattttaaacattagaattatttagctggtaaaattaataaatttaaaaacaaaaaaattatagcataagcaagagttggtcgcatgatttattaaaatgaatagattactaaatatatgtatgtaaaattgaaaaggatttaaaaatacggaaatattgaagaaaaatgaaaatggtacaattttttatgatgatggaaattagaatattattagcacattaaataaattatatgaaatgtcctatatttccctttgttacctcatgttaaaacaacacgattattaaattccaaatttatgtaataaatgaaaatgtttttgcagttaaaataaacataattttgaaatgttgttttggtttcataatgaattttaaagaaaaatagtaaaaaacctaaagccatatttttaatagataactttagacaaaaaaggccttctatttggtttctaatacaataactagcgatcaaatagaatagtaaaataaatagttgagcccgaaatttgaaagtgccgtgacgggggcttttttcaaaatttgtgggacggtgaatttatacaataaaaaaattgtatagtttctattttagcttgggattaattacttatagtaaaataacattttattttaattccataaccttaaaagcttaaaatttttagcctcagataaattgtgtattagagttgatataatattatgtctccgttttaaagaaatttttaacacgtaacagggggttctaccggagaccctaaaaaacttcctcaatccgaattttagtttttatgcgctattttcaaaatcttttctgatgggtggagggtcagacgccagaaatttttttaatgaatttagttataataagaattcacgtatttttatttcgaattcagcacaaacaatgttcaaatttggattttgatctaataattcgttttcttaattattattttttgctttttgaaccgctctttttgcggcgaatggaacaaagtggtcaagtggtgtcgaaattaaaggcatttcgccaaaataatatttaaatttttcaattttttcgtcaattgaaaatacacccgttcaataataaaaaaaaaagaaaaaaatacagatcacagtgtcggccatcaaaacttaaatgagagagcgattcaaaaaatctttttataattgtttttaatttttttgcccaattttaaagtggcaccacacgaattattccatcctattacttcaattcccacgcaatttttttttgattaattttataaattttattaaataaaaatggaaaaaaaataaaatgaaagtagaataatctaattgagaaatttaatttttaggaaattagaaaaatatacaaaattaataacatcaacaaatcggaaaccaatttgttttccaacgagacaagcaaaagagagcaaatgtatataaatactgtccatatgttaactgaaaatcatccaaatcaacgcggcacagtaataaaatattaaaagatccgaaaaaatgccaaacattttcaaaatccttctgattgtgcttttggccgtcgtctcattccgtctctcggcttctactggtgacaaaagtaaaatattgaaataacttttgaatattccttccaattgtgtcaaagttcaccattttggtggccatggaaatccttattctgtgatgaaccctaaaaataattgacataaaattggtatttgctttaagaaactgctaatgatgggagtggaaacaactcatcagctgggattggtacgaagatcaaaagaattgtcaccgctggactgctcttcacttccctggcgacgggtggggcggaagcgattgggcgaagcaatgctcagggaggaaaagccgccggattggtgcatcgcatatgacaaatcgctcaatggtagctaatagtgccaagttatcacgatacgactgaaactcatttttaccaggctccaccgcctcctcctgcgcaatttgaaaagagggcaactcgagtagaaaaaatgagggcacacctactcgaactttcggagaaaatgacggacaaagagcctaaggtaggaattccggcttcagtaattgtctttttattgagccgtttatggactgtcaccg

SEQ ID NO: 10998 - DNA, 5028 bp, Heterodera glycines
  unsure (1)..(5028): unsure at all n locations
aattgaaattatttacttttacttttactctaaaaatgtatttaagtcattttaaattgttcgtttgaaaatttacggccggccttataaaatccaacccgtggaagtaaaagcggattactacccgtacaaacattactaccgatccgtaccatgactcgcacatcaagccaagctgtacgacttcagaccgcgtttgattgacggtgtttatcgtttaatccataaaaagggatgggatagacagaatttgacagaaaaaatgccaatgataatttccataaaaagaaataattatttaattggagatcactgttttcattttgtgcaaaattaatgcttaaatatgatgtgatattaaaacagaacaaaagcaaattaaaaattgagaatttaaatttgattcaaaaacggcccatttttagcaaatacaaaaactaaaaccgagccaaattaaaattgggaccatatttgcattttttttttgttgtaaattgaataaagctaatgatggtgcctttcactcccccaatttaatgagtgattgtcgctttgtcctccacaatatttttgagtgacgttttgtctttgctcccctcgggggctgtttattcacattttctgaaatggggaggggagagtcataataattaactaattaattaataatttatcatcatctgtcgtcaatttgggaacacctaaaaccacaccactgaaattttgcaaaaaaatgaaatttgaggaaaaagcttcaatcaaacgcctccttatcactcttttgcttactcaggccgaccaaatgtgggcttatgctttataaaatggtttaaaccgttcaaaattcattcaattaatttctgtggaatgaatgaaaaaacatcttttctctttattttgtttttttttggtaataaatgttataattacccctaatttgttggcccataaattagaagcatttctttcggcataaattattcctttccattattttaaaatgatggaattgtttttaacccaaaataagtctcgttcacatacaaatttttttatcatctcttacaaattatatttaattaaggaatatggtttcaaaaatcacggtggttttggcatttctctgcctgctgttggcattattggtgggcatcgatgctcagcaaagtcaatgggagcagaagcagaacagtgcagcaccngcgagggttggcaaggtgaaaacaaaacttttgtcaaggaaaaaacaatttcaataattagcgaattctaatttcaacttctgcctcttcagatttagttttaattaaagattcaaaagttttctgttcggtgaaaaataattttgtagggaattcgaatttattatattttagcttttttgattaaagtttttcttgcttaatttagaacttaaaattgctttaaaatccaataaaaattaaaactaatactttacaacctaaaaatttctcgaaaaatctccgagaatgaaaaaaattaaaaaataataaaagagaaaagattacttaaaaacgatatccttaaaaaattttcaaaatcacctttttaaattctttttttatagtgtgacattgcgccggatggacaccgtccgctcgcggctggcagccgccggttcactcgtccaattccgtaagcatttgcgccaggcgctgcgccaacgcttggaccgtctgtacagtgacaaaatggcacgcgcagacgtggcatttgacaccgatgccgcggcaagggaaggcattgacgaagtgttgcgcaattacatggatgtgggtttcaaaactaacaatagtaatgaatttaatatattcttacaggttaaaaatggttttcaattaagggactaaaatctttaaacggcacaaaaaatttctttttcgaattgctatttaaaagaagacttttaaatttatataatgtgaaattgaaataaaaaattttaatttaatttaataaaatattaaaatttaaattcaagcgtaaataaaatttcaggctcaatattatggtgacatttctattggctctccaccgcaaaacttcaccgtgattttcgacaccggttcctcaaatctttgggtgccgtccaaaaaatgctcatttttcgacctcgcatgccgtaaatttagtttttcatgagaaattttaaaaactttaaccattcaggctaccatagtaaatatgaccacaaaaaatcgtccacctatcagccggacggacgcgaagtggcaattgaatacggtaccggatcaatgaaagggtacggtaaatttctaataaaattatttctttaatatattgatcattaaaataatgtaatgcttttttcaaattaagcttcgtctccaaggacacggtttgcattatggacggtatgtgtgtggaaggtcaggaattcgcggaggcgacaaggtcggattacatatgcataagaatatgtctaataaattaaaaacattgaaaatataaaaatcattcattgggattgataagagaaaaataggcaattaaaatatgttgcaaataatatttaaatttattggtatgggaaattttttttataatattcgaaaaatatatattttttcaaagggagtgggattttttagaattcatattttacaattagagtccgcccgttttgctcctttccttccgcgtcacttacatatgtataatgggaattggtccacagggattgaattttgcttttgatgctccataattttttgatatttgctatgagcgcgtaatagtaaaattcatagtcgaaataccaaatttatacccactttccgacttacagttcttcgcatcctttcacttgtttgagttcttaaaaattgttagacagacgattttgaagggtgcatttattgctcaatgagaagctgaaaattacaaaaaattatgccaaataattcagaaattttctctatttaaattttaagtgaaccaggcgacacttttgtaaacacaaaagctgacggcattctcggcatggcttacccggcaatttctgtgcagaaattggcaactgttttcaacaatttggttgagcagaaagaagtggaggagccggtgtttgcattttggcttaatcggtcagttaattgacaatttaaaatataagaaaagtcggtgaaataaaaaggaatttcaaaccgaagaaatgtttttagtgacccttcgtccgaatttggtggccaaatgaccgtcggtggcatggacaaacgccgttttgtggaaccaattaattatgtgccggtcactcgccaaacttattggcagttcaaagtaaggatggaataaggttttttgaaaaaaataaaacgtatgacaaatttcaaagatggactcggtcactggcggacaaaatggcaaaagcaaaattgcatgccgaaacgggtgccaagcaatcgctgacacgggttggaattgcaaaaatgttttaatatttattttgtttttaattttatgtttgtccaggcacttctctgatcactggacctcagaaggacgtggaagccatccacaaacacattggtgccaccgaacttgcgcagggcgaagtcatttaaaaaaaatttatgtctgagtgattacgggactaaatttgagattatctcaaatgggtctttattagatatttaaaaattaaaatttgattgatcattcggaagccctacacgtttagatgcataaattcaacagcttataaaaaagttgaaacatgaatactaccaaaaagtcagaatttttgcatattcttttttacatgtcggttatctttgtgttttttgggaagccgatagagcttgttaagagcatttgaatgataccaagtttattggaattggttaacaaataaaaaagttatgatgctctaaacttggctcagactataccggccagactatagtgtctcagtccgaataattttttaattgaatgcactcgtttttatgggtagaccgagttttatagaacaaaatttcgatagttttgaagacaaacttttttgttgcccaattcatattctaaatttatttatttacttttgtttaaattattttgtcaacaataacataaaaatatttttacaattttgttacagtacaccttgccctgtgacagtatcgagcaacttccccacatttcgttcaacatcggcggcaaggcgtacacattgacgggcaaagactatgtgtggaaggtcaactcacgggggaaaacaagctgcctgtaaattggaaaaaccaaatgaaaattttgaagttttccactttctcatttcagctccggcttcatgggcatggaaatgtcatcgactgctgacaaattgtggatccttggcgatgtgtttataggtgaatggatggcatgattattttttaaattatcaccaaaatttgcgtaaattcgtcaatttctgttgaaatttttgtctttaggccgctattatacagtgtttgatgcgggccaaaaccgtgtcggttttgcgcaggcaaaggacgaaaatgagtgagttcaataacaactcaaatgccaaatttaaaattttcctttttaaccttgaacatgaacaattttcaattctggaaatgtcttaaaaattaaaatttttagttttatatattttaaatatttttttaaataattaaaatgcacttttagcgagcccatagaaccaaaagtggacgacaatgatgatgctgatgatgcggatgatgatgggatgccggcatatgatggtgatgatcaagacgcttcatcttcttcggctgatcagcagcagtcagtggacagtgacgacgacgaaccaatggaaaacaattgggacaaattctgatcagactcagatgatcaaaaatgcttaataacaaaagccattgtagagaatcagccgatatcacttcaatattgtatagcaaaactaatttaaactttatttttgcattttttagacaaaagttcaaacaacagaactaactaacttttaca

SEQ ID NO: 10999 - DNA, 4191 bp, Heterodera glycines
ttgaaaaattagaatgaacttaacattggttttaattcttagacaaatttttggctcggacaattgggcgttctggtgggaccttctggtcacttattcggatgagccgacattgagcagtgatccttccgtgtcttgtggggacaaaatcatggccggaagaaaccaattcgaattcccaaataacgccgtaaatatttttatttcctttaattcgagtctggagcctattagagatcgtgcgagagtctcgacggttcccgactcggaaaatttctcgtgtttttcgcttgtcggttcccgtcggtctcggctttttagtctcggaaaccgagaaatttttacatcgttaaggacggccacttcgggggggggggggggggggggggaatcgccagcgaaagtggaaaaatttttgtgttccataactttttttaaatcccagttttaaaaaaaattcgtatcattcaaaagctcttaaaaaactttattatgcaacaaaaaaatcaaatagattaaaaagttttttagagttctttaatagcttaaaacttgcttatcaatattttagtttataaatacatagatgctttctaaccaattttgtaaaatttggccgattttgaaaagatttatgtccgaaataatttgcctcattgaacagaattggccaaacggaaaaagaaaaaagggtgtttattttttttaaaaatatttttagtcagaaaaaagggcgcgaattttgacagctgctcagaagcaaattgatgagctcaaccaaccttgggtaaaattaaaaaataataataaattgttttaattttctttgtaaattccgccaacaaaaagatgaaaagcaaaaaacattttatattcaacagaaaaaacaacaacaaaatttttaaagacattagtgtaaacaaaattgagaaaattattaaataattggatagaaaaatttgttttcattttattttattccttttttcattcttaggctgtcatcaatgaagatattgagatgatgacggctgaacccgccgatgctaatgatgatgataatgatcaattaccaaccgaatttgacagccgtcaaaaatggaaggaatgtgcggacatcatcgcgagtggctaccatcaaagtgaaagataaaaaataatcagaacaataattaaaataatatttttttaaatatagttttctgtagcatttagaacagtaattactgtatttaataaataaaattcttagcatttagtattgtatacaaagggttaacattgtataagaatctcagttctgaattcatcaatacaaagtggggataaaattgaaaaatacagaattcaaaaaagtatactgtaattggatatcataagttatttgcgcataaattcacgcttaaaatttcaatcatcatacaatttattgtgtcacttttttaataattctgaatattattatctcaagttttcccctgaaattttgagaatgaagagaattgacgacggctccgattgtagaagttataaaaaattgaagttttagcataaaataaaattcaaaatttcatatataaattttgaaaatcaaaatattttgcaattgtctaaaaaactgaatttttacacaattcttggcattttttgagggttaaaaggccattttttgtagtttttaattcatatttgggcatttttcgtctttttatggcatatttgagggatttttagcgcatattttatgtgcatattttgcgttttttagtccatactgttgtgtccacaaggaacaacagaaaaataaaatttattgttggaagacaaatgataacaaacaaataaataataaacaaaacaaataaaataatgatgacgacggagtcagaggaaggcaaaattggaaggagcaaaacagaaataatttagaactgaaaatgatgataaaaataataatgaaaaataataatgaatgagagcgaacagcgggggagaataatgacaggagagtatggcgtcacaaataacatgaacatcatcgttactgtattggcgctaattcaaataaataattaaaatccatcatatccaacatctccctccttaaattaaaagtccgacatctcccttcttaaataatgttgtcgtcacggcgaataacgtatcggcggacggcgttgtctctgaggacgttgcgttggttgaactgggagattggtcggcggagtagtcgcgacagagcggtggcaaggactttgttgttgcggaacttgctcaattgtatcattcggaaacgtcgtttctgattgataagggacaaaagaacgcatttggtttacatgtcgcttgacagtaatattcaacaatggaattttgactttccaaatcagacctttaccagcgacgattttgccttcaaaccaatttgacttgccagtttttccgtagttcaacacacgaacagtgtcaccgattttgaaatgacagggacgttcatcaattgtgttgacttttgttggggcgcttgacaaatccaatgtcgtcgcgatgggagattgcgtggccttctcaatcggtacaatccaatcaagtcccatgatgtttggagctccggtgtttgctactgaacatttgagcttaaattcaacacctttaaatttcaccaaacaatcaaattcgcccaacaaactcaatttatgcccgtaaaaactaccaacttttttaccttgacttctcaattttggacttcccaaacttatccaaagtgattcctgaataatcgtcagatgcgagcaggtgtcagccgcaagcttcacaggatgaccattgatcagtggatgcgtccaaatccaatcgtggcacttttgagtaacacaaaatgttgaggccacagtgacagcgtttgactgcgtgcgttcaggacaaacgggtctgatgtgtccacgttttccacagcggtagcaattcacatcctctgcataaggacagtcgttgacatgaaattgaccacatcgcttgcacttttgctgttgatcttcatcggtcctattcgaattgaaaggaaaattatactctttcgaatttggaaccgaaatattgcccttttggttgaccattttacctcggttcgacttcttacttccatcgcttactcgttgcggtcggacctgcactgaatgaacttgtccgggaccagacaaagcggcggccgaattttgaagcgattggatggagcggcactcttccagaagtgcttccaaagtcatggacctcggcggcgttgattttcgcgctttttccatttggcggagacactcttgtcgaagttctttgtgcgcgtcgctcaaacctgtgatgaaaataaggcatttgacttcctcctttgacagagtcatgtcggcgcgttcacagcgagcattgaccatggcaccaaactccatgacattttgcaagaggccacatgacagctgaaagcattcgaagcgcctgacaaaaattgatttagtgtcaccaaataatgccttaagagtggaaatcgtaagctgaaactcaatttcggcaggcttcttaggaagaacttgctgttcatacctcaaataatccgttgccgatagcttacccaaaatcaaacgcactttcatgtcgccggtcaaatccttaccgtccttctcgacaaattgtccaaaacgatcccaccaaagtgagaatgtttcatctgcctcggggtcgtaatggaattggggaagttgactattgatttgactgaagaggtccgaagaactggcacttggtgccgtatttttaggcaaaatttttgaaattaaatccaaaaactgtttttgctgcgcttccagaataattttgagctcttccttcgtcgccatgatagagaaaatgaatttgaaatgacagtgacaaataacaaatataaaattaaatttatgccacttgcaatatttggcaaataccgaacaaacacttagctttactcagtcagaatactgagaaactcttcaggcttgcgtcagatggggaataactttagtgttatgggttatgtgaggtggccgtcagagtagctttttggaatgttcacggtaaagcacaaaatatgcactcgggcgtcgccaatgttgtttccacaaggaacaacagaaaaataaaatttattgttggaagacaaatcgataa

SEQ ID NO: 11000 - DNA, 2230 bp, Heterodera glycines
ttttccccccctctttatttcttttttatttaacttttcatttctttcccttttgtcaatacataatttttccttcacttccaccatttccttttctttccaattttttgcccattcacatctgcctccgatgttgattcttttgttcccctttttccgatcgccattttcatggggccgtttttgcattcatctcattatttccctttgtttggcatttttctcccccgccgatttttgtacccttcggcgtcgctcttttgcatcttaatctttgcccccccccagggggaaaatgttctggtacttaagtattgtttatcgtctatttggggccattccattccattccattccattccatttggcacacattcacctcttgctcttcactcgttctcactcctcaccatctttttctttttgctgaatctttcccaatttttgaccccctcaataatccttatcgcccttcccttcctccaattttcaccatataatccatcaacatctcgcgtataatcatccaccaatttttgaccattttatcatcatcatcaccaataaacattttgtcggaaaagtgttgaaagggtcagagggcaaaaagggggggaaaaattcgctcgggaacgaagtgaccaaaggggagccaaagccccgagaatcgaagcgggggacaatcccccgcagagcagcagaaaaaagggacgggagccagttcctggcggttgacgcagttcgcggccggaagtccaactcttctcccgaacctcaaccgggagcgccgacagctcttcaaaaagtcggtggtgccgttacagcaacaaccgcaaaccccatcttgtttgtcctccccaccccctccccagttcactcccttgggcacggacccaacggcagcagtagcagtttcaggaaattgagtgaattgggcccgagggacgggagagaaactcccgcgcacagaccccctagctgtcagcgccggccgagtttctttgccacaaacaatttggtgccgttagcagggggcaactgcagccatcaacaatcggtctacgagcgaccaacgagcacgaattcgagaagctaacggcaatttggtgccgttagcagggggaccagcaacaacactccggtcgcaaaggaccagcacaaccaccagcaacagcacttcggtcgccgaggaccaacacaacgcatttgaacaaaaatggagcgacacgacgacgaccaattcaacgaaaacgcgaatcagggggatcctcccccctctgatcagcaggacgagaggcgagcgatcggagctcagccagccaagcccaagacagtcttggaagcgcacggacttgggacaagccaaccgggtgttacacccgccgtgacgaagaatttgcgtagcggactaatcgcagtgcggtcggcacgggaccaaatcgaaagagcagcgggcactcttgccgcgcgaatcgtcgaagcgcgggagctgatggacgacgattacacaaggggcgaagcgctcgaacacgctgctcggatgatggcaatggagcgggggctcggagaagtcaagcgaatttttgaagggcattttgagaagggcatagccgaagcgggtgcggcacctgatgaacggcaggacttcttctatgattccattgccgcccctttgccagctgcaacgaaataccttcgactgcgggagcacccaactcccgccgaactccttcaaattgcggccgagcacctcggggatctgcgagcgatgcggcaaacattcgaggacgaagaaagggagagcatctcccgatcgagcagatcagtcgagaccgagaacaatcaggcggaggaagaactcccacgtgccatgccacgacggagcatgcaagagtgggagacatcgttcagagaagcttatgttcgacagcatgacgaactgttcggccagcagcaaccattggtcaaccaagctgaacgggtggccacacccgtaatgtcaaacctggccgcgcttatccaacgacgctcaaatgctccctcggtggccagtgttcgtgtgaacaatccggtcagggagtggatggcaaggaaccaaggggtcgggaacggacccccggcacaggcccaacaaccaacacaagcgcaacgcccgctacaggccgtaccgcaacgcctcgaacaacttacgctccacgatcaaagagccattttccctcggacagcacct

SEQ ID NO: 11001 - DNA, 1375 bp, Heterodera glycines
  unsure (1)..(1375): unsure at all n locations
gacacagtgcaaccgcagctgctgatcggaatacggcgattttgggacttcgtacaaggatttcggaagacggcggaggggacttatctgatcgacaccgtcttcggcactgtgatttgcggggagcagtttcagaccacgacgggagttactcccgattcgtcggtattcgcgatccccccatgtggggaggacgagcgggatcaaatgccatcggtcaaagcaatcgaacagttttggtcggttgaagcgatcggaattcgcgacgacccaacacaagacgccgacacggaggcgatcatccaatttgaacgatcagtgcggcaacacgacgacggacggtacagcattcggctcccatggcgggaggaacatcccgagctgccctccaattatgcggtggcttatcgacgactgatcgggctactccagcggcttcagaggacgcccggagtcctcgagcagtaccaaggagtgatcgaggagcaattgcgggctggcgtgattgaggaggcgacagtggggacgggaagtaccgagtatttcatccctcatcaggccgtgatcacccccaagaagctgagggtggtgtacgacgccagcgctcatgccaagggagttccctccctcaacgactgccttttgagaggccccgtgtggctgccagacttggccggaatgctcatccgttttcgggcatgccaagtacccgtactcgccgatgtggagaaagcttttctgatggtcggcattgaagaagctgaccgagaagtgtgcaaatttctgtgggtgcgcgacccacttggaccattgacaacggccaatttggtgccataccggtttcggcgattggcgttcggcctgacacccagcccgttctgtttggctgcggtggtacgtcaccacttgcgcaaatacaactccgaatttgccgagcaactcatccgggatacatacgtcgacaatgtgttaattccggccgacaccattgaggaagcgacgacaaaggcccaagaagccaaacgaatgttcacggacgcaaaaatgaatcttcgggagtttctgacgaatgaccaagggctcaatgacagcttttcggaagccgacgcgctgggcaaaacgacagcgaaagttctgggactggagtgggactcagtggacgattcaatccaaatttccttcccgggagttactcccgagggagagtgccgccaaacanggaggacagtcctcaagaccattgcgcgactggtagacccgctcggactgctcgcaccgggcaccctccccgnncagcagtacttccaaaggctgtgggacactaccccataatgngacgcgcctctcgaaccggacgatgcgcgagattggaaca

SEQ ID NO: 11002 - DNA, 1302 bp, Heterodera glycines
aaaaaagacatatgtcataggtgatccttaaacacattatttgagtctcgggatctcattgtcaagtctcgactcttgagtctcataaaaaatttagtctataaactaagacagcgaaaaacccagattcaggtcctactctagtagcggtattcaagagtctcggttcagactcaagaaaagtatcgggattttcgggaatagcccaagtctcgagcacaattttcgaaaaccatattgtcataagtgatccttaaacactctatttgagtctcgggagtagattggaccattaaaataaatttatttaaagaattcatagtccacccacccggaaaatatattttattatatgtatatactataaaaatatataatttcaagaaaatattattacaatttatgcttttcgctatataataaaataaatttttataaaattttcttatgagaatatctccccatattttcattgcccggtagcttttggcttgtttaatgaaatgaatttttacgtggaaatttgttggcaaatataataatattcattatttttaattttccttttcctttttcttctgactatgatgtaattttcatatgctgagtatgtatgtatattaatgtatttgccaaattattgactttaattgatttgaaaattgttggcaaaaaaaaataatttattttatgtaatatctataatattttaatttttttaatattataataaaaatatattttcacttgaataaaacataaaattaattttaattcgttccaatgaaaattgccctatttttcgcgctgtttttggtcattgatcttcagctggaaaatgtttttgcaactgatctgctcattaaagcattctccatcgagagcgagtatagtgattatttgcattatcatttggccaaggtttaaaatttattaaatttaaaatcaatttgaaattaaaatcttaaataaatatgagtctaaataaatgtgcttatatgagtagttagccaaaagggattatataatttgttttgccacttgggaccaatttttataggtttaaaaaaatgggttttgggctttttagtgccgatgtcggggatgaacagcttcattcgggatgaagtttggcaaattcccgactccgacagttggccccaacccctagcttcaaatctgaatttttttgggacccattcccggcatctctaatcccaaacattcatccattgaaggcttttgatcccatcaagcctaaataaagggtcgatttttagggggtgtattttttttttgtgt

SEQ ID NO: 11003 - DNA, 4186 bp, Heterodera glycines
gtccataccaagtgatcatttgggatcaacaagtcgggcaccatgatctgctcgccgccagctcgtcaaccagcagcagcaaccgattctgtgatgggcgtgaaatttttcatgtgccgcgtcaacgggggggcggctgatcaacgacaatatgttttcctggcggatgccatgcgaaatgatgatgccaatgccaatttgaatgatgctgcattggcgaaatgttttgtgcatttttacaccgtcaaaacggacaggaagggccgctttttgttgcgatcggacggcaaactggcggaccgttcttccatcttcaaccagcagtacaatgtccatttgatcgcattgaatgacaattccgtaagcaacattaaaattaattagggcgctagttcagctctggaatatggttcgtccttgttttcaagggcatgcattaaagcgggtagacgggggcaactgatgaggcttccttccgtccttattcacatagggaatccttgtaaaggggaactcatgtttttcgtccttatttttaagggctagcttgaaaaagaaagaggttcttgaacaggttcagcagttgtaccgctccggatgcgggatgggaaagaggggtgggaccgattgtgtttcggtcaattggtgagggaaatgggagtggtcaggtaataaaaaactcagaaacacaattacggggacaaaaatgaatgcttacaaattagtcaagatgtaacggagttgaaaagaagcggagagaggatgaagagaattgttgccttacaaattggcggcacttcgtagtcaaaagtcgtctgctgataaacactttgttgatcagaacaaattaaggcgattttgaagaacaatttattttttttaaaacacggagagaggaagacaaaaaaatcggagaaaatccagaacaacgacaaaaataataaaaatatcaaaacgaatatgaaatttaaacacaaaaataacgcgaaaagtcatcgttttaaaataattaaattgtgatcccagtacgcggcaagtgaatcgtcgtccttgaaaataaggacggagcgtgtccttgttgaattgtgaaaaaattggctgaattgtggccgtaccaaaattttcatagaatgacgtcctgaagaggaaggacatgcttgtcttatgtttgtcattatacgaatcgaagttcctttttctcgaaaaaaaattttatttaaatgtttcgtcactttcagtaattaaacgctgccaaaatatgcagggtttatggctcaaaaaacaacaaaatagtaattaaaaatgaaaaaaattacctaaaatgctaatttgtgaggtaatattgttaagaaaaatttttcgtaacttcataatagcacctaaacaatttttcgtatgtttaagaccaatcagaactcatgggcagggttccatctctaaaacatcaaaacataaaatccggcacacaaagttgaaaaacccggcgaaataaaaaaaaaccggtaaagcctggaacaacccccaaaaacctggcaaattcggggtttacccgatcaaatagcaaccctacctggcaaatgcggggtttacccgatcaaatagcaaccctacctggcaaatgcggggtttacccgatcaaatagcaaccctagctggcaaatgcggggtttacccgatcaaatagcaaccctacctggcaaattcgggggtttcccgataaaatggccaaccctggctcaggaaaaaatagataaattcttaaaaatcttttattaccttccaacaaataaaaatttatccttcaacaaatttttcacacctttttgaagcagccaatcgttgatgatgtgtcatatgcggcatctaccaaagtggtggcacaacgtgtttatgtcaatgacatgcgaaactcggtggacacaatatgccaacatattgatgagcgatgtgtgatcaatttttatccgacgggatatgatcgcgagaaacaaatgaaagaaatgacaaaaagatggctgacagatcagcagcattaccaggaaatgtcggaaatggtgagattattttttaatgttgattgacttaaataatacaaaataattaatataaaaataccaaaatatttttgaaaaaatatttttttgcgtaaagggtcaggaaaagccttctattagcttataaaattaaaaaatcgaaagttatcctcaaaaaacgaaatgcttgacttaattcaaattttggcatcctaattactttaacaattaatttttaaataaagagcaattgataattaattctttcactaattgaattaattatgcaattaattattcaaggtaaatttcttcctaattgccgtttttcgcgaactgattacaagtgccaaagagaaatcggcattaaacgttggcacattgacatccaatgaggcccaattaattggccatttttggaacaaatttgcgagcacaaaaaagaacggactgttgcataaacgattgagattgatcgatcaccaaatggtgcgactgatcgacgatttttgtaaaatagacgactcatttctgcgatcacaccacgagttgaaaagtgctttatcagtgcgtttatatcaaattcattttattaattgtttttaattataaaatgaaaatcaataattatgataataatcattgtgttaaaatatttattaaaggaagtgtaataaaagtttcataaaattctaaaaaaataaatcaatcaaaaaaattcaaatttttgttatctttatgaaaaaagtaaattaaaaaaatggaaaattttcaaaatctacttctataaaagtttcacattttataaaattcattttcattttaagctaagtgaaaaatttcaatttgcctgtctttattattcataaatttcaaatttattttaggccttattttccatgaaatcttatttattattttggaggctttttcaaataaaaagtcaaccccaaattaattggtttttgaaattttattttgcagttaagcaatcagccagaaaaattttgtgaaaattggccaaaagtcaaagaaacatcgaataaatatacaaatttggacattgtaatggaagcatttggccattggctgcataccagtgaacagcttaacaatgatgaggaaaatattatctttttttggattgaagttttctcgaagcggcttcaatcaaggtgttataattggccgtttcttgaccaaaatttgttcaaagaaattggtaattttttggatgattaatttaacaattattttaaaaaaatcatttatttagcatgaggaccgcaaaagaaaaattattatttttgatcgttttttgctaaaatttttagaaatcatataattaaaatatttattaatttttgtaaaattcaaataaagtatttgttgttattataattaaattactttcattattatttttaatatgcttatagagctattgttaaattaattaattaattaattaatttcttaattaggtatgatgtttgtcacagtaaaagatgaacataaattgacattagacaaaattgtacgaataaaaaacattaataatatgttggacaatatttgtagaaaaattttccaaataagtgccaatgagcaattcaatccagtgccgtggaaggaacagctttgtacaggaagttattttcaggtaaacttaatttttctgatcattaatttttcgagtatttcgaaatattatttcaaaaagttaaatatgtttttatattttgaaattttattccatcttccagaaaaaaatttcgtatctttttttaattatgccccttaattcctttggaaatccttgtctctttaattaatccctttaattaatttgcgatacggtatttcattaataattatgcgtaatacaaaaatttaaatttgcaaatatcactaaaattttgatttcacaaacgcaattttttcagcaaaaattaaaaaaaagggtcaacaattttgataaatgttctgggttttatgtttggaatttcaaatgcaaattttagaataattctcggtttaacaaaaaaaaaataataattccatataattacactcctaattacagacagtctctcctaatgatcttagaaataaacgaaaaatgtcaaatgaagaagaaaatcaaactaata

SEQ ID NO: 11004 - DNA, 1726 bp, Heterodera glycines
  unsure (1)..(1726): unsure at all n locations
ccgccggacccccntcccctcgcacttcccaaaagttttttggaaaaatgcgccgcaaaaaattgttaaaaatctaatttttttttatcccgaatgcactaaaattttatgatttgcttctaatttcctcccaaaaattgttaaaatcgttaatgggagacaaaaatatactatttgatacatttttgatcgaataaattgtaaaaataactgatttgaagcaattttgcgaaatgttcttatttttgaccctaaaatcttattttttggccttgatgttcttattttgaaaaattttcgatacgcgccctgatcaaaattcacatttattgcacaaaaacaaatcaaatatactgaatggaatagaaaatagtgattcatagccatttcaatcatttgaaatgattttaggacaataaaggttgatttttatgaaaatctaatcaaacattttgccatacttttttttgcctagaagtaacgtcaaaccaaacccaaactaaaaccttcacaaagaatgtcatccaagagaaagtatcgagaaatggcattacatacctatgtattcttatgatagtcttttttagagtttttatgtggcataaagccactcattgattaatccgttaactaaccttacatattaacggctaaatactcgacattttacccggaccacccctcagctcatctctgattcatcacacttccgttttcacatacaatttcatattcatcccaaaactgctgaaatggacactgcgggtattttttttatacacatgtgctaattttcacaaattaatcacttctctgtttaggacaattcagctaatttttgaagttaatgtctttttaagaaaattgttcaaaatccaaaaaattatatgtcaaagttccttcaaatatgttacttgaataactgaaattaagtgcaacattactgtttagagcaactcagagacaaagtggacgacccgtccacctcaatgcccccctcccttcacaacccagacaatttgcagggcatttacgtttatcaacttccctttcccggttggcatgaaaaaacaataaatggaaagcaaaagtaaatttagggacattgccggaaaaagctcagcgcgagcaacttgctgctgttgtgcggaaatactcgaaaatcgttgaaattcgtatgcattaatccacctgtcttatgtgaaatcaataaatgcttgttagggttcgatgctgttcccaataatccggatgtaacatctgtacaagccggcagaaggtaccaattgccacctctgagccgcagggcactgattgttttccaaaagtataaattaggttaggtaaaaactaacaaatttcgaaaatgtccaggatctccatcgcaagttacgaagcactgcttgccgagtttaacaagcaggtgatgtcccagtgccatctgagcgcctctacggcaaagtctgagcacatcagtgctttgatagcgatgcgaaatgccgcttccgctggacacaaccccacaaaagcacaccaaacaatggcagcaaaaaatgcacaacaaagttcgacgacagcgacagctgctgagcagccatctcaacaacaacaaccgcagcaactgtactcctccaagaggccgatgactttgctcaaaatccaaccacctgcaccggccgtcaaagcataagccatggactcgcagacgcacacacaacccgaccca

SEQ ID NO: 11005 - DNA, 2595 bp, Heterodera glycines
gatgtcatttggcgccacccccggaccctccaaaaatgtttgtcctcttctcacagtcagccaaaaaaatcacccagtccgcctcctgacccttcaatgtaaaattagtttcatttgcctcattttacttaggtttctatttccattaatttcaatgaaagtggtggcggtcattgcgcatcggtcatcaaaaggccgattggccgtcaaaaagtgcttttggttgaacagcagcagcaaagccaaggtgcagcgcacggttttgagaagacattgccaaattgcaactcaaaaattggacgcacaactcgggaaacgacccattcgaattcaatggcagaagagacgcaaagccaccgggaaaagacgacgaggggaaagtcgcaggaaaattcggaacggggacgatctgcgaatgtaagacaagtcagaagcaactcatcatcgagcaacacgtcgacagacacatacagccaggtgggtatactgctctaacaagtcggaccatatgtcaatcattcacttcaatagatttgtttacatattttttttctgctgcgtctctgcaccactaacaatgaatccccatttcagaaatttatacaaaaaagaactgaaatcttaatctgactacacatttaaattgtttattcttatttcaacataaattttttcgtttttaagtctcctcggaagcgttggcgtcatcctccacaaccgtcggaattcaacgaattttccggaagcagacacaaaattacgacaaagaaaccagcaccagaaacaaagcacaagtgggaaagaaaacatcgctctcagagaagcacagaacggagaagggaaagtcgcgtggagaaaagagagaaacggcgcgagagactgcggtcgcggacacgacagacacttggggtgggcagagagagggagagatagcctttgacaatttaccactttaattgacagaccgcgagacgaacagagggcgaaaggagcggagagattgcctcaggcggagacagaagcaaaaggggcgaacacggcggaggaaaaagcacttcagacgcaaacaaacgtagcaaaacgaccagcaaagctgagaagtacaaaggccgatcgaacggtaagccaagaaaagctttgtcaatttccttgcttgcattttccaatttgactttaaaaaagaaaggaaatgcgcgaattttttaaaatttctcttttgaatttaacatcggcgatttaggacaaatcgaacactttgcttgatattttgtaacatattttagaaagggtacacaccaaaacctcctccaacagcaacagcagcagtcaattgctccctccgccgcctgtgcctccgcttcgaattgataaaacacacgaccaacacaaaaggcgtcgttccacttcctcatcctccgattcccactcgtcctgcacatgttcctcctgttcaaggtccacccacaacttttatcattttcctccattttagttttacttacatggtttaacagtaaccctttagcaattcgtcatccaactctcggaccaaattcgttgtcggaaaatagtgactccgagttgagcagttctgagaatgaagctgaacaggagcagtcatcaacacgacgcagtcatcggagcagaaaggatgggtttgtttcaccaattgtttttgtttcgccaattgttatgcttattggtttagatttaccgacgaaccttcccaagtcgacacccgacaaccatctataaaaagagagacaccgaatgcacaagctgtgcacattaaaagcgaacaagtgccattggtcactccgattgagtcaacgacaattgtcactaagaatatcgtacaaaatgctggtaaatgagtaattgttggatatcttttttaacagcattcttttagaacgcggaaatgaaaaaattatgcaaaatgaaacaaaggaagagaacacagagaaaagcaaagacacaaagggggatgaacagtcgaaacagaaaaaccaaacggcgtcggaaaaggacgaaacggcaccgaaaaagagtactgatcaatccatgggaatttgactatggtggggaaatgctctgagcaaatttagcaactgccgttgctccatctttgcctgtgcagccaccgcaaacggttggaaaggtccaagtgccaaggccatcccaacggacggtcgtctgcatcccattggatgtccaatcgacgtcatcaccacccaccgatccgcgacaaatgcgtccaaaacagcaacgaccaagcgctgttacggagtcaataatgtgcttggatttgccacgctttgtccataaagtgagaacaacagcctgcagcggcaatgatcggccgtcaagttcatccataagcggggaaggagcaaatttgacagaagagttgcctaaaagtggcaaatgttagctggattttcatttattgattgaattttacactctccagtgaaaactgtcccttctacggcaactgattggataaagcatgaacccgaaaatgccgaaatggaacccaacttaaaaataaaaacagaagaatcaaacgacggtgatgcccaagtgagaaga

SEQ ID NO: 11006 - DNA, 2375 bp, Heterodera glycines
aaaaaatccaggagttcttttattcaaagtaaaataaattattattttaatttaaaacaatttttcacaaaaaaataatttaatttaaattaaaaatttttattttttatggattaaacaaaactatttatatttattaaaatgaaaattaataatataatatttatttaatttgaaatgaaattaaacatgcaaaagtaatcaaaaaatgcacataaaaataatgtacaccggccggattcgaacttcccccccccccctcaaaatgatgcctcagaatccccaatcacacagggattctgaggtctgaacgatgtcaaaagtgaaaactgatcacgtatccgtgatcagcgtcattaaatggccttaaagacatattttttgaagattttgggtgaaaaaattttttcactcaaaaaccatgtgcacccccctttggtcccgaatcccaaaatcacttttatttttataacttttttttaaaaagggataaaaatgtaaaataaaatttatattatagagaaaaaaattgcggatttttgtagtttattatttttacagaatgacttttcagaagcgagttctgaatttttttctgaaaaatctaaaattttcagaatttctggaataacttctttcatattgatgttagaaaacccaaataaatcccataaaattctcctgatttttctctatttttaaggctttatttgctcaaaattggtcaacccttaggctagatatgaatttttcaatattcgcccaaaatcccgtgggccaaaaaattggaaaatatttttgaatttttaaaaaattccaaaaattttgaaacgaaaaataaacatcatattcgtgctcagcacatcaaaataccccagaaaaatatttttgacccccattttcaacccaaaaaaaatttccgaaaaatgaatttttgaaaagttattaaggggttgtaggctaacatgtattaacataatgaaatgcaattaatttttgaaaagttattaaggggttgtaggcagctttgcggccttagatgggcgcttcgcgcccatttcttaatttgtggggctcataagaacacttcgtggcctcggtgcttcgcgcccgcttcaaaatatgttacatgttacatgaaaacggagggagttcatgaatttcctctcttagcatgtaacatgtaacatgtattaactaatgaaagcaatgaatttttgaaatattattaaggggttgtaggcaggtttacgccctaagatgggcgcttcgcgcccatttctaaatttgtggggctcattagaacacttcgtggcctcggtgcttcgcgcccgcttcaaaatatgttacatgttacatgaaaacggagggagttcatgaatttcctctctgagcatgtaacatgtaacatgtattaactaatgaaagcaatgaatttttgaaatattattaaggggttgtaggcaggtttacgccctaagatgggcgcttcgcgcccatttctaaatttgtggggctcattagaacacttcgtggcctcggtgcttcgcgcccgcttcaaaatatgttacatgttacatgaaaacggagggagttcatgaatttcctctctgagcatgtaacatgtaacatgtattaactaatgaaagcaatgaatttttgaaatattattaaggggttgtaggcagctttacgccctaagatgggcgcttcgcgcccatttctaaatttgtggggctcgtaagaacacttcgtggcctcggtgcttcgcgcccgcttcaaaatatgttacatgttacatgaaaacggagggagttcatgaatttcctctctgagcatgtaacatgtaacatgaatttgcgagggtatcccatagactaggtgaagcgctgttatggtgctatctccagattttctgcctttaaagttttttattaatttttacagcttcactatgttatttttttagcacaattaattcataaatattttttcactaactgctctgaaacgcaccaaattttatttccgagttattttaggcactcgaatgctttcactatcaaaaagggagaagaataaaaatctaataattttgtaataattgtttgagtaccccaaacggacacttgaaaaaatcgatttttttgttttcggggcattccccccgaaccgatgcgaccagatatatggggacaccgaatccttatgggaatagcttccctatagcctgtactttatttctgcatgggatttttgctcctcataattgtttgagtgcaccataattacacttgataaaatctatttttttgtttgcggtggcgtccccccgaaccgatgcgcacagatttatagggaggacgaatccttcg

SEQ ID NO: 11007 - DNA, 1357 bp, Heterodera glycines
  unsure (1)..(1357): unsure at all n locations
atgaaaagggagggagttcaagaatttcctctactagcatgtagcatatagcgaaataagtttcatcataatgaaaattcacagcaattttgaatagttaattctcccaaaagttttttattttaaaagataataattttttattattaacttgaaattattaaaaacgggtaaaaataagaaaaaaatacataaaaaataatgtataccgcccggattcgaacttccccccctcccccaaaaaatgatggctcagaatcaccaagcacacagggattctgaggccttaacgatgtctaaggtaaaacctgatcacgtattcgtgatcagcggcccaaataaccatcgaatgcatttttatttaaaaattttttaataaaatagtctttattaattaaaaacacatttaaaattattaattgaatatttattaatttgaattaaattaattttttacaaattcaaaaataaataatgaaattctttaattaaaaaaataaatttaattaatttaaaagaaatcttcaaattaattaaaaacggtgaaaataacttaaaatgcatagaaaaataatatacgccgtccggattcgaacttgccacccccctgctcaaaatgatgccccagaatccccaatcacacagggattctgaggtcttaacgatgtcaaaagtaaaatctgatcacgtattcgtgatcagcgtcataaaatagccctaatgacatgtttttgaaagatttttgatgaaaaaaatttttcactcaaaaatcatgtgcacccccctttggtctggaatcccaaaatcacttttatttttataacttttttctaataatttataaaattgtgaaataaaatttatataatagagcaaaaaattgcggatttttatagcattttacttttcgagaaagacctttcagaatcgagttctgaatttttttctgaaaatccgaatttttccagaatttctggaataacttttttcatatttatgttagaaaagccaaatataacccataaaattctcctgatttttctctatttttaaagctttaaaacaattaaattgagcaactcagtaataagttatgatttttcaaaaattagctcaaattctcgagggccaaaaaaatggaaaattttcaaaaattttttaaaaaattcaaaaaattccgaanacaaaaacaaaggtcatattcgtgctcagcacctcaaaataccccagaaaaatatttttcactccattcttncacccaaaaaaaatttttcgaanatttctagggggcctagctcgaanatttttgaaaatttttcgacatatagtacaccattcgatagcattttgaaagctc

SEQ ID NO: 11008 - DNA, 2354 bp, Heterodera glycines
  unsure (1)..(2354): unsure at all n locations
aaaatgtttttgattttgtccctttctttgactttctttcgttgcgnnccattcccttttttaatttggccaaaagcgaaatgtaattaaaagtttcacaacacaaaaagattgcatgtatttcaaattcatataaataagcaaaatgggaaaggtcaaattggtcgaaaaataattttataataattttataataattntaataattttattattaaattttattaaaaatattttcgaattttatttgatttatttctcttacatttaattcccaaatttcgcgtccctttgatgaaatgttccgtttgaatttcttcacacttttcccaacacttttcttcgccctttcccgcggtaactcggcattcattgcctttccttaatcgttttgctcatttgtcagctcattacactaatgagccccctcattacgcgaccgttccctcccctccgccctccccgtcctaccgcacttataaccctgcccccattaacaccccaattccgtcttaccaaatctatccgaccaattgtaagtgtccaattttggatttccttttgcaatttcaaattttgaagggccaccccaaccgtcgccttccaccacaggttgagtttgaggagtacaaaatgtcagttttgttttcttcccattttttcaggatgtgttcgtccgtgttccgtcccatgcgtttgttcgccaacgaatggaactccaaaattgagcaaattttgcccgacacggcttttcattttggcccattttgtgatgttcgctttgattgtcggctgattaagcctcccctcccctctttttcatacttatctgagtctatcaagtgctcagaaattaagcatttgcgttcaaatggtacaacaaataatgtttttggtacataatactgtaatttgtccccttttttaaaaaaaaaatgcaaaattattttaaacgtttcctggagttttcgaggtcgttgatcacgtcggcttccattgaggccaattccgggccccggacccaagcaaacataatttgtcaacttttcatcaccttttcttgctcagttaccaagtgccaatgggatttttaaattcaatagaaaaggaatacactggtggaaaaagtctttactcaagccgatcaaatttgaaaaaattaaaatttcgactagaaaatttaattgattattttttgtttatgtgtttttatttacccctatttatgtgctttttatgcaccacatttctttttttgtgatatttcatgacacgattttcgggccaggacattttcgtaccgccgttttcgtacgagtggatgtgcaaaaaaaaaattgcattcaaataatttgttaattttttaaattacttttaatgttttgacagttaagcttttattaactacaaattgaaccagcagcaagtaattaaaacaaaactaaataatgataaattggtgcatgatggtgcacagaaaaggaagtatcgcgatgccgacgcacggattcttcgtctcgtccaacgctataacgatatcaataacaatattgtccctcaaaatgatcacaattatgccaatcccaatgtgaatcccgaaaacattaacaattttctcgccggtatttcccgaaactatgagatgcgaccctagtttgtcccattgttattgttaaatttatgcattttttacattaaatttatgaatgggaaattaaaaaatgataaaattttggttcgattagttagtcataagtttttctaattgaatctgacgcttgtacaagaactcgtacgaaaatgtcccccgtacgaaaacggcggtacgaaaacgtccatgaccggtaaattttatgcaaatgcaaattttttcctggattctaggtagtccaaatagtacgaaaaacataatgaatgttcccaatgtaaaatgcttacaacaacaattatttataaatgttatggcattatgttcatttttttattggcgatattttcgaaatataaactttaagcaggaaaaaccgtagttgattttgattttggccatggaccagttttcacgatgtttttgcaatattacatattttcaaaaaaattatatgagaagggtctgccagagaattttttaaaactaatttgtaagttgatttttgtaacagattttgatcaaaaaacaaattttttggctaaaattttgaaaacctaaagaaataagtggaccgaaggtgggggaaattttgactgatgtgaaaatttaaaaaaatagtctgggtcgccctcgtttcggcgccgctcgttggaccataacttttttctttgtcaaccaaatctaacattcttggtatcattct

SEQ ID NO: 11009 - DNA, 2308 bp, Heterodera glycines
tacgaaaacgaccctgaccgcacgatttttcatcaggactagtccctaaaatccataaatcccgtttttcaaaatacaggttccgaggaggatcctacacatgatctcctgtcctctgccaatcattctctaattgtgattggcccccttttactttttttttttgcatttgtctaataattccacaacaatttccgttgttttcatttaatttcttcatggatcatttcttgaattccttcgtttctgacaatgaattgtccaccggggtacgtacttctgccctttcttcctcccttatcaaattccgtcttttgaagatggtcactgtcatcggccacgtctttctctgtgccctcttttccactttcctttggaattggctttacgctgccaaatgcgacttcgcctttctctggtcctctgctgacacttctcttctcgtgcgttttcttcgtattttatttattttttcctttttcagtctgtccccgtccttttcctttgcttagtcgccacaattgcctctgccattgcctttttgatggttttcagttggaaaaggaccgtcgtgttcattattcagcttgcccacctttgtctgctcttcactctcccattgaacattttcgcgtgcttttcccttttccaattcatttttcccctcattttccgtgttcagtgactttctcgactttgttcccattggctattcccttcaactcttttcgttgtttgttctcgtcttcctctatttcacatttggctctttggtttcgtttcgtttccttttcaattccatcattttcttcccttttattgtccattttaggctttgttcactgaccgactttcggcacgagttcagcgtcttctcgtcgttctcaattgttcttttatcactgtcattttgctccgctgttttccccacaacacaatttggcaaatcattttgttggacatcgcctggggtaacgcgtccaatccgtctcacaatttgcttggcatttgtttttttcagattctttctctgtcctcgctgggcccgtgcggaaaatgttagaaaattcgcatgaatatggcgagaaaatggtgcgatgtgtgctattctccgccgcggatgagcaaagtgacgcaaaggaagagacgccggcggcggcgacggaagcgacttttattagcaacgcgccgggggagagaaatgcgaacgacgcactcggtgagcagcgaaacaataaactatcctttttttgcaatcacttttaaacagggtagccagattaaaattttcaaaagcctcatttggcatgtaaaaaaaacctcattttggatcaaaaagcctcatttttacaaatttattcaaaacacatttaaaatgttcaaatgttatatttttgattgtccatgaccaatttgagtaattttttgttagaaataagcttttttgtgaattctgagcccaaaatcgaaattgattttttttttttgcggcgcttttttcaaaaaacttttggggaataagggggtcggcggtgccgataggcgccgccgagaaaaattttgtaatttttaatgcgatttgttaacagatttgtccgcaaaaatgaccaaattttgcgattttgagcaaatttttaagaacatagaaaaattaagaattttgaccatattttagcatattttcattaaaaaattctttattttgcggtttttatcaaaaaaccacaaaaagcctcattttgaaaatttagcctcattgacctatcaaaaaaaccacaaaatgaggctaaagcctcagatttggctacactgcttttaattcattaaaaagtgattgaatttggtcgttgataatgaatctgatgactacgcgttgaaaagtcaatagtatcagttggtttttgtcttatatatcgtggagaaaacagatgaaacacatttccgtagtcagaggcaagcagccctaaccagaaaaataaataaattttttttcaaatcaacgaaattagcaaagaaaatggacagtaattttcacaaaaaaattatttgttcaggcggtgttcagttgggcttgggcgacttcgttctgttcgcccttttggtggcacgcgcgtggagtgaccatccgacgggcgcagccgctgctttggttggcattgccattggactcttcgccaattttgtcgtcgccttttcatacgcgagaaaaaaggacgcttttttctttgtgcctgcgcttccgtgtccgatgcttctcggaatgggccttcacttcggcattttatttgccattaaaatgtttgtgcaa

SEQ ID NO: 11010 - DNA, 5689 bp, Heterodera glycines
gtttttgaagaaaattaataaaaatgcaaattttaccgttaaacaaacaaactaaatttattattaattaaaaattctaataataatttttacagaaataaaacaaaaataataaattgaagaaaaaatggaaaatataaactcgcgaatttacccaacggagttggaaaagaaaatgtgcataaatgaagcaattattgctttattggtcattgttttgtcgcacccatcacaacgattaccacacacataaataaaaatattgttcaaaaataatcagcaaaaatagaaaaaaaaagtggaaaacaaattaaaaacgaaatcccattaattaagggaataaaacaaaatggaaaaaataattaaattatcaaattttaatccggatttaaataccgttactgaaaagcatagattaaataaatgcattcacaaacaaaactaaccccaccaaaaaaggggggaggggagaaaaattcgaacatttgtcggcaaagtacaaagaaatgcattgcgatggagtggccattaattaattaatgagtgcggtaaaatggggccaaatcactgcgcgccgccgcctcctcactaatttcccatcaattctctgctaatgatcccccgaacatataataacaaaaagggggaggagagaatggatgggatgggcaatggacccgtggggtattttcgtttatactttctgagcgtggcggcgccctaaaacgagttttgtgtcccaacattgcgcacctgtttttgttttcctctgcagtgcctggggctgaatttaacaccctctcacttttgcgttatctctcttcccattttattttccgccaaaagtctctttttaaaaaattgctttatattttcaaaaaatgatacaaattttaaaaatagcgttgatattaggttgatggcgtaatgttattttgatttaattaatagtagagttgctcggtaccggtaccggtactggccggtaattaccggtttttttggtaccggtaccggttttttcaaaaatcaaagtatcggtaccggtttgtctagtaccggtaccgccggtaaaaatttgcactggtaagaatgggggtctgggtgagaaaggagaagtggaggagaaatttttgaaaaaaaaattaaattatttattttcatttaaagcatttgttcatatgcataagtggtcaagtggctaaaccttctgattttattatttgtcgcttgggttcaattccccactcggatagaatattcttcatattttctttaccattattttaattgaaattttaattaaaaaaatattccaactttttttctttcattttaagcatcctaaaaacccaaaaattaatcaattggtctttttttacaaattctgttaacaaatcgcattaaaaaatacaaaatttttcccggcggcgcctatcggcaccgccggccctcctgttcccaaaagtcttggaaaaaacgtgccgcgtaaaaagcggtcttgaaagcaaaaaaggtcattgatttacattaatttacatggccggagaccccttcgcaaaattggaaaattggctgctgaccccttgttttgcaataatctgaattttgaggtctacatctgaattttagtgttctttatcctgaatttgaaaaaaaaacttggtcaccctcaatatacatatacttctgaacaattctaatgctaaaaaacaggcacttgcgcgaaaactgaataaaaattttgtatttgaaaaattttgtccaaaaatttttacgttggaaaattaccggtttttaccggtaccggtaccggtaccggtggaaaaagttggtaccggtaccggtttttgcattactggtcagtaccggtaccggttttttaacaattaccgattaccgagcaactctagttctcacccttctgatgacttttttatttttacgaataaataaataatcgtttaattccaaatatttttgaatattttttcaatcaaattccataaaaataaattcaaatgaaaagtttaatcgctacttacaataatagtaaaataatcaaacgaagaagctataattggtaacattctttgtccacaattgttttttttgcccgctcattttttgatcagagtgagaaactcctcgcgcgtcttcggatcatcgctgaaaaataagggggtactaaaacaataaattttctgaatttttgaaaaaaaaaattaccgaaaaacgcccatcatacacgaggtggtggtggtggcattgatcttctgcacgcccctcatcaccatgcacatgtggctgaagaatgggaattcatacaaacaatataatatatatccaaatttgagtaaccaaaaaagctataaatttccccaagaaaaataatagcgacataatttgtgcaaataaattacatttttaatttttaaaaagcacctcaattttcaactttcatatcatactaaagcattgcataagtttacacttggaaaattttttgtaaaaaaatctataaatctcacatgaattaaacctggctcaattttaaagcgtaaaaatatggtttttggttttgtatagccaattgagttcgagaattgcttttaaatagaaaaagcaaacaaatgccgtcttgaattttgtgtgcccttccccaaagtccgttatataatgtaaatatatatgttcacctcgcttcaatcacaactccgacgcccgtcgggtgcacagcttggagaattgctgaagcaatttgcttggtcagtcgttcttgcactgaaaaaagtaattttaattaaaaatagagtaatttaaatgtaacaatttgatttaaatgtttttaccctgaagacgtcgactgaacatttcgacaatgcgtgccaatttgctgagccccaacacttttttgtttggaaggtatccaatgtggactgaaaaattcaaagaaaaattaataaatcgtaaaatatttaaaaaattaaataaattaaaaatctctaaaaattattgcccattaaacctttgccaagaaaagggacaagatgatgttcacacaaagaaaacatttcaatgtcacggacaatcacctgaaaaaatgaataaatattcgagtgtttaaattatttatgaaaatgaatttaccatttcatcggtgtcttcatcaaaaaccgcctcgttcagcacatcttaattaattcaatcattaattctaattaattcttaatcaataattaatctaatttttatttgttaattttaccatcaaagttttcgtcgtatccctttgtaaaataaagcattgctttcgcggcacgcactggcgttttgagcagacctaacaattaaaaatttaaataaaataatttatttatttcaatttttttgaaatgcctctgcttttacgtaccctgcctctgtacgtcttcgcccacatggctgatgatgctctcgtacgccttgaccatgttgtccaattgcgggtgctctccctgccccgccattggcactgccgtcggcgaagggggcaaaagcctcgaaacctatcaaaaaaaaatccgttaattttatgatttaccacttttttaaattgccttatcaattggctttgctgctgttgctaatgtctcctcctcccccttcttcagcttttgctcattttcttctccgctgattgcttccaaaaagccgctgctgctgctgctactgctataacttgtgttgcttgtgctgcttttgctcatttgggacaatttcgaattagaatgagcacaacaatcaatcagcaaaggctaaattgacacgcatttatgtctgttcgatgggcttccgtggtgaatgagggataaaacatttgaaaatgccttggttgaaacatcgggattttctgatttcccaaaattttagggcattttaattacatccccagaggaatgcgctcttataggaaaaaaagaaaagatatttttgtaaaaaaagccttcaaaatttggaatgttcctcagttctgttgcggtagactttcaagtcccccccccctccctcaaaggctttttcccctgcggacgaaaatattagactaaaaaatttgtgcggtgtgccctccggcgcgaacaatgaaaattcccacaggcgtaatgacttctcccccctctctctcctcaagagggtacggcgcgttgggcgatgaaaaagaaagaatattaatggaaatgacccactaaattattccgcccaccgccaaaattcaaaggacaaaaaaaacaatcgactgattttccacattacggcggaggctgatgttctttgaatttccgaccccttaaaaattcctaatgaaaaaatcaaaatttttgcagtcgaaaacaaatgaaattgggaaaaatgctataaaagttaaatgaacccgaaaaatttgaatatttgtcaaatgcacaactcggcaactgcggatggatttgtagtaagatgacacccaaatcttttcctttatagacaaacacataaatacataaaataatatctgaagccccttataaattttttatatgcaaaatttcgaataaaaaaaacaatgggtagaaaaggcaaaaaaccggctttttctcaacattttaaaatttttttaccctaatttttgggtttctttatgaaacaatttgacattctgtttgagaaatgaaaatatgagaaaaaggttcgaatataataattatgttaattaaatatggcaaacatccgttgccgaattgtccgtggccacggaacttttaaatgattccatgggataagtgggggggggaagtgaaaaagtttaggaaagtgaatgtttagtaatttaaatagaaaataaattccacccaatacaaaaattgcctgtgctttatgacgcttttccgttggcccagcaaaattgagccaattttaggcttccaatttgccaacgagctgagagtgagtgagcattgcgagcggaaagccgcgccgcttttagcctttggcccgcgccgtttgttggcccacctccgccccaattatttttgcccatattttgtgctttggaggaaattgaggggttttttcggcatttggttcaggcaactatttgtggataggccaaaatatgaccacaaataaacaatgtaattggaaatgtaatgatatcaggtttgtttacccttttaaaatcttaaaatatcaaatgacggaactgaaaaataaaaattaaaataaaaatctggcggtgtaacaattttgaatatttttttccattaaaattaggggccaggccgttttcctacgaccacaatgttttggctataactttgatctttgtcgaccaaatatgacattgtctttataccttcaaaatttctatatccgcgacaataatatgggaagaataatatgtacaatttgccactagcgatgccataaatttggaccatcaacaaactaaacaatggccatttttatgcccttgggtgtaatgatgacacatcttgacgtacaaaaaatattaaacatctgctgcacattttgcactctagtagccagatcagccctaattccgataatcaaaaattttagggactttccgttaaatatttatttttttaaccctttaaatgtgataaataaaggaattcctattttatattaaatatgaaataaaaaataaaaa

SEQ ID NO: 11011 - DNA, 2800 bp, Heterodera glycines
gcatcgacggaaatctgtgcaaagttcggagggaagtgtcctcgttggactgcgacttttcacctgctcccattcaaggacatttgctcaattacaaaacggaacccgcgctggcaatcgaaaatgtgtgccaactgtcaacaaacactcagcttaggaaataaacgaaatttcaatgttatagtcaattttgttgttattttaattttctttttcataaagtaattactgtatacgcttgttatttatttattttttgaaagaaaataccctattaaatttccatgaagccattcgaccatcgacttttctttgaattcaattttggcgacaaacaaacccgatcatttctagagcctcaaaatctgatcaaattgaccaaattttaaaaccgctttctgtgcatacctatattttagagctgataaacacaattaacagttctgcacttctaattttttactcttttacaaaagagacatttgcattgcagttttcctttttgcgtcaccaaatttttgaattagcgctaaatttttggcgtgttgatttcgagtttaagccaaaaaatataacgaatcgatggaccgaattcctcgaagtttcactggcatttttttactgtccacattagaatcctatccactttttcctaatattatactagttaaattgcaattgcttatttttcctttttcagatagtccgacttaaaaacaaagatgggttttgttaaagtggtgaaaaatcgcgcttatttcaaacgttttcaacccaaatttaaacggcgtcgtcaaggttgggtttttttttcttttttatgctataaatattattttaccatgtcatttcgttaggcaaaacggattactacgcacgtaagcgcttgacagtgcaagacaagaacaagtacaacacgccgaagtatcgtctcattgtgcgcttcacaaacaaggacatcattgcacaggttaactttcttgacaaaattgcagtatatatgtaatagttcaatatcaaaaaagcatcaattgtaaattgtacacgtatttgttttaagattgccttttcgcgcatcgttggcgacatggttgtctgttctgcgtacgggcacgagttgcccaaatatgggataaaggtttcattttttaataatcaatatgcggtaatactggaaaaaataaattaaaattgtttcttttccaaaagtcgttaaaatatatttatgagggttttcggttcgctgatcacgaatctgacattaattttgaccaatttcgaatctctgatccagactcgaacaatagtcgaaattcaaaattctcacacataaaaacaagtttgaattttcgactttttgtcttagttcgggtcctggattcggaattggccaaaactaaggtcatattcgtgatcagcgatagaaaactcgaaaagaaaaattttaaatttatttttcgcaggggcaccaattctccagtattacctaatatgcttcacctaaaaacaaaaccacaggttggactgacaaactatgccgcagcttacgctaccggacttttgttggcacgtcgccacctgaacaaattgaaattggacagcgtttataaaggcaaagaaaatgtggacggagaggactttgacgttgagcaggtttgttaacacagcaaacttttcaacactgctttttattgaaactttgattttcctcaatgtcttttcatttaggaaggggacaatccgaacccgttcacatgtgtgctggacactgggctcgcccgcacaaccaccggcgcaaaactgttcggagtcatgaaaggagttgcggacggtggcattcacgtgcctcataggtgagcaatgggaagaaacgtggaccgactgttgccgaaattttggcttcttttctttaaatccagcctgagttcacttatttgttcccttttccattcaagtgagactcgtttctttggctatgacccggaagagaaaaagtacagcgcagaagcccacagagaccgcatttttgggaaacacgtggctgactacatggcccacctgaaggaagaggacgaggaagcgtacaagcgtcagttctcccagttcatcaagaatggcatcgagtcgggaacggtcagttttatttgggacagagggaataatattatcatacacagacagccattaaatggtgggtcatttatgaacacccaaaattgaatgatcggtgttaaatgattatttgatgctctttttagttggaagaaatgtataagaaagcgcacgaggccatccgcgcggatccgtccttcacgaaaaaggaaccaaagaagccaaaggagcaaaaacattggaacaaaaagaagtacacactgaccgagcgcaaacaccgtgtggccaaccgaaaggtgcagctttcagtatttttatttttgtctaattttcatcttttaggcgtatctgttgcatctgaaaaaccagcaggaggcagcgttggaaggctgaaaaaagcgattgacctatttgagagtgattgctctttctcaatttttatttgttgttttgtggtgagagagaaaaatttgttgtttgcttttttggcaattttttccaattcaaatgccttgatctggcgctaaattttgttggtttatttgacctcgtttatttggcaattgtgaagattattggtcccacaaaaaaaagaataaaaattaaaaaaaaccatttttaggggttatttgatgcgctgagcacgaatatgacatccatttcggccaatttcgaaccggaacccgaa

SEQ ID NO: 11012 - DNA, 1794 bp, Heterodera glycines
tgaaacaatcggcggacggtcccggcgggaaacggttgttcgttgtgattgaggactgcagtctcgaagtggccaaagtgtgtaatttttgttgcccgggggggggggtgttatagctgtttttgtctaaaaaataattcttttaatagtaatttgtgggtaaaatccatgcatatgataaaatgtgtgtccggcggcgttcttttttgtgctcccctcaaaaaatatggtttttctcgttggatgttgtaaaagtaggtaatcttttttttacaaaaaaaaggtaaattttttatttggaaaaattggtaattttttttcttttttttgaaattttttttttattatttttttggaattaaaaaaaaattaataaaaaaaattagaaaaaaaattaaaaaaaataataatagaaaaatttattttttatgtcggcaatagtgaagattattggtcccacaaataaaaatttaaaaaaacatttttaggggttatttgatgcgctgagcacgaatatgacatccatttcgaccaatttcgaaccaggaccggaatacgaacaaaaagtcgaatactcaatttttcaatttcgcacttattctacaattgattaaaactagcagaaataaatcacaggtaattttaacagcaaaataagtcattttatgtagattcgaacatacataaagtaaaaataaaaattttcaattttgttcgaattcttgtctggggttcgaaatggatatcttattcgtgatcagcgaccttgaaaacctcaggaaagacttttatttagatgacttttaaaaaataatttatttttaagtaaaaaataaattaaaaaaattgttcgaatcaggatttggggttcgaaaaaagtcaaaaaaacgatcatattcgtgctcagcgcatcaagtaacccctaaaaatggtttttttttattttctttttttgtgggaccaataatcttcacaattgccgtttatttctcttttccttttttgttcggtcatgagcagcacgaccagtcgggagtattattttgtgattgttggtcgtcaggaccaacctctgttcgagatggacttcccgccaaagaagcgcgagcagcagcaggagacgcaccatttgctgcagttcatcgcgcacgccgcgctggacattgtggacgagcagacacttcgcgagacgcaaatgtattttaaggtggattattcagaaaaatactctgattgtgagtcccaaaaacgtcgaaaaatcgtttgagcgaattatagttgaaaataccgataagactgatttatcaaaaatttttggttttaatatcgaaatttcttacgcctaagagcccatttccagcattgttcactttctatccattccccaacctctatatttgattgtttttttcatttttattgtcatgatgccattttcagattgtagacaagttcaacgaatggtttgtgtcggcatttgttactgccagtagaattcgctttttgatgttgcacacgcaaaaaaatgaagacggaatcaaacaattcttccaggaaatgttcgtttgttgtcattgaatttagcgaaaattcaaatatcattcagttatgagatgtacatcaaattctcgatgaaccctttctatcgacaagacactccgatcagatcgccaagttttgagcaaaaagcggcgatgtatggacggaagtttttaggggtttaaaaaagaccttggaaatttaagtttttgttgccatcagatttgtgtattttttgcattacattattttata

SEQ ID NO: 11013 - DNA, 1009 bp, Heterodera glycines
  unsure (1)..(1009): unsure at all n locations
cacagtccgagtcgtattcccacagtctttgtcatttttattttgatgttttttcatcaaaatgtaatggcaaagcattacatctcggaatgctcaacctttccgcaatttgcggcaaagcatcctttaatagagatgcgagtgcactctatgaatcaccaaattcatcgggaagagatgaacaagctcctccctcaagaatgggaaggaggaaaccagtcagtatttaaggcactgactggagggaaggaggatcaattgaaattaattgaaatgtcctcctcctcctcttccccttttgctccatcaatggaagatggagagatttctgagtctccctcagaaaacgaaatccccctttgccaaagaggggtaaaaaatgccgacaccgagctggaagatgccaccaaaccggtgggtaagaggatcaaaaggcgtggaaaggatttggaagccctagggctaatcgacgctgaggctagggaggttccggaaaggaagcctccccattgctcagtctgtggcttaagtggtcacagaaaggggacaaaaatttgtcccttttactccagcggaggtcagaataaactccgaccttccactcctattcaggaattggaagaggagagaattggccgttcgaccaatcgacgagcgttggccgctcgaaagccttcgccaaaagtggctaaaagagccaccaaagagagcagtttgtattccgggctgccacatccggatacctctggcttagtccgtctttcaaaggatggtcaagcgggcaccagcggcttccgggagaacccggtggttcctctgagagaggaaatccgcggactccagtcagccattggcgcactgactgaggaagtctgtgccctccgtcgggcaatcccccctgtgctgacagggggaaacgcgactccacttgngagacgccgagggcgccaacagcgttcttcttcgtcggaagagaaccgaaanaacacgccgacacttctaccgctga

SEQ ID NO: 11014 - DNA, 1154 bp, Heterodera glycines
aaaatgccaaaatatgtgccaaacccctctccctgtgcgatatgtttttatgtgcgaaaacgccaaaatatgtgtttttatgtttttataagtcgctctaaatcaaaaattgttcggagaaaatgctatttttgggcttctctcgccataactaagccgcaaaaaaaatatgttaaaacataaaaatcccagccctatttataatacctattttacctatttgggggtttttctacctattacctaggtacctatttcggcatttttgttacctattttatggattttcaaaaaattcttaacaaaaatgcaataaaatcaaaaaatatactcataaaaatcgaccaaaaaatttttcaaaaaattcaccctaagaattggaaaaatttctcaacaatttattccaaaatttatttatttttttctattgacaaaatttttaatttaaaatgtcaatattatctaagaaaatattaatatatttaaattttcgattacaaagagatatgtagaaccaaaattttccctctttgtttgcttttttccattaaataataaaaatttttatttacctattttgattttggaatttttatacctatttgatgcctattttgatatatttttaaacctttttaagtacctattctgcgatttttcttacctaaaattagcagccctaataataatatataaatattttctttaaattttattgtttttaataaaaaaatcaataaaaatcaattttgatagattaataaaaagttaatcctaattttatctttttcatttactcaaatcacttgttgatcccaaagatgcaattattttttcatattttcctggtcggttttgtgggttttacggttgtcaaattggccatggagataccgtaacgcaccaacagctgctgacctgaccagatacagtacaccatcaacaaaccaagagaatttaaataatggaatcaatatataaattcatttaaatgaaatattttgattttgactaattgatgggccaattggtgttcatttttatcaacaatatgaggagaaaaaaaatacactggcatgagccgttatagctcagtcggttagagcgtgggtctaataagcccaaggtcgcaggttcgacccctgctaacggca

SEQ ID NO: 11015 - DNA, 2632 bp, Heterodera glycines
ttacaaaatttcgtttttttaatttggcctaatgatcctttttggcgctttaattcaattcaataaatgttaggcgcgcgaatgtttttgcatttttgttgtcttagcatgtcaaactgccaaaatgaacaaggttaatcataatcacagcagcagcagcagcaaattcccccacccccttcctatattaaaaataattccataaaggcagcggcataacaattactcaaattcagaaaatgtcggaccacccagaaaaagtgacaaaaccgatgtatgtggtgccgttttcttgtaatacaaatcaaattgttactgacacagaccttatacgcttttgtgccaaaattggttacggcatttgccattttccttatgggtagaattgttgctttatctacccgttttcctattttaaacaaacacctgcaaaaggaggagagtgtatttatcataaacccaaaggcttttagcttcatttgcggcgacatctggctttcgctgttccatttgctgccacctgacaaagttgggcttgaaattgcgctgctcagctgccgttttgacgctttggttgatgagcacttcaaaacgcggcattggacattgggattattgaaattcgaaacaagtttcggcgttgctatcgagctaccggtaaagtggaaatggaaattttaaatgccgaaggcaatgtgatcccaattccggacagaccgttgcccaacaaagtcgtcgggttcggcataatttgcacagagtaagtaattgcgcatatattcatatccggattcctaacccaaaaattttggaaatcggcacttcgacaaaatcactaatagctgtcatgattagttgagtttcctgctttttcttttatacgagcaaaatgcatctctattttttgggtgtttgctttttgcagttacattgatcaaaatgtgatagcatttttgtgccgatttcgacatctgttggcctcttatgcaaccaaagtgaaaatttgcgcaagaaatgattgtgcttcggagtacattgtgaacaacttttgccaactgctcagtggtaacatttatgcataatcattacaatttttgataaatttttgccgtcaattcgcacaaaaattatctgacccacgaatgccaaaagaaacaaaatgcggccccttaaaaagctcctaaagacgcaacccgcaatttcggaccctctgggaaacccatcaaaaaatgaagattttgggaaaatgatccgtaggatcgcgattagagatccaaatgaaatcccgtctcgtgattactaggctcaatttgtacggattttctttaaaaaatgataaaatatgtgtcaataaaaaatataaataatcatcttttgtcgataggaaacccataagtatacaaaaagaaaatccaaaatattttaatttctttagaggaacgaaccataaaaagaagtagaaaataaaggggatttgccactcggccatgtgcacattggcagagtcatttttaaagaatatattaattttattttttacttttttcattttaattcaattttcatcactaatttttcactcagacccccattcttaccagtgcttgtttttcccggttgccatactgggaccgggacctgagattttcaaaatccgggacctaggaggaccgggaattcccggcccggtcccgctctactctacttttttctgctaaatttttgtctaaaaaaactagttaattttttttttacttattttggttcacatttcggaatttctgtatatatttattatgtctatgtttcacaattgtttttacacatttttttacattttttcttacttattatttgcattcctagtcatttgtcaacgcttcctctcgcgccagcttcatcattgtcattgcatatgctttggcaaacccaattgaaccgttttgcttgaccaacgaattgaccggcgaacaattgacgctggaacggtgtgaaataaatagtgttaagccccgacgctcggggagtgaaaaggcggggattggggtggaacccagagaaaatttgttgtaaaaattcatttaaagatattctcgtctaatttggagtgtaacatgcgagatattcccgcaccgggtcgcgtgggcttaattagagatcggatacgggccggacccgtatacggatcagtagtccgtaatccgtgttttttttggccgatacgtattttttacggactacggatatcaagtccgtaatccgtatcgatttatcaagtccgtaatcctgatccatattttcgaaaaatttcgatccccagcgtaaccctaaaaactttgcaaatccgacatcttcaccactttttttgacactcataagcatcatataacagaaaaattttaattacatatggtaatttaataatatttgatatatttatttgtttataagaaatgtttaaacgaatttttggcttaaaagtgcgcaaggatgttggtgttttataaaatgtccctcggcattgttttgaaggcgttgctatcacgcatggcctgtgtggctgatccgccgttgtccgattgcgcgtgatcagcacaaatgggccaaatgggaaaaggaggcgattaaatgg

SEQ ID NO: 11016 - DNA, 3358 bp, Heterodera glycines
  unsure (1)..(3358): unsure at all n locations
tgaaccaaaatcggcgcgcgtcgaagtgccatcgccgccctcgtcgtctgacagtgacaagcgcaagaccaatgaaccgtcgaaggcttcaggcggtccgccaccaaaacaacggcacgaatcgcattgccaaatcattggagtgcttcccggcttaccgaactactccgattcgaggcattttaatttttttttttcgattatcatttccatacatattcattgtttagtttaacacaaaattttaagtgacgaggccgagagtagcagcaacagcgagagtttggagtcgggattgccatgtgtggcaatttacgcgggtaaaggcgcaccaaagccgcacggagagtgttgaaatggatacgaacgaacgtgatgaggacatgctttttatgacgtatttttgcgaaatcccgctcatatttgtctaatttgttaataaaagctttaaagagatttccatgttattgacttttggatgaattactccttcaaaaaaaatatgaaacggttgtcttttttgcaaatttaaattattattttttaaaagtcaaattatttttttcaaaaaatcgtttcaaaattccaattttccccgtcggagctgacaaaacctttaatttttcttttaaaaatggcaattcacaaaatagctcattttttactaaatattttaccaaattgcactcaaattttgcgcgatccgcgaccgcggcaaattgaatccgcgaaatttgttatggattcctgatcagcgtccccgaaaaccattatttgcagtttttttaatgttgagacgtaaaaaaaatttttgggggttaaattccataggagcccttttttcatatgcgttaaatagcttagccgatttggttcttatcccttttgtcacccccccccccctgaaatttttttaaataattttttctagggtaattttatgcgctgaacacatatatgatgtttatttttagctcttatgctctttacgtgtgttacgtgaaattttttgactagtcaacaacagtattaacataaaagtaaatttttaaaaatttgaatttcgactttttgttcgagttcgggtccgggcttccgaatcggccaaaactaatgttagattcgtattcagcgcataaaattagtttagaaaaaattattttaaaaaaaatttcagggggggggtgacaaaggggataagaaccgccgatttttcgaataatattaaattgttcggtttaattgggaatgaagcgagttatggctgatcaaaaaccattacaaaaaatggtagtgatcatgatcagtttgtattttgaattagcgcgcaaaataaatacagaacttaagcgattaatcgcattgcaaaaattttttacaggtacgggtggttttgatcagtttaaactttaaagtttatactcaatgtatatacaattcaaatgatcgggggtattgacaattacaatatggggcattatgacagtttatggacacgctgacaacgcacacattcgcaaaagatcatattctatcctgacgatccctccgtcatcggccggcccggcgacgtcagatccggtttaaaatcaaaaacgagaaatcagcaaaaatcagcatgaaaaaagtggacttagaagcctaaaccaagttagaaatgcgtttttcatgcttattatcacgcccatgttagcaaaaaaaacagcatatgctgcaaaatgagcactttagttatgaaataattacttaaaggcgatcgaatattttaacaaaactagcatttcgcaccaacaatataaattttataacaatgcttcatgtcggccatgcgcaccgtcttggtgacgttggacgagaaaaaaacttaactcgagatgaaggaaatttttaataaaattcgacgaaatattttttgtttgagtttgagttgngattaaaaatggatgtcggaatcagattctccgaccatgaaaattccaaaagatacatatctgttttaatttttttttaatgtgttgcatgacagtacacatcgagccaattttgggccatcaattttaaaaagctttttgccaaccaaatggacaatcttggtatgattcaaaagctcttgaacaaaaacgttttatataacacaccgtccgaaaaaacgagatgtgtaccaataaatagagagtgccagagaaaaacattatcttttttttctaattttttgtctccttttggcgtactatctaatatttttaacatttacttcgctatgtttagcttcttttctatatgttagatccacaggaaattttgctgcatcgattaatgctgaattgatttttgttgatgctctatttcaaaagttataagaaaaacaaaattttaaagcctcataacttttctctggtacaccaaatcgcttagcattgcttagaaaaagcttctcattatcaagagctttcgaaagataccaagattatccaatttggttggcaaatacctccaaaaataattcccaaaattcgtaattttttaatattttggacaaaaataaatgaaaatattcatgttgcacaacggactcgaaccaccaccctttgtcccttactatcttacaaaaaccactgacaaaggaaggtccccaggtgtccgtgggatttccgaatgaaatttcgtgggtggatagagcataaaaaggcaaaaataaaattaaaaaatgagtttgcatgtcagggatccgaacctgtgggcttaaaaaacgaggactagctcactaccgctgcgccattagagacctgatgagggcgcaaataaattttaatttatttattcactaaaaaacttcagcacgtcataactcggcactcgggttcattccgcaaaaaataaaatcacttttcttaagaacctgtgggtgctctatccacccaccaaatttcattcggaaatcccacggacacctggggaccttctttgtgggaccacacatgcaaatcttttctggtacaggagctcatttcccggacgctgtgtatattcgctgttgttgccgaagaattcgatattttccgtaattgttaaaaaagcgggaatgaaacaatatgagaaattttttcaatattgtgttttaattgtaattttgaaaaaacattggtaaactggtaacccttctaagaaagcgaacaatcagagtgaaacgaatttttagcacattaaacacaaacaattaaacataagcgataataattttaaaaaacgaaatgaaaacgaaaaaaatatcaaaaagtcattaattaataattaattgtcgtcaaaatcgttttgagtgttcgtctccatccttctgcttggctcagtcctccaagtc

SEQ ID NO: 11017 - DNA, 636 bp, Heterodera glycines
tcgttttgagtgttcgtctccatccttctgcttgtcagtccaagaagtccgtctcgcggatgggccggcagcgctcgtgttggaaaatggcgtgcgcctcgcgcagcagaaaggcaccgaactcggcgatttgtttgcgcgaccagcgcgaggcgagcccagggaacgagccacgcaccacgttggtcagattgtcaacacctttttgagggggcatcattaatatagcaatttgagttttattcatttttaaaagccatgcaatgccaaggatttggggtactaatgtggtttgggtcccggtttttggtcaattttttttcaaatttttttttctcttttattgtcagaaatgctttaaatgacaaataaaaggtgctttatgtgtttattgggtacaattcagcgatttgagaccacaaattataaaaaatatccggtcctccaaattgcttacgccacaaaaaatcagaaatgtatgtggaaaaaagtgatctgtgactgccaaatctcactttatggtgaattttttaagcttttccattaatctaaaagcaattctgacaataaaagagaaaaaaaaaatttgaaaaaaaattgaccaaaaaccgggacccaaaccacattagtacccca

SEQ ID NO: 11018 - DNA, 1856 bp, Heterodera glycines
  unsure (1)..(1856): unsure at all n locations
aaggcttgaaaattaaatttgaatgcaattaagtaaataccaaagtggaaatcgccggaccaaaccaacccaatggaattggcacaattcgactcgccttctccttacccctcattctctgcttacttgatcgccgacgtacagaaatcccccggtcgcaatggtcaaattcgccagacgatggccgtagaagggaaaagcttcagacggatgccctgccgagaaagggttaaaatcctaagtttttaaaagattgttcgttagcccaagagcacaaatgattattatgttcatgatgacaaattactgacgatgataaaggataaatatggaatgtctttaaaatttatttgctcaaaaaaattgaatttgcgtggtttcaattgagattgattgatacatgggagaaaaggagagggaaagacgacggaataaatttggtaatgaaataagtgaaacaaaatgaaagagaaatggcggcggtatggttcaaagaatgggccattcatcagttcgagaaacgcggggaggaaagggtggtgcacttggtccgaatgggcgttcgcacagtgcatttgaaagccccctccaacgtggttcacaccattttccttaaaaaacattgtattttcaaaatgaaaattactagacacttacactttgaagttacacccctcgttaacgttgatacagttagaataacgcgcaaattttctccgtcttagcggcacacacccaatgtcagccaaaaagttgtttgcggtgtgtagatcaggcaatacattgtgggcatttgcccagttatataaatttgccatctatagggatgggaattttatgcaaatagatgaaaattgtgaaaagttaagaaaaaaaaataaatgactctgttccagtttacgggaccacatcagtttattaagccataacttttttcttactttatcaattctcaacattcttggtatcaatcgaaagtttaaatttagggaatttatacgctgacccacaaaatgtccaagccacgaattgtccaagccacgaaatgtccaagccacgaattgtccaaaagagtaaaaacccacgaagtgtccaaaactcgaaaaagctattaaaaaggcggaaaatgggtctaaattaaggttttcggggacgctgaatacgaatacgacatttatataacccatttcctaaccctggacccaaatataaacataaaattgcaaaaaaaaattcaaagctcctaaaaagagtgctgatcaaaattcgaacaagttttagggttcctatgccatccgaattctctctatagacacaccctcagcttcacatattaaaaaaaataattttattaaacattcaataaaattctttacggaacgtggacaattgaatcatcaaaattctcgaaatccttcaattttcctgcatatccctcaatttgtaaaccgagcgccgtcataagatcatggatgtcaccgttgttgttgtacgacgcgtccgccaaaattcgcataatgacagcatcctggaggatgtatcgtttgtgtcgcttgtgaatgaaatggcgagcagatcgggcagcgtccacctgtctgtcgatgctttcattgactccacagatgaagtcagagagtgccgggtggtgacagagacctttctaaatatattttaaaaaatttgcccgtagtaaattaaaaaccataaaatgcagatgagttgcttccagtccattgtttgtacgagcgagggcagatgcggcctgcgagtgcatgttcncaattgcaattgggaaatggggcgcccgacagatttcttcctnccacacgggaactgaatttttttttattaaatat

SEQ ID NO: 11019 - DNA, 2089 bp, Heterodera glycines
ttgttggtgctgttgaactgctagcaaattctgcgattccctggctgatatttgctgcctttgcgttatttttgtgcttttccgttatgtgtcgaataattgcgttttttcctgcggctccgagtgagatgtctacattgcatgaaatacaatgaaattcttcagcatttttggcacgttgaaattatagttgggactagagatcggcctgtatctggatccaggcctgtatttttcctggatccaggtacaggtacaggccattgttcggcaacctgtatttttcctggatccaggtacaggtacaggccattgttcggcaacctgtatttttcctgtacctgtatcttcctgtacttttgcacagaaaatacaggtacaggccatttttggaatacaggtacaggtacaggccttaaaaacctgtattttctgtattaatttttaatcactattttttggcgaaatgtgtgaaaaaattaggaaaaattcaaaaaaaaatatcattttattcgctgaccaacgaaatgtccaagccacgaaatgtccaagccacgaaatgtccaagcctcgaaatgtccataagagtaaaaaacacgaattgtccaaaaacccgtaaaacggatctaatttagggtttttggagtcgctgagtacgaatatgacatttacctaacccatttcctaacccaggacccaaatataaatataaaaaatgaatgaatttattaaacattcaataactgacgctgtgtcaagcctatgtatgttcgagagaagtaaaggaaaaactcatgcattcctgcaggagctgacgccacaataattgagaaaaccattctgacaatgctgggaggcaaaagaggcaaaaaaagaacacttctgaaaaggaatttgaatttcaccaaaatttttttaaccggaatgtgttgcgaacttcctccccacgttctgtcttctcaccgtacaaatggacaagaccaagtcgtttgaagttcctgtaaaggctttgcccgtagtggaacatgcagcacttaatctgtgccgtgggaaatgccgtacgcaccgccgcaatttcggccttttcaaaatcacacaaaactaaaaatcacatttttgatttgttttttttttgtaaatttcaaagggttaacctttgcttgggacctccggagagatgcgttcacggagaaagttcagtgcttcttcgtagtagcgtcgctgtttcccaggcagaagacaccacatacagatgcacattttctgattcactgacgcaccaatgacgaagcactgctcccacatcgctggagcgcatttgaaagttccgtcgaggtgccacgtgccacattggcgcaaaatgtccagagtctaaagaaatgccaataacaaacagaattttatagccaaaaaatgtaccttaacactgccgaaaataaggacaacgtccttttcgccttgcctgacatttcgactgtcatacaagacgatgtcctcaccgcccttttcgcgtaacgttgctgggatgacaaaggccagtgggttctgcacgtcgacgtttcccagcaactttctcttctcacgccgcatcatttgggtcaacgcattgtttgaactcatggccacaaatgcttcatctgttgctgatcgcctcacttttgccaaaagtcgcgtgggcttcagacacggctcggccaggacactttctttgattttctgtcgccttgattccgcctttaacacagcattaattatttggttttaaatttaaacaaacttgtcgtttctgaggcgctgggaggtggttgtgttctttttgacccaaggttccagtagctccaatttcgtcattgtttgtgatgtttgcatatgctgagcaactacgaattgtgcatctccaacggtcccctgagtggtgtgtgtaacgaaatcctgaacatttggagtctatttttttgcgtcgcttcaaacgtaccattcaaccataggcaatgtcccccaaaatttgtttttccgcgctcaaaggtcattactgaaacttcagcctcgttcaaagtctgttgttcaacgttgtcgaaagttatcacgg

SEQ ID NO: 11020 - DNA, 816 bp, Heterodera glycines
gaaaatcatttgaacagtctaataaaaaaacaaataaataaataaataaaatgaaaaaaagtattcaaaaacggaccaattcggtcagataattgtcgcacaaatcgagcacacgaagccgttccaagcggacaatggtggggggcagcagacggagctcacactgggcaacatcgagaaactgcaaaaaaaaaagattggaatttccggggaaattttttgaaaattttgttgcaaaaatttcgagtttttccctttaagagggagaagatgggtgaaagaacattgacaagaattttttgataatgtttagggttaataagtgccaatatgtgccacgccgagggaatattcccttaaattcgggatattgcccaacaattttatgcaaaaaaatgtaaaattaagcaatttttaatgcgggaaaagttttttttttcaattttaaccgttaaaagaattgtatgaaattcaaaaatttgcccgtttttcgggtttcattggcgctgacagttaattaattagtgagtgagtaattaatggaattcatataaaaaaaaactgtgcctgtaaattgacgagaaccgtcaatgccctggggcagttgggtgatggaattgttgaacaagttcagactggacagctgagtcaagttgacaaatgatttggggaaactgaaaatggcaatttaagcaccgccaaattgtttttggccgccttcagcacttccaatcgcttcaattggcccgcaaaaatggggccatgaatttttggacttttccaaattaataatttaaaatttgattaaattttatt

SEQ ID NO: 11021 - DNA, 3949 bp, Heterodera glycines
atttctgatgaaaattctttagcacaatgccattcgcccttttcagcggcatgacttgcacagcgatcatttacaccgccattaatttcgcattttttgtcgttctcagcgtttgtgatattcaaaattccaccgccgttgcgatggtaattaaaagccaactaatatacatttgaaattactattaatgtgcataaatgaatgtaaaagaaaaatcaaaatacaaataaattttcagacattcgccgaccaaacgatgggatattttaccaaacttatgccatttatcatctctttggttttgttaaatgctctgaatgcatcagtgtttatgggaagtaggcacgtaaattgaatgctttatttcttaaaataaatattattaatttttttagatatttatacgctgtggcgcgtgaacggcaactcccctcgtttatcgcgtgtgtccaccgaacgcacgacagtccccgggcggcactgatagtccatgtaaaaggaaaagcatttgcaaatttaacattaagcaattggctaaaacatttacggcattcagacagtgttcattatgatcggattgtttcttggcaatgtcaatgaactgatcagctacgtcagcttcgcggtttggcttcagcgcggctgtgccatgtgcgcacttttgtacatccgattcaaacatttgccggtccactcggagtttagttttaaaaataatttaaaaaatcaaatggttaaaatgatatttcaaccaactgctcccatattttggacaaatgtttcggcattttcaaaaaacttaattttcgaataaaaatatctttaaacacaaatttaacatgaaaataataaccgaatttaggccattcgtatgccaattgttctgccatttctgtttttggcaatttgcttttccctttcaattatcacaattatcaaagacttttccaccgcttacattggccttacattaattggcagtgcactgataatctatggcatatttatatgggaaaaggcgttgaatcgaatctcagcttatcgggaacaaagcagcaattggaatggtcagtggaaatgagtaaaatcccaatgcccgagggttaccgaaaacatcaccacctcccaaaaaagacaatttgatatttgttgggtttaagaccatttccaaggacctccatcctttacatccaatgaccgattccttcagtcctaggctaaaaaagtgcaaatattcttaaatttagaattttgtgttcggatagtgcaaattataacggacggtcaacttgaaattattccagaaaaaatggattatgtcgaataatattaaaaatgaattcccaatttacaaaacattactaataaatttattgtttcatatataaatttatttcgactatcattttgtgcattttacttatcgttcgttccctaatgaataaacaaatgacgacaaaataataaaaaatctgtgtgaaaaactcagcaataaataaataaattattaattagattttttggtttaataataattgggttatatttcttcatgcaatttagcgaacatcgtttcattgaactcgttttgttaagagtaatggtcaaagtaaatgtacaattaaaaaacggagaaggattcgcattttggttgaaattgcgaatgattgatcaccagaaatggtgctttaattttggctataaatattcgttttgcattttcaaaattcaatttttattttctaaaagatttcttttattttacataattttgtttcttctttcagataaaaatgcgcttcttctttcttctgaccattgctcttctctccgttgttcttctcctttccccaagtgcactcgcaaagaaaagagcccgccgttcgatggtaaaatgaaaagcactaattttgcttaattactaatgacaaatgctaatgattcagcccgttaacgctgccatgccggaatggaaaattttgtccgctgaagtggaaaacgatggcacagcataagaaggaggaggcaaactttggatcatcggcatgatcgaagaaggaatttgccaaaatgatgaagaataaaccaatgaatgttgtggatttgtagaaattcattcaaatgccgggaataaaaatagttaaattatttatatttatattaaggtaaatgccaaacaaatgctaattgagccgaatcaaaaatataaacatacttttttgagtcgaaaatagaatttttattttacgaaacaccctaaaatgtgacctaaaaatgggaaaggaaataaaagaaagtctgaatttagaatgggattgtgtaaatgtattaaattctcttaaaaaaggtgttgacaattatgaacattcaaatcattcagaaaatggcttaagaatagcacggaaaacttactttttcatggattaatcgaaaatgttttgaaatcattttaattagactgccccaaaaaagtcataaatagggaagagattttctgtgttgaaaaatggataattaaaaatttattataaattattcagaaattagcatatgtccactgttcaaaaaatccattgcggttcctgctgcaggattgttcgggattgggacacagaaattttgcgggacggaacccagagggattaatcccgcaccagcaattttcaaaaaaagcaggattgcggcctggcgtctcgcaaaatcccgcgggaacccgcatcttgcaattttcaaaaatgcaggattgtggactaaaaatccgcaaaatcccgcgagaatcccgtaccaagcaattttcaaaaaatgagggcttacttactgggattcccgcaaaatcccttggcacccccttctcgcattaacctctcgtcttcatcactaatctcatcactatccttctcttttaaattctaatgaaataaaaaatcgcttccattcttgaaattttgcacaaattatttcataaacttttttgttaattttgctggccgaaatagcggaacaaataaataacatctgacgaaaaatgaccttacctttaaattgtcattagaaaaaaatgattaattgtatgtaattacacgtcactgccgatggatggttctcttttcggtcggtcattatttgatctcctcattttcgaaacattattaaatattatttattcatttctccacgcctttaatcgcaataacaaaattcataaaataatattttttctttaaaaaaatcaaaaaaataaaataatatggaggaatatgaagcttcatcagtgagacaacgggccaaaattgaagaaagggatggcaaaagggcaaaagcgaatgcacaaaaggcaccaaaaaatggcgaaaaaagtctccaaatcggatggattgtttgctttgtgctcttcacttttgcaattggaatcgtaagccaatcaaatcatttcgcatgattacatggcttgcttatccataggattggtttacgagttttgaattacttttgcaatttttatgcaaatttttaatggaaaaaccaacggttaaccagcttttaatcattaattaccaacctaaaatttaatcataatttcgtgcagttaatgtatcaaagtcgtgaaacaccgacaaattatcaaaaggaggtgaaccgagaatgtgacgaagggacagggcaatgtattgcaatagcagattatacacgggattctgggtataataatgaagccgatttaaaaaatgttaatatttttagtaagacatggcatcgaggcattttttatgtcaatgaaacgacattcgattttgagaaaatgctcgagaaaaaaatcggagcagaagcaattctcaaatgtcctgcaaatggtaaaagtaaagctttaactcgctgataaacattttttgtcaaatttctacacgggaggtacaaaattaaacataaaaattaaaatgaaacaatcaat

SEQ ID NO: 11022 - DNA, 1822 bp, Heterodera glycines
ttacctgtttcttccctccacatattttccttccactcacttattttatcattaaccatttcccagcacggaccggctccgtatgcattccgtcgcaaaggaaaattcggcgttgccaaaccggtcaatttcgggcctcctccggccccgattcctcgagtttctgaggtgctgctccaattggtgaccgagttcaccaacttcaccaccgaatacacgcgcaacttcaacgcttttgcgaccagtttttcgtgtgataaagaagaggaggaggaagaggaaaccgaggccaacgatgcctaaggaggaaacccctggctggggggaacttctgtcatggacagaaattttgttgaatccatatgtaatcttgatcgtataaatttcgcttttccttaaaggatttggattgggaattttgccctagtcggacctttttaaaatatggggatcatcttcccacctaatccctgcgtttttcccattttttaaatatcttcgtggtcagtacgtagcgtaagccggtccttggtcatcaacaatttgccgaacgcccaactcaacggcccgcccatggatcagcttgtccgacggatggccgtataaaagaaagacgaatgaacgatgctcaccttcttccactaccattttccaaagtccaatttctttccccaaaatttccttctgctatccaattttcaaagatcgtattcaagtgatcattttcatttcacatttaattttcttggtgtgtaataaaggttttgcgttgtaaaaccttcttgcgttcaaagcaattgtgtgccatcccggccactcgaactccctgacattctcagggacggtcttaagccgatccggcaaattataataaaataaaaccaaaacaaaaaaaatatttttccaatcacttcattttcacataaaattttcatttcccaaaacgaatcaaaagttttggattcagccgcctcggttgacgtctgttctttaaaccgggtcagacgaagtcgaaacaaccgcagtcagcggccacatgcttgctgttagggtaccaaccatgggtgacccttttgatttacaaaattttgtatcttaaaaagggacggccaacttgttttttcgtgttatatgtatatgaactgtctgacttcacgctgtctgcctcctacataattatatagacaaaaaacgagtggccgaaaacgagttgggtttttattagagagcgacattacggaatacgggtccgtaaaaacccgtatacgtgtcagacccgtagtcgctctctaattttttcggatgatcacttttgataaatctctatctgaactcgaacagaatatcgaaaattttaattgttggattgcgcttttttgctcaaatttagggactcaaaatttgattaatagattgcaaaccaaatgggtcccccatagtttttcggggtgacccaacaataagcatcatgtgtcaaaacagcaaaagtgccaatttcatgattttagattatagtagttgcgtaaagattgattcactccatccgacactaagaaatattcatttttcattcccgggatggttagcattgaaattcgggtaatacctactattgatggtaaccccccccccccaacctttcttaaaaaaattacaaaactttttcgaaaaagaggggtcggataatattgtcttaccgcaattcgtaaacttacggttacctaaaaatatgaaatttgttgtcgaaaaagcattacgaactgctgagctcaagaggtcgtggtataaattggctttctgccatcaatcattcgtcttgacc

SEQ ID NO: 11023 - DNA, 925 bp, Heterodera glycines
tgcaaatgtctttcaatgttttttgacgaccttaaaatttattctacctgatcacaatcgcgtaatagcgaatgttgtccattgacgttgagtcaattccgatcgaaaagcgccctgtttctttgatctcatccaaaagaatgtttaaaaaatgtgggctgagcactccttaaaaattggtttttctcggaaccagaatttgtactcaccccgaattaatgccgttgttttcatacgttttgatgcaaatccaattgctgctggatcggcagaaaaaaccacaccaaaaagatcagatgaacaactgatgtgcggcaaaattggttgggatgagcaggcgtggactactcggatcgagtaggccgaggaaaacgttgaccagaaaatttttttggagaccaaaactatttacccctgagtggtgatgtcagtgccccaaagaacaagacggaagggggcgtgtgaaaaaaactcaatattaaaatacggatgatgacaatgacaaatcaaaatttattttattctaaattgtaagattttaattcgttttcttcagaaacatcttatttaaaataaaaggatttcctattacctgaaaatggtcattttttgtataccatataactctacttccaatcattttgttcatgtaagtttctctaatccataaaatgaatacaattaattacattattccgtttctggaacaaaatgaatccttttccactaatttatcttggtttcttattcataatatttcaaagtgtacttatatttctaccgttgtcctttatacaggattcgtgctacaaaaaaaatgaacgaaaaaccagaaaattgctacaactttaggcaaagactgtaaaaatatcaccaattataaacagaaaaacccagatcttgaggaaaacaagaattttttatg

SEQ ID NO: 11024 - DNA, 3797 bp, Heterodera glycines
aagattatatttcacaaaataatttttttttttttagaatttttttttgcgtcaaaataatgtttttaaaatttctgattttggtcttctgttttcaattggcaatggctaacctatttggtcaaaaacaatctgtagctgttgttggaatgctcaaatgtaaagggaagccaagtgctggtacaaaggttaagctctacgacaatgaccgtaagttttcagttatttacaaaaataataatacagtagtttcatcaaaaatgtttccaaaataaggacatcatttgttaaaaattatttttgtggacaataataaggtctacataattatacgctctatgtacatttgtcatcaatttttaataccctttaaattcaaggaaaatttcaatgatttgttagtctaaaaataataaaatcatagaaatatttaaaaaatcaaaggtgatatgataaatatctcaggaattaatatttttttgaatttataatattttgagtcttacaattaggacaacccttagtttttcgggatcaaaattaggatatattaagtgccgaatgtcgtcataattaaactttctacgcatatatttaactacaaattttcaatgccatttaaattcagagccaaatttaatgggtcggggtcactttggcatgggccataacttgtttgtgtatcagtcagattttgtttagaatttttgcatgcgaatagggactatcaagcgcttaaaacccatatccattttatttaatttggatgacaaatataaatgctttaacaaaatcgtagaaatagcgaaaaaatcaagaaaataggggcgaaatattgacaaatctaagaatttggtatttttgttattttttttttattaccgaaacatgcaaataggggggattaagcatcgaaatttggacaaatgctacctttgttttttttaaatattcgttaatttttcagattttacgactgatgatttgatggcacaatccaaaaccgacaattatgggcgtttcaaattgagtgggacggcaaaagaaattacgaaaattgacccaaaattgaatctgtaccatgtgagaaattaaaaatacatttaattcattactttattaattttgacaatttaaatttcaggattgcaacggcgatttcccatttacaccatgcaaatggaaaattacaattaaagtaaaaaatataaattgaataattcagcaaaaatttaataataaaatagctggaattatacatctaattagtgatatcaatttaaaaaattacatttacctctaattaggaattgaaataaatttgacaaggcttatatggtgatgaattaggttcccccttccgtatcgtgcgcgatcaaaaaattttcaaaaagttttcaaaattttttttatagaaattcctcattgaaaaaattttctcatttttgagcatatttttgttttgaatttttttttataattgctcccttttatatgtattagcagcatctccgtactaattttgtggctttattgctttttcaattccatttttttgggtaattgatcgccaagcggaattttctaacacagctcattgttttcgaaagagtttaaaattttgcatgaaaatactttggtataaggcctagcatcttgccaaattctagaattttttatgcactcagagattttttaaaaaatccgctttttccagcctgaacgccaactttgtggtcaagttttgaaaacaggcggttttttgtaaaaaagtttaaccaatataaaaaattctgaaattttgcagggtgctaggtctcttgccaaagtattttcatgcaaaatttcaagctattctgataactctgaaccgaattacaaaaatcaacttgagcaaaatgcaaacttttattcactaaaattcacagccctaataataaaataaataagaaattgccgaaatgttaggccttgggtgggagtcgagcccacgccttcagctagtggttcaagcagctctaccattgtgccaccgagacaaaaccacaactttatatatttgtagaatttaaattgtaatctcaattttatattttaatttttataataaatattagccacttttcatttattttttacagattccaaaaagttacatcaccactggaccacatgcaccgaaagtgtttgatatcggcgtgttgaatttggaaggcaaattcagtggccaaaaaagggattgcatcaactgagtgcgatggttgattaaatgttacaaaaactcaaaaacccattaattgttgacaattattaattcaatgaaatatttttgaattaaattaatgcatttcttgaatatttgaaattacatttgcaagagttaaaatgtaatcatttttaatgggattaattacgcaatttttataaaacaaactttgacatatataaaatttaaaaaaatttaaaaaacctcaaaaaataaatgaaaattgaaaattaaaaattgaaaacagaatttataattttatatcataattccggcaaaacttagttgaatgtaccgcttaaaatgggttcaatacattatttattattaatcattttgcctcggtgggtaagtgtgaaaaaaaccgcttaggtcgcaggttgcggaattgcaaaaaatcggtttttgaaccgcctacacgcacgaaatttgaatgcatttttttcactatttcgtcatttttgcatctcggacgagatttctttatttcttttgaatttaatgcttgcaacattggcgctaaaaactagcgcacactcgacttcggcggacagttggcgggacgagagactccgggctttggaagtaatccgcgcgtgatccgcaggcagaggcggatgactgactgactgattggcggggagggacccttcgggcctccgcagcaaccaccaacggctttatggattttttatgttttaacataaaaacattatttttacctgaattattttcattcagagcgaattttagcatataaaaaaaaacttattttatactttttggctcatggagaaatttttgggattttaatagggtttggcacatacctattttgccgattttaattttaattttttttttgccaaatattcgtaaatatttggcgtttttagcacattgctttcccactattgttaatagggattggattttttggcaaatgtctaaaatttttacatgttttgtaacgttgaaagcacaaaaaaagagtttttagattggtttaaaaagcttcttactatatcaatttgctaatgcctatttttgcctattttggacttttgttgcttaatgcctaggcgcctagttttgtgggtattcaacggtttaaatttctcgagtttagaatcgagaaggaggtttcaacaacgccgcattttacgaacattttgcttttttagcggcgcatttcaaaaaaaaaaaaaaaaactttcggggaacagggtgaaccggcggcgccgacagaaacccgccgggaaaattttttttttttttgggatttttaactcttttccgccttcgccggcgacgcccccccccctcctcctccacaatggtcatcattaacggtgtaaaattttctcgatttcccagactaaacgagaagcgaaaacccgagaaatttctcgagtcaaaaactgagacctctcttccctactatttaatgcctattttgcgggatttatttgctattatttttttttttgcatttttagctgcctgtttttgcatttttgtgtctaaaatt

SEQ ID NO: 11025 - DNA, 4316 bp, Heterodera glycines
  unsure (1)..(4316): unsure at all n locations
aacacacaaaatgaattccactgatcagatttaccctgtggaatgtgccggctctgatcagcaaatgtcgtccatctgtgccgaacttcatctgggccgtctgccgaggccagtactcttccgcccgtccgccggtggttacgacatcaattacggtacttgttgtgtttgatgagactcacaaattttgtgatcagtaagacagaccaatacgatgacttatccaataaatgacttagccggcttttcaatttaatttggcaccttttacataaggcaatgccaaaatggacgacactcggcaattggccaaattcatcaccaagttcgccaagttgcagctgatcgtactgaatgccgacaaatacaatgttgttgtgccaaatcaaatgtgtaattttggtccattccaaatttctacagcaaatccatgccgacgtgacagccgcctccggcacactgtggatggtcgaacacttcgtgccctgctggtgtcccccgcgtctcggcctgttggccgaactgcgcaaatttccggccaaagtggacgggcaaacgcttcagttaaattgtgaagcggaagcgaccaattgccaaaactcgagcaccagaaggtgagagaagaagcacgatgagaagccatggctcattaggagattggggattcagtgctgagtcgatacttttgccgaattgcgatcatttcaagtaccgacgttttcattcctttcctgaatcccggctgattcaaaaatccgagacttatttaactctcgacagcattcttgatcgcgacatttttttggatcaccccccccctcctcatttagttatccccactccatgctgttcacgccgtatggtgctcgtcggcattccatcatcggctcccactcggcggaccaccaattgctcgaatttgttgccgaatcattaaacccgtcggtactggcgctgaacaccactttgttcatggaacgcgtggtggtgcacgtaattactgctcttgagtgagtaaagtattattgcccagccaggttccctactcctaaattgtagacatatccctaaaattgtgccttttatgcctgatcagcagaccactcttggttttagaacactgcatttgcctatcttttcgcgttgcacaacacctgctgctctaccaaatcaatgcaaaatttttgtgagcgaaaaaaagaataatgaaaattgaatttacggaaatttgttatgtacatatgttcgttgcaagtattaaacagttttctcagttcttcctgttgttgttgtgcacagagttctgttcttccgctgccactaacatgactgtcaatgagagggtatgtccgacattcatttgtccaacaaaactgcttccaataggaagcagcaatggagggtgactcaaggcggatttgtattcgtatggcactttgcttttcgctggatatggtgctttgatatttgctggagcgtccttaatcctcgcgtttgctgcgttggtgatcccaattgtcaaccgcatttgtaaaagttcatgccaagagagtttacatgggaggggcatatcacgtgatcttatttcgaaaaactttttgttttttaaaggcagtttttttggcttttgtacaatttgtcatgcatctggcaaaaattagaattttgtcaaaaaatgataaacaattatttagccactcgtggtccataatttttatatttttgttgaaatatggatatcttatttaaaatacagtctcacattaaaaatccactctacatctaaatctggaaaaatatttgataaaaaagttaaaatctttaaaacattttgactcacaggctgtacattgccgacgtctacggctcctcaattgcattctttttgaacgttttcacccatatggtcggcctttgtttgatgtgtaaaatgccataagtggggagctggagagggaagggccggcagttcagctggtagaacactggtccggaaagccagagacaccggttcaaagccgacccgccccatagtttttccctcaaaaacttccccagctcgttcatatatttcatactcaattgaaagggttcatgtggtttaggcgggaccaattttgaataccaatttccttatttaatagatgcttattcaaagtaccctttgtgtgctcaattgtcaactcactcaaccttggtcataaattactgagaggtattcggaatgtttggatcaccaaaatcctggtgaccaataatgcgtgagaataggtgtcggaagaatttgaaaattttatgctaatagaagggtttttgggcagaaaatcgtaaggcattggagcaaaatagggtgccaaatcaatgagcaactgctttatggactatttcgaagtgtgcgtgcaaatgggaactttgcgtccagaagtgtaggagaaatctataaatttataaatgatcagtattgcttatatgtggaaaatgatcataatgtgccaccaatggagcagcatgagcaagaactggagcccaacaatgacaatgaaagcggggcggtgcaacagtgacaaatttgcgggcatttccatggtggtttgagaggccgtgtgaagaacctggaacggtgcatgttggttgtattccacggaacggccacattttatcactgattggagtgccactgccaaatgggtggcaccaacgtggcggaggactcggagctgcttaaaccagtggatttggataaagacattgcggtggacgtggtggctttgtgtggagtggacagcacccgcatatggagcaaatataccgctaaggatccgacgaaaagaattgcgtgtacaattctcgaaggaagggcggaatgtcgggatgtggaatccgccctcagtaattttaaacaatttttctctgtaaaatcacagacattctggtcgtcagcattccatccacatttttttcaaatcgcgggttctctcctggacggacgatttgtacctttttccaaaagaattttcgacaaaaacatacataatataaaatcgattctacatccgtttcgaccaattccgaacactgactcgaacaaaaaatcgagaccccatttttgaacaaaattcagatttatacacaaaccgcaaaaaaatattatagaaatcaagtccggattaggaatttgttgaaacggctgtaattattgggtttcccgaccctgaaaactcctaaaataatttgggccaacaaatcagtttcatttcaggtgtatcgaccattcagttatcacttttctccgttccaatcaaaaaatttgggacaatggcaccaaattggttttgaatgtgcgttgttcacacaaaaccggaactgatgcccagccgatttgggatatttgggcccgtcaaatttggccaatttttgcgccaaatattcgccgttttcaatttgccaatgctgacaacctggacaatttgcgtcgtctcatctccacaacaattctcactgatctcaacctgaattcaatgcattctggtaatctgttgcccgatttgatcgatgatgatgggccaaatgcaactgctggccaagcgttgtccaaatggttgcacactccgagaaaagatggccaaccgaggcgattgcgttgcagaattatgaatacaccgaaagattgggtcaacgatttcaaggaggttacaatatttcggggattttttcatgttagccccaaaaactctaaatttggacaatttattttcgttcattttgctttctattttttcaaaaagaaaatgaatcctgcaaataaaacaactttgtggaaaagaaaatattaaattttaatgattcttacgcgtgtttttttgccttgaaaaacaagctaatgccgggatttttgaaatggcattgagtcgtccctgctaattggcgctgtttcggcatgcaatttactaatgggctcgcaaatgtccttatttttaagatttttcttattttcaggcttcccctaaactttttaaatttattctgcttaattatatttttttgctggtttttgatttaaaaaaatcctttaaaatggcctttttatataaaaaatgctaccaaaaactctcaattttcaaattttcccgcaggcgtctatcggcactgccggcccacaaaagctttatgttcttaaaaattggttcgaaatcccaaaccttgagcctttttggtgaaaatctgttgataaaatgaactcaaattttcaaagaaaaattttccacagccctcttatcgaaaaagtttgttttgtttttttggaaaaaancgcgtcg

SEQ ID NO: 11026 - DNA, 1609 bp, Heterodera glycines
  unsure (1)..(1609): unsure at all n locations
tgcaggtcatatcgtatatgggcaacancctaaatnagatatcgatgtttcattcaaaggttaatgcaagtctcaaagagttccaccaatattttgaaagagagtggataagaaaactggaaacttatggaatttccataacttagcccgaacgagaaatactaacccagctgaggcgtggcactccgctataaaaaggttgaatccattcatttaaaacattccaaatattttttgagagatcgcaataatgtgcgtcacgcttcagttggagtctttttgaacttctttcaaacagtgatgtcagaaatcgatgacatattaataaaactaaaaaatgaaaaaataaaaccaaggccgcgagataaaatatatgaatgctagatgaacttcgcccacattgatacttttgtcacttcgtcctagcaccggcaaatgccaattcttcttcgcattgtttgatcgagataacatttctaattttgtttgaagctcctctgacctttgtaatgcctttttgccgattttaccatggattccgcgcccccttttaatttactctgagtttattgcttgtatttgactatttgaacggatcattgcaagggcgtagccagacccttggctttgggggggggggggggggtgaagtcaaaaattcgatttttaggggtgtatttttggtttttttaaatcccgaattatggggtgtattttacaaaatttttcgccgtttttcgccaaaaaattaatattttttgccattttggcctcccggcgtgccgataggggccaccgggaaaatttttaagtattttaatgcaattttgctaagaaaattgcttaaaatttcaaaaaaattcactgaaaattttttactttttgggtttcggggggggggggggggtttttaattctcccccccccccctccaattgccttttaattttccatttttcattttaacttaaatttgatatgtaatttgttgcccattttattccaatttctccacgctaatgaaaaacaatttcgaaagtgaattgtcaacagcgaccgtttcatttcgcctttctcccccttttgggtctttaatcatttgaaatcgattgtttaatgcaattcattatttctcactttgctttcttcgtggcttctaacatatgctaatcgcaactcctttggcatttcaatgccaaaaactgatttttgatttgtgccgttctcccccttccccagtcaaatccctctccccccctccattctttgcctgtttattcgacgattttacggtcggttttgcgccgacaaaaagtgactaagaatgtcaaaaacgtggccatggttatccttcggatgcattgcctaaggcaaaaaggagaaatgaatttaattaaatttgtgtcctccccgacaaaaactgtcaatggcacggaatttaattcaattcgaattatttttcagtgtgccaccctttgcttggcgacaactcaaaacggactcattcccccattttatttctcaaaattccctccccttttttcgttttgttttgcctccattgcttctgctattaaacatcatatgaaataaaagcttttgctcaaac

SEQ ID NO: 11027 - DNA, 4350 bp, Heterodera glycines
  unsure (1)..(4350): unsure at all n locations
tccagcgattatattgactttaatgattcggggatttaagaatttttgttagtgtttgagcttgtcccgtatcncatggatgtgaaaattcatttatttatttttttgcttatcctttttagtgaaaacttacataacattaaaatggaatattttgatggatatgaattaacataaaatattcccacagaacgaaatggcatatttatccgttaataaaattgcatttattaggtttaagcactaaaagatgtcctaaatatacaaaacatttagggattaattgtctatactttctaataattgctgaataaatgctctattactctctctctctccctaatataaatcagcttcttcccatttccttctgttcagtcagtgtctttcattatgctccttttgctttttggctctccattttcgtcatatgcttgtttcttttcctttgccttctcctccaacatttcctttaaagcttaaaaaatttttattaaattttttcctttaaatcatacaaaagcaatggaaactcaaagaaccacgacaccaaatttatcaattaaaaaaaatggttctccccccgcccatcccgagccccgatatttttaggcctattctccgacccgactcccgaagaaaaggctattaattttatttttagtactttgactttcagtgcgatgaataatgaatgttgatggttggacttcttgtaaagtaattccaaaatacttttttccatctaaataaaaataataatattaattttttactcattaaatttaatatttcgtctttcattttattgttgaaacataccaatgtctgtgtatataaaaccagtggatgggttatcatcttctctttcaccgccattattttgattataataaatttttcgtacagaacagatatttgaattctttaaaagaattttattagggtaataagagcagtcatttttgcgtctttgaagtgtcatattatttaaaatcaaaaaaatttaaatatatatggggcttcactattttgtctgtttcaaatgattattaattgatgttttctttataatttatcaaaacccatgttgtgaaacaaaacttaaaatggatttttttaaaaataaaatgttcaaccaatgggtttggcacaaaatgagaaagacagtttattttaatattttgccataattcttcgctttaaaatctatcagttgaaaatttaaatttatttatcaaaaaattagtgtccctttatattttgtgtcactttataatgcactaatgtaccaacatatgtttcgtctgtttgagttcctacactttttctcccaattgttttttgaatagagttggaattcacactttctttagctgtttcattttcagcctaaaataaatataattatttatttttttacaaaaatataaaatctaatcgtcttgaagcaaaaaaagtgattttagttttatttagagtagagcgggactgggaccaaaacacggacaactgagtactgaggtcccggtttagaccgggaccgggaccagtcccgggttttttcccggttttcccagccaaaaattcccggtttttcaacccgaaaaggtcccggtcccggttaagcccaaaattcccggtcccgctctactctagttttattgattccgaaaaggatagaaatattacaaaaataaattggagccgatataaaagactgacttttatttgttgtccttcggtggtttggccaacgtcaaatttttgttgtttaacattttttgtgtttccttttaatgtcttttccacgttatgatcatttgtgttttggcttttgatgttttgaccaacatcgtcatttagttgcgcaacatttgtgttttcagtttgagtctcttcctcatttgtgttttgtctttctgtgttttgatcaacatcgtcgtttggttgcgcaaggtttgtgttttcattttttgtttgttccacgttatgaacataagtgttttgtcttcctgtgtcattttttgtttgttccacgttatgaacatttgtgttttgtcttcttgtgttttgaccaacatcgtcgtttggttgcgtattagtgttttggctttctgtgttgggaccaacatcgtcgtttggttgcgcaaggtttgtgttttcattttttgtttgttccacgttatgaacatttgtgttttgtcttcctgtgttttgaccaacatcgtcgtttggttgcgtattagtgttttggctttctgtgttgggaccaacatcgtcgttttgttgcgcaacatttatgtttccggtttttttctcttcccttttatgaacgtttatatttccaatttgcgatacttccccgttatgaacatctttattaaaatttgtttttttgctttcaattggcgattttaaattaaattttgtattttcctgttgcgtttgattgttgctctttcgtccttcaaatatttctgtttttattttctctgcattataaatgagggaaaagggtgtgggcgtaggtaggaagcaatttgctgataaggaaattagtcggcaatgaagtgggaaagcatttttgaaaaaaaaattgaattttgataattgttcgaatccgggttcggagttcgaaatgggtcaaaacggacataatattcgggttctacgaccccgaaagcccatagaaacgactttttattaatttaaaatcaatttaacaaagagaaaaagtttgatgacacaaaacccgaaagtaccgtgtcgacttcttcagcctcaatggcctgcggactgcaacagcgcgcgttggatgaggcggatcaaatacacaacgaaacgacggacatttggccaaccgatgatcgaataccatgtgggtgaggaggaaatggcacaattttccatgaaatgccatgggttagttgaacacagaaaccgaggggagaaaaacaaaggaatttaattgtgttagaggaggtttatttttgaattttgttaacgcttcggcaaatgctcaatttcttttgagggcgtctccttcaaactcgctgaaatggccatgcatttggaggcgtccaaaggccttgtgaagcgggcgggcaaaaaggtggacgcgcaggcggaggacgccgtttattttgcgtcaatggccaaatgctttgcatgcgatgcggcattccaagtgcttttttattaggaaaatactttttctgaatttaatttctttttttaaggcggcatcaaacgcagttcaggtgattcggggaatatttccataaaaattttctgtgtttttttaaattaatagtttctatgactcatcttttcgtatatgaaagaaaataatctttcatacctatctcaacacacggttcaatttcttttttacataaaaaactattttaaagtttgtgggttattagaattttgtcatgtgattcgtcgggcgactttttgtctccggcaggcccgtagccggggggggggggggggggaatccgaccaccgaaatgaaaaattaaaaaattttcaaggaaaaatttgcaattttttaaaatttttaatttttgttttaaaagttaaatctttttttcttcggttcccccctccgaaatttttttctggctacaggcttgctccccggtaaaattatttgctgtgttcatttgaatagattttcggcggcaacggtttcaacgaacagtttccggtggaaaaattgctgcgcgactcgaaaaccttgcaaatctacgggggcaccagcgaaatacaacgggttgtgattgcgcgggagttgcgcaaaaagtacggcaacggcggcgaccaactgacggtggcggccacgccaacgccgtcgtcccaactttgaccaaaaaattttaacacatccctattttaactgccaatttaatgtttttattattagggcccggatttgttttgatatatatttttttgaacactatttggaaaaaatttctttgcgtgtttagatttctatttaaaatttttaaaaaataagaaaattaattttcttaatgaaattttttcttctttaaattttgggtttttatccatattaatccggtcccttttattatttatgcattgtctcattaattctattgttcattgcaatgttttgtgttgcgaacggtttacctcagttcggcccacacggttcggcccagcatgtttttccactatagcttttttctttgtcatccaaacccaacattttggtgtcattcgaaagcttaacatgtttagaagctttttctaagatattgcttcgcgatttgacaattaccaagttatacatgaaaattgcaaaaattcgaa

SEQ ID NO: 11028 - DNA, 4231 bp, Heterodera glycines
  unsure (1)..(4231): unsure at all n locations
ccgggacctggtagcggacaactgagtacaactgagtccttaggacccggttttgaccgggacggggactagtcccggcttttcccggttttcccagccaaaaattcccggtttttcaacccgaaaaggtcccggtcccggtcttgcccaaaattcccggtcccgcttcactctactaaaaacaaatatccgggggttttcgaggtcgctgatcacgaatatggcatccatttcgaccaattcgggatccggacccgaattcgaacaaaaagtcgaaaattcaaattttcgaattttgcatacctatttggatagtttttaggactttaagcctaaaaaaaaagttataaaaatcttgaacaaaatcattttccatgtcatataaaagtccactttcttcgcttctccattcattctcattcttcacttttttctgcattaacacatttttttctgctcagctggagccttgtcattattatttcttatccaattgcgaaattaaaattattcaatcgaacatttaaaggtggacttaaatttaattaatatccaaataaaagccccccccctctctatggtctttcatcggggacacttaaactggaaaagtgcacgatttttgaagcccttgggaaaaggccgccaattctgttgtcatttctacagtgtcggggccaaatgtaaccctatttaacagcctttcaacagtttaatttacataaaatgtttaaattacattttgctaattgctttccgtatttccatttaggcaaaattattatttttaatggcaccgcccgtcaaaaaaaagaaaaagttttcctccgacaatcgccgcctcatttcttctaccggaattggtgaacatgaacaacaatcgatgggttcacttacgacatcatttggaaaacggcgaagtgttcgcgtgtcaaggaaattgaaccgaccgttgtggacgaaattgaaacggtcatccaaaattggcactttttcgttttagggcccaacttttggatttggcactcaatttcttttacaagttaaagtaatttttccccgcattttagctggatttgcagcgatgttttgatggacagtctcccattctttaaccatgctcaactcggcctcaaattggcgctggtttcgccccgttttgatgcgttggtcgacaaacatttcgacggcaaatccgcgctgacaatttggagacaaatcagaattgacaagattggaacaatgccgagactgtccgtgtttatcaactatgtcaaatctgtgccatttcctttgcccgaccgtccgttgcccaacaaaattcatttcaaggaccttcaaattgcgtaattccaaattaaaaacacatttaaaaaacattccttccgttttcaggtacattgaccatttcgtcatcgcatttctccgtgccaataaacaaattttcgatggaaatggcactgctttgaaattctccatttggtcagccaaaaacgatgtggtgccgatttgggatgtttttgccaatcaaatttggcccatttttgcgccaaacattcgccacatgggcttgaccaatgctgaccatctggacaatttgcgtcgtctcatctcaccgacaatcctctccgatctgaaatggctgaattcaatcaattcctatcgtctgttgccagatgcgattggtggtgattttgatcagtcaaatgcaactggtggccaaattctgtccaaatggttgcacactccgacaaccaatggccaacccaagcgatttaactgtgtttattatcaggagccagcaattaacatcgacgaatggatcaacaccttcaaagaagtgtgtggccacattttcctcaaacaactgattaatgattgccttttaattttgtttcccattggttatgtaggaatttggtggatggcggaggtgtaaaagatcagcctgcggtgggattcgaacccacgtcccttcctttccgtggaatgctctaaccactgagctacacagggcaccctttacacccttctattgcactttttcatcagtgcaatgagaaactctctgcctcccaggcactttgagagagcccgcactacatccccggcctctgagaagaccggtccccgggctcttttatatgctgtcggccgccagcacgtaagagtggagaggtgaacgaatgcagcagacacatcccactcatggtctctgaacttgttgccgcccaggcatacaagacagagaggagaatcgtctcacccagagatcgattactccgatgcatcaatccacccaggagcgccatgtaggaatttggtggatggcggaggtgtaaaagatcagcctgcggtgggattcgaacccacgtcccttcctttccgtggaatgctctaaccactgagctacacagggcaccctttacacccttctattgcactttttcatcagtgcaatgagaaactctctgcctcccaggcactttgagagagcccgcactacagttaggcatttctccgtgccacttcttctgcttgctacgaaattcaattttctgttcatgccacgtcgacgtccatggtgccgtttgaagaggtgaacaaacgaaccaacgagaagctgacactgatcagaaaagcatgtgaatatggatgggccatccgctggatgattaaacgacaccaaattggacaaatggttcagtgggaggacgcaaatttggacaatttgaacaatgtcagcattgatttgagtggcgacaagcaaaacattgggtgagtatgaataatagaagaattaaaaattttttagaaattcatggtaatactttagatggggagccccccttgaagaaaaattttttaatttttttttaatttcaaatttcaaaattattcaagaaaaaataaaaataaattccaaatttgattaacaatttttttggtggcgagatttcggccggcgagattttggggtgcagccgtttatgttgggtttctgggtcggagaatccgaatccgatattcattttgactaattttgaataccggctccgaacgcgagcaaaaaaaaagtagaaaacttcaaaattcttacttttgttcctaattgatcgaaccaagctaaattcagtcaaaaaccgttgcagaatcaaaaaaaaatggtcatagaaaacaaattaaaatttttcgagattaaagtcacttaatttaggccattgtctccacaaaacgaagaaaaagaaacgggacaaatcggcggaaaagggtgccgaaatgtgcttaagaagtgaaataaattgagaaatgatcggctatttttgagattattgaatggacaaatggatctgttaattattttagatgctcatttgctcgttaattttgttgtaattctttcatttctggcatatgtaatttcgcaattctatccgtgccaataatcattttcatgtaatttcgtgcattgaattaatttgttgtaaaaatgtgaattcttaaattctatttttcgacattttcttaagagtcctggttcggggtgccgaaatagatgttggatttgggtccctcagtcctgaaaaaacttaaaattacagaaaatttcttcaaaattcgtccaaaagggaccctaaaaatggaaagtagttaaataacaaggaaaggaataatttatgttttaaagacttctgataaaattcaccggtgtcataaatttttattttgcattaaaaaataaaaattagtacaataagtcaattagtttcataatattgcagtaaaaattaatacttatactacagtagttagaaacacctttagtgcacggtaactccgattttgttacaattttcggtcttttatcatttttcatttgatttttgagttttttactgaatattttttccttatttttatttttttgttttaaaaattcttttttaattaaaaaggttctttttcaaatttaattgtcttgaattatgaattttcattttttgttgttttaatttaataattaattttggtttcagagacaggcaaaacttcggcttcaaaactccgtatttttggtctttgataattacccaaagctttgtgaaaaataaaacccaaaagttggcttattgcaagaagacacttttttctattttttttcaaaaattttctattaattctttcaatagaaggaaatttttgatcaaaaaanggtacagaagatcagttt

SEQ ID NO: 11029 - DNA, 2673 bp, Heterodera glycines
agagggcgagagcaacactccctcgcctactctttttccttcccccttttcaccatctctcgctctctcgcctctttctctttccacccgactattgcgtattttctacctcctttccttccccctccctctctctttcttcctttcccacctttttcccactcccactccctccctctccatttccttttcctctctccctccttctctctctcccgcctctctttctcccctttccacgctatttcctgtatatgtgtagccaaaaatgcaagaggattccgcttttcgctgtctttctttatgttatgttatgatgggcggccgagtgggtgccgcccttgttgctattttgggcggtcccattaaatccgctccccccattgcctcccttttttccaagcgcccgcctggcggcggtcttccctttgccattgcttcttcttttaagttcataacgaaaaaaaaagtctttgtaaaacagtgaatgaattttattgccaagagaaaataaatcactgtttactccgttggaccgcgcgcgcgtgtgcgttatcccgcgaaaatttacacaccgttctgacactacgccgcgttttggttattattcccccgggcgcgccttttgccatttttgtggtcactcataatttgcaggtgttaagtgcttcctttctcttcgtatttttaataatgacaattaagtaattaattaatttacctacaaatgtcgccaattctttgtcagcaatttatccgaaacaaagacactgattgaattcgttcataccttttccttttttaaaaaatggaggagggcggattaccgcccgagaccgcccccggctcagccaccgccgaacaacagcagcaacaacaacaggcaactcaaccgagtggaaacgaagcaccgcttgacgatgggttggccatgttgcaggaggtcagagtcaacggatggacgattgaacacaccaaaaaataaaacagcaaataaaggccgaatgatttattattcctttggaggagtcataaattaaaaaccttcactcttcgcatatttatttattttttgttcagctttaccaacgacgtcatgctgaactgctcgcgcagttccagcagtctcagagcattgcccagcaggactacctgctcaacctgcagttgctccagtccgcactgcctgccgctgctgcgatggttgtgttgcagcagcaacaaattgccgtgatgccttccgccgcttcgcagcaccgtccgctgctcggttcgttggcgcacacgagcagtgagcagtccaccgaagagtttgatgtctcggcacagcaaaccgcgcagcaaccgcaacaccaccagcagacgtgcagttcggtgccgctggccaaggaacacgcggcgggcggaattgcggcgacggcacgcaaccgacgcactttttcgggatcaggccaaacaatttcccaacacacgcgagaccgactgaaatccatgtgatttgggatacggaaatgattaactctgattttggggatttgttactcaaagccatgtgacaatttggcaatttgaagtgcgatactttttaggattgcctgcaaaaaacagaaacagcgtctgcacaactcaagttccaccggctcaacgtcaaacattgccgcctcggtgaacggcacggccaattgggcgcacggagccaccaatccggagctaaatctgataggcggtgggacggaggcggcgcatggatgcgccataggcacaactccgtcgcattttgaccaaaggtttttgttggtcgattaattcaagggagggaggtgaacgcaaccaaaaatggaaatttttcgataattgccaaacatttgttcaggtttttgccctatccccacccggtgaaacacagcgcggacaattcagtaaacaacgcaatggcagcgaacaacaacaacggcgacaccaacacatcgcccaccgattttcaactgcgcaaagtgaacagtgagcccaacctgaaaatgcgcatcagggcacgactgctgaacaaagggtcgagcccacaacagcaccaacaaacgccaaacacaggaacaacaatggcccaacagcagcaaaggttggataagggacttatttgtggaagccgactgcgtttattttaggcccgacagtgctgccactgccagtttagctgaacaacagcatttgatcccgcaaaatccggcagtgagtgtctccgttgacgcggctacacttctccaacaggcggctcagtcggcccagcaattggcagccgcttcggcgttgaccggctccaacacgatggtgccgtctccatcgcttcccaatctgcccgcatccgtcacgcttggactgaaatgcggtgcgacgaacggaggcgcggctggcacagaaacagggggaggcagcggatcggcgcagcaacacgacatgctcaatctgttgatgcagaatccgttcatgcatttcctgtccatgccgtcgctgttgaagaatactcagctgatgccgtccaattccatgtttgacccgccccagcagcagcaattggttgatgcggcacaaaaggcctcaggtctctgggaattcgtccaaaaaaaaaatttgtttggcaaaatgaaaagccctaatttttatatttcctgtgactct

SEQ ID NO: 11030 - DNA, 1435 bp, Heterodera glycines
gtattttttggttttagggaccggtgcgtcgctgggacggaccgtgcgatttgacaatcgaactgcgacaatgttcccgagtttgcttaagcaacaattgcgcgatttggtgctccgtcgcaagtcgctggtcgagagggagcccgaagatgacacaatgatgaattcagcaacagtcggactaccacccatccgggcacagagaaactgttggtcaacaaccaactcaaatcgggtgaacaaagcaaacatttgacgtaaccacaaatagccgttttagttgggaaattgtttatgggatattcattttccctaatttaaggcattgcctacgaccctttgatggcccggcatcagtgtttgtgtgccgaaaacagcaaccacgtggagcacagcggccgtgtgcagtccgtttgggctcgcctcgtcgagaaaggcctggccgcagtgtgtgaacgcatcacgtaaataaatttagttttaaaatcaccattttttgttgttgtttcagcgctcgtaaggcgccgttggaattgctccgactcgtccattcgcccacttatgtgacttttttcgccgtttctcccaccgcatgtcttaaaatggaccccgcagaattgcctctaaagagttttgtgcaggtcggtcattctaaagcggatttcaattattttccttttttcagttgccctgcggtgggattggcgtcgactcggacacttacttcaacgacgcgagcactcaaacggcggcaaaaatggcagttggcagtttggttgaattgtgctgccaagtgatggaggggaaactgcaaaatggagtgagtgaggagttggaaggacagtcaatattgtgcttttttgagtccaattcattacccagggttttggcttgaatggcggggatacaccgccctttgcaccaaaaattaagttttgaaagattcaaaaaatttgggtgagagagatcttggacagataccactatggagtcgaaaacctaattttgtcagttcgcatgcattcgtcctcctggccatcatgcggagcgagaacaggccatgggcttttgtttcttcaacaatgtaaatgcaatctatgaatttccttcaaagttttcgctaaggtggccatcgccgcccgttacattcagcagcgttttgccacgacgtgcgctcgcattgccatcgtcgattgggacgtccaccacggcaatggcacgcagctgtgcttcgaggccgaccccaactgtttgtacttgagcatgcaccggcatgacaacgggaatttttttcctggtaattttgaaaagatgtactaatttaaatttgcgaatcgactttcattactttgtctcttttatccattcaattttttgttttcaaactttctctttctcacttttgttccctattttcctctcattctgccccaac

SEQ ID NO: 11031 - DNA, 1433 bp, Heterodera glycines
  unsure (1)..(1433): unsure at all n locations
ttcggaactccactggcagaccatctcccaacgcttttcctcactcacgatgcactcgtgatgattctttccgatctgatgcgaaaaatcatacctaagttattctccgccagaagaatttttgttttaggttttgccccaattgcaaaaatgacaaattcaaaatgaattttccccgcttacaattagttttttcgtctagtcaaaaagggagaatcgttcacacttttcatattttcattatgactgactataataacattataaatatcggaaatgttctgactttctttccctcttttcactgtttttcttgtgattgccccatattaataatattaattaacaatgaaaaacaaaactccatctttgttttggagtcagccagttcctttttgtttatcctcacacaaaattttaattatttctgtctcaaaaatttattttgtaaaacgcgaataaagattttgttaattagtcgtaaaagatttgaaagggcataaaattggaaaacgagcccttagggtaaatgatcattggaagagccgtactaaattgttatatcatattttttagaaaatccaaaataaccgacttttactcgaaaaaaagtattaatttgcgatgaatataaaatatccaaaaaagattttcgaccctggcaggactcgaacctgcaatcttttgattcgaagtcaaacgccttatccattatgccacagggccgatgactgttacgatccatgtttcatttttctctcgattttaataaccaaaaagaaaaattttattttttaattactatagaaaaaaatttttcgaccctggcaggactcgaacctgcaatcttttgattcgaagtctaacgccttatccattatgccacagggccacgggataggtgacttagaaagtgactgataattactttttatcttccgccttactgtacttctgtgacaaagccaatttattccatacgtttttaatagtctcctttttaattggacagcagtgaatggattcgctaataaatgcttcgtccgttaattctcgtcttgaaattcatccggatgcatttgtcgactcgagaagtgtcttaagaggtcacataatcgtcggacccggcaccgtcattcatccccaagtgattatttcctactgataatcttaaattctcggcttcttcaggcggtgattgactcgggagatggttgcatcgaatttggcaccaataacattgtggaagaaacagcaaaaattcaaaatttgtgagacttttttgtgttttctaattatttggcttttcaagaaatcattcgggcacaatgcgaatcggaaatgacaatttgtttgagataagctctggtaaaatggcattgttaaaaaaatatatgattttgtcccttccaanagttttcagtngtgtgact

SEQ ID NO: 11032 - DNA, 3294 bp, Heterodera glycines
atgaattaattgttgcaaaaaattaggaaaagtacgcaaaattcgtatgtttaaaatttttaaagaaacattatagggacagttaaataattatatgaataagcattcttctcagctgttaccctgcaaaatctggtgcgcttctgatcactactcgtaaaattatgagtgattgaattttcactaaaaagttaagcctaaactttttggcctgtttaaaaaggattaaaaattttaatcatcttcctttttaatagaaaaagcatcagagagccttattaacatgtaaataaaatttatcagattcagatcgccatgaaggagtaatctgatcatgttggtccaaaagatttatttgttcagcatcaaaagttagcttacaaattagaggaaatttttctgatttttttctctatataaatagatttttggttaaatttaagaaaaatttgaaaaattttcttaataaacttagttaaaaaataaaatttttccttggagatttctacaaaaaggcctaattttcatcaaaaaatttgctcaaaatcgtaaacttagtcattttttggaaaaggtacgcagcaaaaaaagcggattgtgttttggtttctttaaaatatcttttaggaatttttccagcgattaaattccgtttttctaaataaatttaaattaaaaaaatcattagaaaaaaattttttaatcaaggatcacggctcacggagtttttggggtgccgtgatctcggattttttttaaagccccgtgatcacggctcacggatttccgtgattggaaattcaatcacggccagccctggggatttgggatataccataaaataggacaattaaaggaaaataaaattttatcttcaattcacagagtttaaaaaagagatgggcacaaataaaacaggaacagtgaaaaacaaaaaaatttaatacaactcatcgtcgaactagaaggtcaccggcttgcgctccgcttttttgcttgcttttgggctcggcatcactccgttggcgctgtttttcctgttccgaattgctaatgcccgtgccacgttttttctgcttggcccggatgtccaaatttgactgtaaatttattttttgtaaatattattatttaaatttggctggcaattttttttcacttcggccgctggcgtgacaagcagcttggcgccaactttgtgcttgccatgcgcgttcttcaccatcaatgtgtactcgcccccatcttgtggccgacatttggaaatgatcagagaaacctgacaatatttttaacattattttaatttgataaaatatttttaacattattttaggatttgataaaattttttttattaaatttgctgctaagttttgaatttagtttagaaataaatgagctacattaattaattaattgagtgccgtaaaaatcccttccaagattagaactacagtaaaaagttttcttgtcctccatttgagggctacggtatgaaaaatgtaattttattgaaattaaaacaaaaaattttttatgatttctcagttttatgataaatgactttttcacaaaaaaagttttttccaaaaaacagcagttttttttaaatttctgtgtttaaaaatttcatttaaaaattgccacttacatgtcccgtgtcaccgtccgtttggcaccgcactcggtcgtcggtcaatggcatttttcggccgccctttttccacacaattgtcggtgccgggttgccctccacgacgcatttgatgatggccaattcgccctcaaccaccgtcacattttctgggatttcgacaatccgtgccggtgtgccggatgtttccaggtcctttaaaaaatagaaataaaaaaggggtgcccaaaaattgaaaaaaacaattaaaaagtgaaagatttttgtttttgtgctgcttttctcaaggaaaaatattaataaataaaaaatccaaaaaataggcgccaaaaatggcgaaataggcacaaaaaaggcgcctaggtattaagcacaaaaatcccgaaaagcatacacaataattttgaaattttttttttaccaaaattgccatcctttttgtcaccaccgccatgttctgtcgctcctcctcgttgttgtacacctcgtcctttgcctcttcgcccgcagcgcaagccgctgctgccgcctgtgccgaccgatccgccgctgtgctgccaacgcgtcgccttcggctactggacgcggtccgctcctgttcatatttttatacattaaatatttaaaagaatattttgtaaaaaagaaaatacagtaaaaacgaaaaatactccgttaaaattaatttctaaaaaaaaattcaaaaaatccttcctaattgttttacaaatatgcccctctcatcattttctgtttacaaaaatattcccaatgttttgcaccttcaatgtcccctcgggcggtgcagggcgatcgaccaccttcaggcgcaagtccaccgaagccgagccgaattcattcacaatgcgaatggaataggtgccggtgtccgattgttcgcatttcggatagcacagctggatgagagtgtctaaaaatgggagaaaaaaatgtgaaaatgaaaaataaaaaaaatagaattaaaaaaaataataaaaagagaatttagcccaaatcttaaaatttggccattttttagacaaaatcttctaacaaatagcaaaaaaagttgtttaaaagtgtgccgcaaaaaaaaacgctttttaaaaacaaaaaaagtgcagtcgccttgttaaagaatcgcaatttggcagtgaaatatcaaattgcattgagttttcaaaaattttccggcggcgcctagccgcaccaccgtccccccccccgtcgacccactccttccagaccattttgcaaaaattttggttaatccccctcccttttttaaatgtatgactctgcgcctccaccctgttaacaagggaacattccgaactgtcaccactcagagcgttttaaaaccgcttttatcgtgtagagcatagtcgatttgctattgccaattttcggctttattggctctggcgccaaaaatgataagaaaaagtgatcaaagtttcgaaaaatcaataaaaaagacaaaattttaaaagttcataaaaaattcaaaaaaaatgatagagcaagcaaacttattttaaaatgattagcaaacaattctctatgaaataacattatagaaaatttaaataactgcataaaaatatgctaggtggagtactactttgaataaaatt

SEQ ID NO: 11033 - DNA, 1339 bp, Heterodera glycines
ttataaagaaatttttcaattaacaaaatgtttgaatactttttaaaaaatacaatcaaacgtttcctgtttctttattatttttacaaaccctgtgtatcaagaaagattttcatgtaaataaaaaaattaaaaaatattatttattatggcctaattccacgaacatttgccaagaaaataacataagcagagaagcgagagaagacggacagagagagagagagggagagaaagagagagcgagcgatgtgaaacatgaaaaatgtgcgtgccctcgggggtcagcgatggacaccgaccggtcccgactcactctcgttgtcttcgtgtccgtggccgtacactatttccagcatctttcgctctgtgcgtttccgtccgtctctcctcagtttggcattgcttcaactcaaccacaaatttctttctccgaccggcgcttaaaataggcgaggcggaggggcgggggcggtggggggccgcgtagaaagaccggtccaaccgcggggggcgggcggtaaagggcagcgctcatcagcagttgtcttccgtcatcgtcgtccattcgacggggctggcagcagcagcatcggcagtattgaacaatacacatacatagttagagccagccgacccctcccctccccccgccccttttctcggggggggggggcacggagagagtgagtgaagtgaatgtccacccccgccccccattctccttgcggggagagagggaccttttgcactttcactcgcccttttccgctgcttgcggcgatgcccttttcctccccattccgccctctcacttttgtccactctttccgtctttttgcattattttagccaaccctttctcaatttctccccccccctccccaattctctcttctctcacacattttcccgcaaaaagcctcatccgtcgtcctcgtcgtcgtcggacgttggacggcgtcggcggcggatgtggtggacacaagggaaggaataatttcatcgacggccagtcagcggctggcacgaccgccgtcccgtcaacgaactgctgtaaatggcggagagggtgtgggggcggggtgcatacggcccggggacggccaaccgaccgaccgagcaaccccggtcggaaggatgggtgggtgaccattgaagaaccggccaaaagagggcattgtcgtcgtggcactttgccatcattttcctaggccacagcattccgtcgttaggacagttcattttcatttgtatgccttcttccgctcctccttttcgtcctctcattttgttggagagtgccagctgctgagtttgaagccaagtcccttcgccc

SEQ ID NO: 11034 - DNA, 838 bp, Heterodera glycines
cccccccccgcctttcacaattctttgcattttctttcttcccttccgtccccggctgtccataattttcgttgtcgaaaaagtcgcacgaagtgatgttgtaaaacgaagggtttggatggacagatgataaaaatggacggacccacattttgcacttttccgagcaaagtgcacaccaaaatcaacaacaacatcagcagcatcgtcttcattcattttttttgaatctttttattgtatacctcgcattaataaatggtgttattatttttaaacaaatatattttcacctgattttttcttgttttaagctctatggtaaaataattcgctccttttccgcaaatatcactgtgttcatttgctgtcgatgcaccgccagcaccgtttgttgtttcgtgtactgcttgccgacgcggccgttgccgcgtgaactgctgattttccgctacgcgtaaacatcgcttcccaaaactgttccgcgccgcccgcacctctgaacggcgttgcactgttgccttacgtcgcgccgccgccgctgccgcgacaccgccgtcgtttcaacgacgacattccgcagcagaaactgttcagcgattttggccataccgcggccgccttcgttcgtcgccgagtgcagcagcaaaaaatggtggtggagacgcaggaacagctgaatattgaccaccatccatccgcgtttcaccgtgtcggctcggccactgttgcgccacaaccgcccgctgctgtggtggagacgaacgtcgttgccggaacgatgccgacaggtagggggagggagggggtcacagtgataattgtttttttttcggag

SEQ ID NO: 11035 - DNA, 211 bp, Heterodera glycines
ggggggaaacgatggaccaaccgacagaaaacaaatctttttttgatactttgtatagtaataatagccacacacaacgaatgatgaatgaatggggggggggggggagggaaggaaggtccgttcatcagctcaagcagtaacagaatgttttttcagccaaaagctcataggagtgctaatattttgattacatccaaccaaaacaaaa

SEQ ID NO: 11036 - DNA, 4154 bp, Heterodera glycines
  unsure (1)..(4154): unsure at all n locations
ccctttagcgtgaaaataaattttgtttttgcttttttctgctgtgtccgccccgcggccctcccaaatcgataaaacattcgcagaaaaaaagaaaaaaaatttcggggtttgttgtttttgcctccccccccccccaattttgtgcacttttctctctcttttttaattattttgtgtatacatatgtactagagcccggcgggaacggaattcccgcgggaaaacccgagaatcccgttcccgtttcccgtcttttttcgctgacgggaattttacgggaacgggaaaaatgacgggaatcccgttcgggaatcccgccccgttctttttcgttttcccgttcccgttcccgtaaattttttctcaaaaacgggaataaaagtaaactggtaagaatgggggtctgagtgaaaaaatttgaaggaaattggtgggaaaagagagatttttttgtgaaaaaataaatataaattcattttaattcattagcgtacgtatttatgtagcctagtggttaatacttctggtctttcattatttgtctcctgagttcaattccccattaggatagggggtttttcatattttctttaagttattttatttgaaatttaattaataagaaattttgtctaactttaaaaaatatattttttaatttttaaatagccataaggccataaattaaccaattatagttcattttttggacaaaatttgttagcaatttcactaaaaaattaatttatttttatttttaaatagccataagccaacaaattaaccaattatagttcattttttggacaaaatttgttagcaaatttcactaaaaatttcaanaattttccccggcggcgcctatcggcaccgccggaccccctccctgtaccacaaaggattttgtaaaaggcgctcacaaaaaaaagagattttaaccaaaaaaagattttgtaaataagttgaaaacatagaaaaattctctaagaatattttggaattttaaaaataatagacaattttaatgaaaattattgtacatatataaaaaaattttctaggattttagaacagaaaaattaccagtttttgccggtaccctcaaaaatattattaccggattaatttcaaaaactcaagttttaaatttttcgtcattaataaagcaatgtttaatctttacatagcaagaaatttttttaattgtttaaaatataaaattttacttaaaaaataagtaaattaaaattttataaaaaaaaaatcaatattttttcgaaaaaaaatttttcccgttcccgcccgggattcccgttaaaaaatttgttgtccaacacaaagttactaagtgtcccaatcgaattctccgtcccatttttttgcgatataattcgaaaagttgccgaacgaacgcagcagcgccaaagcgaatcttaatggggtattaattattgctgttaattagtactaattaacaattaattgttgttaatatatatattaattattagtaattttacaccttcttcagaagcatcgcaccaaagagaaaagtccaaacatttctcaatattgtcagtgctttccgtcaactgacttatttctgccactattttccatggtaatccatttatgtacactttttcgctgtaccgactgctctcaacctcctctcgtgcaaattctgacactttttcaatgtccagcaaaagtgtgcccttttttcgatcggaaatccgtccattagtcgaaaatggcattgggaaaattccgtcggaaatcccatgacaatttggaagggatttgaactggtaaacggcgatcacttcatcttttgacaaaacaccgaagggaactgtaaatatgtatcaacttattgaaaaataaattttaaaaaacttttttaaaaaatcgccacaaaaacaatgaatattctacggcatctcatcagagaacgagtttgaaattttgacttatttttttaccaattttcttcgtaaattcctcatttgacaaaagcggaaagcgaattttgaacagtgccgggccaagcatttgacggcgattctctgctgaacaatcaatgccattttcacggcatttttcatcggcccaacggagtgcctttaaaaaaatttaatggaaataattaaatgactaataaaattttcagtttttaaatttaattgttaaaattaccgcattccaaattgaaatttctccacggatttgcaattcgtcacactccaaaatttcgcacaacaatttttggtcaatttgcaaaaaagcatccgatttgagcaaagtgtccgcatttttgccaatgtaagccaaacaacaattggcaaaattctaaaatttaaaggaaaaataatctttaaaatgtagtctttctctgagagtgccaaagcgagaaaagaatcgagtttttcttgtccaggttttcgagtttagaagaccgagatttctttaagccctctaatgattgtttggcttttgacaaacttaaaaaaacattcattttttgaggaacatattttacaaaaaaaaagtctaaagtcaagggtttttcggtctcacaatcagacagcagcaattaattggtcttaaaatccttaatttattatacattctaaataaacgaaaaaatttttgtaaaaattttagtgtaggaaaatatttgcaaaaaaatgcaaataatagcgaaattcaagacggaaaaattcacgagattgagtttaatcattcaaaaaaaccactctaaacagtttattatgtattttatttaactggaaaatgtaaaccgacaaaatagttaaaaattagcaaatttttaattctttcgcatttttcaatttttcctacccactttcaagtcgagaagacgggcctgggcaaaagcgaagaaaacattgcgcaattcggaaattggaatttgcaaagatgagccgaccagagaggggatattgtacttattggctaattaaataatttatttatttttgtcacataaaattaaatccaccggcgtaaagcacagccatggcattttctccgttcagttcattcaactcttccgtataaatgaagctcaacatcactttgaatgctgctgcttcaacgtcggggacctccacgggacaatcagcagaggctaattgaaaattattagtgtaattagcggcggctaattgaaaatttattagagcaattagcggaggactattgaaaattaattagggtaatttgcagagattaaattgtaaatgtcattcagtaatgtttttaccgaattccgctttttcctttttggcatcaaaacggaacatcgcctcaaaaacgtcggaagcgtgtttcaaaatgagcttatgggctggcacaagcttaagaggattaaattttaaaaaacacaaaatttaccattcactaaatttccaatttttaattaataaattaaatttttaatttgaagactcgcctcttttgcgtctccgtcgcccaccaaaaaataaacatccgcgtcctcacgcgtgctcaacaaatgcttcatccgatcaagcactgattgggacatgataagcaatatgaaaatcgtatttatctattaatgtaatgaaatgaaataatgggaattaagtgaattaagacccccccccccccctgaccgtccctgatcagagtgcgcttgtgtttattgtaaatcaattatgaacaaatttttacacagttttcagtttggacctcagaataatgtttttttgaaaatttatacaaaattaaaactgaaatatttatttaaaattcaaataaatatacactaaagatataaaattttgctgtaatggtgaattaaaatttagggtttctccaatgaatgaacgctacagcggtgggaaggacattattgttgaactccctgaaagctatgatgtccatcacattgattggctttcagtactaatgaaatgaatttctttttttaacatttaaattatacatttaggtttactgtgttcgattcgaagttgactacggtcacatttttatccgtaacatttcaccaatggtgccaccatatgttcaaaaaccaaaaagggtaaagcaaaattggctctagtgcactttatgagtccaattttcagtttctttgg

SEQ ID NO: 11037 - DNA, 3024 bp, Heterodera glycines
ttacagccgaattcggtcacagttcgttggaagtactgtacaaatgtccgacgtgtggcaaagaaacgcacagaaattatgagtgcttcagtacgtcaaattttaccacaaatgcactcaattacaataattgttccgctttaagttgacgtctcttacaactggggccgacgacacggcgatacagaaatgtttcgctaccgtactttcgcgggcagtttgtggggacagtacacgaaaaatgtcacaaaaacgatactgcagaagcggatgaccatgaacaactttgagttggtggagcacaaatacgatgtgatgagcaatgtttggatgggcaattattacaagacaagcgatgaatggaccaacgatttgataaggcgtcttttataggcatgccaaatggcagcactttattgtataactgtatattatatttgtattcctcgtataatttatttgtatctctcgtataactgtattatatttgtatatgtgaataatactgtgttgtctgaatgaatgttatacggtcttttttgtccaaaatgagtacgtttcattccccaatgtctttcacccttccaatccgaaaagatagcaatcggagacgcaaaaccgctcaactaacaaaaatgagaagaaaaattgcagccaaacctacataggtagttttgtatgtaccaaatacaatttgatagttttttccttcgtgttttggcaatggataactgagtccccctttgaaaagagacacttcagtatccgattttttacatgaaaatggcaaatacgcccctaatttgcatttttctcatcatacaaaaacggcttacctaaatacgcgtaaacaaactgaaagccatgccaattgaaattgggatttttgatcgacagcaccgagcaaaattcggaactttcggcagattaaaaatagatttttggatttaacttttggttagtcgataccggggggggggggtctcagaatcgctgatcagtgatcacgaatccgacatccatttctgctaattcaggatgtttggagcgcaaattcgacaatttcaaaagccactcattaattatatgctttacttaaatctttaattaaagagtacttctacatatagttggttgtaattgaaaagtcacttaaaatttgtgattgttgtttttatttctcaaaatccattacaatgacaacaacatatcgtccgtacaacaattaacaaagccaacaaacagaacaatccaacaaatccgaacatggacaattattcaggcggatcctccttctcccctcctcgttgttccgcctctgcgcggctaagcattgtttggaaaatggcgtcgagctgtttctgcagttcgccaatttcctccttctgtttttcattcgcttcctgcaaagtttcattcgcttccttcaaacggttgcattgagcctgcaaagtttgaagtttgtctgcgcattttaggagcagtttatcaaaagactattcgagaaaatatgagtaagttttttgtgaatttaatgggatatgctacatttgactttccaaaagttatctatctctttttacaataaaaagctaaagaaacaacacaattacaaactctgacaagtaatagaatttgttgttttttgttcaaaacttgttttgtggtgtgctttttgtgctaccactccaacctcgctcacttccgaacatgcactcaacagatcttaagcggattaaattaaactttgatgtaccttaacttttttagaaccattcaacttagatatttttgatattatttgggcgcgctgtcaaaatcccgctgcgtcgaaatcccgccgcgtcataatcccgccgcgtcgaaattccgccaaagccaaaatgagtcgaaatcccgccaaataaaaattagcgaaaaagtcttaaaattacattcctaaggcttcaaaatacgaaattcattaatactttaccagaatcgcataaataaataacaattttcacgaaaaataatgatatttttaaatattgaatgaatcgaaaaaagagaattgtatgatcgaatcttcaaaattttcatagtgcacgaaattccgagctcaattcgctgcgtccgcttgtcggtcgatgtttctgctgacttcaaaaattaagtcggaaagggtcgggcgatcagacacttataaaatttgttaagttttttgggggtttacaagtaaaaaatacagaaaagatgggttacttcgagaccaatgttgttgttgagggggcgggtgaattgatgccgaactacaacggctgccgtgaatacgtatggtcgggttcaacggattgaaaatgatgccccgcgaatgcttaaaatgcaaataatcaaagaggaaattataaaaaatggttctttacggttatctgtcctcagattttgaaaaaaaacatttttttgaaataaacttgttttaggggttttcaaggtcggggaaaccgattctggcatctgttttgacccaattcgaaccccaaacccggatttgaaaaaaagtcaaaatccatttttcaaaaaattcacattttatacacaaaatcgcttcacaatgtcacgaggatgacccgcacaaccaaaaaatgacacgacgacgactcgtataaccaaaaaatgccctgagtacagataaccgtaaaataccaaaaaaattattagaacaaacattgaaagcttatttggggcaagaaaacactcgccgaacgaacaccaaacgcgttgacgccatcaagcaatgactgtcacgcgtggcagtccgcctaccttttgagttttcccaagtttgaaattggtgatgtcttgttcttctccagtcttcataacgttcattgttgttgtcgtttgctcacaatgatcagaattttttgcattttcgccgtcattgttgttcagaaatctgtgtttacaacatttatgaagaatttcaatttttcaacccatattgcttagaataatctaatttttatatatgtataatataaa

SEQ ID NO: 11038 - DNA, 2466 bp, Heterodera glycines
  unsure (1)..(2466): unsure at all n locations
ttttctgctccagtcacgcatccccatgtcaaaccggtcagtaaatactttatcgtttttgtgtaaattctctttgaactcaggccattccctgttgttcgtgaaagtaatgaagagacgcgctttcttcgcgtcatggcaccgtgcaaaaacggtgttgcaatcttcatacattttcttccaatattggagagaatttacgttgtgttcggaaagccgaacaacactgccaatgtcatcaacagttttctgttgggcattggggttttgccgtgcttgctgcccattgtattggttgaccaaatactgcagcagattttttggagtgctgatccgcagatccatgtcaggtctacgcaaaaatgttgctatttgccaatcaatttttgcagcctggtcaaggatccagcgctgaccaagtcctccaccacatgaaagaatgtggtggtattgcaactccacattttcatcccttattgcgagataatacttgcaataatctcgcagggagataaattgtttggatttgtcaatccgccggtgcggcgatgaaacagatgctacagattcagcatctgaatctgcgactgaccccacatcagatgatgcaattgactgagtctcgcacgactcattatctgactcggcttccgagtcaaataggccagatgcattctgagcaccttttcgcttacgcgatggtggcttagcatatttaatgccagttgtgtatccatcatcgcccattggcttgattaatggatacgtaagactatcagtccacggactgaaaggagcaatttcatttaattgcccttgtttgttctctacccaaattcctttgggcggaggagcaccagtggggtccgcatgaatagcgaacatcccttcacccgtagaaggggtgattatttggtgtgggtgcaattttgggtctttaagaccagctggagccctgcggctatccaacaaagtcatgcggaagaaacgaagctcttcctgattttgttgttggagaagctcagtgagctgctcacgcgcctgcttatatgcttgcgcagcaggatgatgcacttggatcatttgttctaagatctcaagagtctgctcatttagctggtgaccctgcacaaactcatcttcgtttgtgattttctccccagtaaacctggggttgtttcgacgctgttccatagcctcgactgggtccagaatgtacaactggccaaagccaggaatctgagttgtaccagcctgcatgctgcttatgcggcgatggaattctccgttaagaataacggccatcggaccgccagcagggcttggtttgttgccagcggaaacgctcgcaaattggaacaggttgttataacgcgacatgtgtcgcacaaattctttcccttcacgggattgcttattccccacaatcagctgtttgagctcatcaggatgcgggttaagcattggcagcacaactcttcccttccggcagcaaatgctactgtcttcatgtgagaagagatgtgcaccgcaatcggcgcattttttgtcaccgagtttcccggagtcacaatattccgggaaatgtttggctgctgctgcagcgcattgccaccccttgtgaaatgcagagcaacgccgtgtgatcggcgttgccactcccagcgaatttgctggcggggggcgtttcggcgccggtgaaggcgaacggctaacagaagctgaaagccttttttgaacgcgcattgatcgccttggtggcgtcttaggtctgatgaaaattacatcatcagcctgcgcaattggctcttgcgggatgcaagactccgacaccaaaccaagcgtgtcagcttggttttcaccggccacttgggcttgggtgagaatggcatcaactgcctgtccacgtgtctgtggttcgatgatcattatatcatcatgttcatcaacttccattagctcagcggccttggatgtcgactgcgtttcatccgtatgccgatagacaattgggcaaggagttggcaccccttcccttggatgatatggcacattatcagagccatacagctcgttaatgtgccataaaatgcgttttttttcataattgatggataaatcaggcagaacaaatgtgcgattgttcataagccatgactcagcatacaggcacacgaagtacccacaactattaccatcgtgttggaccgtcagattttcgacatcaacaatccctgtcaacagtgctgacggcaaaatatccgaaatgatatttttaattttatccgtcagttgcggatccaacctgccatatgtggtaggcaaagaatcggcaaaatgagtgccaaattgcacatcatggacaatgagagtccaatgtccagggaaatgtactggcaaaagtataacttctgccggaacaaaagggtcgtacccaaatgtcantatttttgtaaggccatgact

SEQ ID NO: 11039 - DNA, 5333 bp, Heterodera glycines
attaccttcaattaaagtatattttaataggcctcaaaacattggcacttgtcgattcctgtgcttatgtttcttactgccgagaatcaacagctcacaaagccgatttaacaattcagaaattgaaaggggaaaataccaatttaacggctgcaaatgattcaaatattcaaatttacggaaaagtcagtacaaaaattcgaattaaggacccggagtctggaaaatttggagaatggggcattattttatttgtctcaccggacaaacactgtccaggaccaattttaatgggactaccacttttgatggacctaaaaggagtaatcgcacttggtgaacggaaggttagacttggcgaaatttggacaaacattgtttcagtaattggatctgaaacagtgaagccttccagagtaattttagataataccgaaatttttgaaccaaggacagaaaatattttaatggctaaaataaatgaaaattatccgactgaccagaattttttggtggaaagcatttcacataaataccctggaattatagtgggaagaactttggtcgcaccgggtaacagtaaaaatgttgttttacacgttttaaatgcgggaaatgctccgattaaaatttatgaaaattcacatttggcggacttggaaccaataacagtaaatgcgttaccaggagatgaaatttctcctaaagattacattccaccggaaacaaaatggagtgaaaatttgccaaatttaccagaaaaggggatgaatcgtgtaccgtcggagagattaaatttggatgggtctttacaaacagtgcatacgggatggataaacccagtgagagtgccattacaatcatttgtacccgagaatttaattcaaatgaggacggtgaaagatacattatggcatggattttcaatgaaaattttgaaatgtacatttctgaggctatagaaaacataattttgggcatggaagttcagttgaaaatgggagaaagatggaaagtaaggacacacggggaagttgaaacatattgggaagtaatggaacggactgatgaattaactattgaaatgcttatgattcccgaaattttaatttcttataaggacaggcccactcagagtaataatgaaaatatgggagacagaatttgtcaaattaacataaatgcgatcacaaataatgagcagggcattttggaaaattttgaaaatttagaagaaatggccaatcaacttaaacgacggggaagactgaatgaatccagaaaatgaaaaatataaagtcattcttattttaaatcaattgcggatcaattaacagaaatggcggagccaaaggaagtccatccaatggaagaaatgaccgacggagagcagctatcgctccaatcgatggaaagaagcctgcttaagcaattggaaaaagtcagaaaaacattggccagtggccaattaaggtgcgggaagaggaggaccaagtggcaccaataatgaaggaggaaaatgaaatgaatgacgatgatgggaaaccggaaactgaaaaaaaggaattaaaattggaagcaaaagagaagggcaccaataggaaatgggaggaggaaaaggaaaaaccgtaaaaaaggtttctgaaacggaacagcatgaaaaagaaaaagtgaaatgcgctgaggatgttatttcactcgattctggagaattttatgacgatcaggctattttgtatagcccaaaagcacaatttgatcgctttggattttgggactcatgtgtcaacacggaagcaaaaagagatttaaaagaattgaaagagaaggagaaaatcgtgaaaagtgaattggacaccccgtctatcgaaaagtggggaatccgagtccaaaagttgcgagagcatgagaagaagacgaaggaggcccgaagtactccaatgccttttaaaaattcgcgaaagggcactcatggatgaacttcacaggcccatcgacatcggccgcatggactatggtaccaggaccatcaacggccatggactttccgagaatcaccggcggatttcaacagaactaatttgattggatttaattacaatgctacattttaaccaaattaatcctttttattttaatcaaaatacccaaaaaaaaaatgtagcataattacattttgtatttcgaccggggacggtcttttagcgtgccgtggatgaatatgataataatatttaacacatttattcaattatctaccatattttgtaattcacatgtcacactttatatcttatgtcctaaacaattgtctctctcctagtgggcgggtctttgagcaccccctccacctttgattacgccccgggaattttacctggatcactctattcttcatcgggcctctccctcggcagtctctgctcccgagaccgaatcgggttgagtgcctaagaattgtatccttccccctgaataaaggcgtactgttgtatactcttgttaatggggaataaaggaatacaaatggccctaggtgacacataacattcaagacctaaaatcctgagaccgagccccaattgtacaaaaaacaataactaagtcacttatatatgacatatcataatttaaattataatctgatcggctctttaatatcaaatttctatgttattttttttgcccctatagtgccattttttctggtctccaatttttcgggagccatggtaataaaccatttgtaagagtaaagtctcgttaaaataaattttccaagacctcgataaattataagctcaaaaaaatgtgaaaagatttttaaaaaatgaataaaaggatatatgttaaggacaaggataaaaatttactacatctctgttattagaaaacatgggatttatgtgtaaaaaaaacgagaaataggtattgtacattacctaaaatttgtaaaaagcagaaatagttgctaaaatattaaaaattccaaaatatttgttaaaaagttgtaaaaattcagtccttttggcgataaaaggctacaaattcttgcttatccgatgctgaaaatttgaataatagagggatctggcggtgccggtagaaccgccgtggaaaattttgaaaattcgagtacaaattatgataaattctttaaaaaacgccaaattgtttcaaaatatttgttaaaagattttatacgcaaagcttcggctataaaaattaaaaagctagaaaagaatttattgactcaagatcccgcgaggaactcgcaattttaaatgagagatttgcggggtcttcgctgattaatcccgtaaatccagttcggcagaaaatttaatcccaatcgtcaactttgtccttaaataaatctcagcaaactgttactataaggttgggtttatatcaaattacctctatttgatattaaatttttaatctggaatgtcatgacactgaaaaagtcggtccctaatttttacattctattattattttaataaataaatttttcataaatttaatcgtaataaccgggacaattttttttcatttttcataattatatttgcattcaataaagtaattggagtttctttctttctcagccttgctatttcttttgaaaaatttcattaacatatgccaaaatacgtggaaagaaattggcattttctttctttctcagcctctctatttctccaggtctcagtccaacatatgccaaaatacgtggaaagaaaattggccaatttttctctttttctctgtctcactatttcttcattaattctcattgaataatgccacaattacatggaaagaattttattcattgggtagtccatcataaaacagaatgactagctaaatgcagataattattcattttcatttcttgaaattccattctctttcaaaattattgtttttgccttctttctatacaacagggatattccatgtcaagaaatttttttgaattttatcaaatttttaaccatttttcgaaagttttattttggggcgtttggttttttgctttttaaattatttttccaaaaaaatatatttcattgctaaatctcactttaattcctcactactttttcatacagaaaatggaacatttttctttctgcgcattaattattgctatttttgttggcgctacttttcgtcacttttgtgttgcaatggacaacagtagacaaaactcgctcaaccacatgtatccaaatctgtttgggagtggggggaattcgtcatcaggaaatttgggacagggacagaatttgtacagcactcaatcatcatcagttggtcaatacggaacggcaccattgcaacaatatcaacctatgccatcatcacttggtcaaggagcagccacaagtggagatatgctgcataatgtacaaatgatggcaacaaataatcagcaaattggtaccagcggaagtggcagctacaactattttaaagatcaaaaagatttgtttgacgaggtcaacccttttgcctcgccaaatgcatcatttgcacatacgcatcaggaagttgttcagcaacaacaacagccgcaaacgcaaacgccctcattgaatgcaatggttcaacaacaatcacaacagaaacaaaagctcaaaaagaagacgacaataaagcaacaaagcacccttgccactgggcagatgggtaatttgtcaattaacgagtcaaatacagcctcttcacatacggctgtgccagtgccattatcatcacaagcaaatcaaccgagcattcaaacctcgccattacaacacactggaggccgtacaagcttccaaaatttaccaccaggaggaaatcaacagtcgcatccacaaatgttggcgcactctccgctaggcaatatggctggaagcactagcatgggccacgcatcggcgggacctattcagggtgggcaacatccgctaggcaatatggctggcaaagccagcattggtcaggcttcggcactgccggcacaaactggacacatagggctatcaccgcttggtcaagcggctggcaacaacagtatgttcaataatgcgacaatgatagcacagcgacagcacgcccaaatgcgaacacagccgaatattcaaacacaaaactcattggcatcaaattattcaaattctttttgtacaccacaattaaacaaccctactggaagaaatagtaatgcgacaatgatggcacagcaacagaacgcccaaatgcaaacacagccgaatatgcaaacgcaacatacaatacaaaataattcgcaaatgcaaaacattcaatggcaa

SEQ ID NO: 11040 - DNA, 2491 bp, Heterodera glycines
tgtaccccgtaagtgccctcaaaaatcacttaaaacccgtttttaatgccgtcgctggcccacatcacttggcccgtgccgacaacgccgagcaccgagcgcccgtcgggcgcaaccgcgacacgctcacgcacccaaagtgcacggcacggaatgggcacgcggaggacgagcgtgccatggcgcacggatgggacgatgacaacagcgatgagaagcagcaaaaggaggaacagggagagaaggacgggacgacgacgaagcggaagagcagcaggagtgccaggaataacttccggaagagcagcgggggcggaggacggcggcagaggggcggggctgaatggagagggcgctaattaaaacgagggcactacaaaaaacaaattcaaacttaaaatttttctacaaaaaaaaaattcttttacaaaattattttgtaagaaaaagtaaagaaaaattccagtgatttttggaatttttatgaaaaaagtaacaattagaagtaaaattcatcacaaaattttgcaaattgctgaattttttttttttgaatttcgggggacggcgagggagaggtgaaatgagctgccattagagaccggaaatttcaaatttgcggatcccgctgcggggctggaactcaaaattttttgcgggacgggatcccgcgggattaatcccgcattttccaaaaaatgcgggattgcggactgggatcccgcaaaatcccgcgccggtctctagctgccacccaaaagtcccccaagggagaaaaaagtggagattattcacaaattatttgccataaaaaggtgaaaaattcattttctttttttttagaaatcacgaattaggagatgtatttttagattaattggagtatttgcaatatttctttttgttagttaaacaattatttttgttaaaaaaaccttattttttcgttaattttttttttttgttttgggatttcggaggagggcgaatttattgttatgtaatattttgcaacccctttgctcccaaaattttttttgggaaagcgcgccgcttctcttccctccaaccacctgtcaatcatgttctgttgctgctcctccgtctccctcaactcttcaaaaagggacttctccaccggtttgccgttgctgttctgctccaacccctcctccgacggttcgtcgtttctgtgctgctccaacccctcctccgacggttcgtcgttgctgtactgctccaacccctcctccgacggttcgtcgttgctgtactgctccaacccctcctccgacggttcgtcgtttctgtgctgcaccaacccctcctccgacggtttgttgctgcttaatggccacaattggtcaaaaagtgacaacaattgctgcggttgctgaacccatccgttgtttttgtccatgtactgcttccactcctccgtcccatcatcgtccgcctcccccgtcgtcgttgtgctgatgcccgaatcgcgcggtcggaaaaactcatcatctatacagaaaaaacaaatcagtcattataataccgtgttgaaaaattccaaatcaaaaaaaaaagggattgaccgaggatgggtcattttgtttggcatgtaataaaatatatgtaaactttttggtgcctacacttacccccccccccccccttgtccccttgtcgtaggggggccggtgtaaaagaggtagatgtagtaggtaaaaagaggaaaaattctgaaaaatttgggcgattttctttatttcattgtttgctccttggccttatgatgtcagacagaaaacgaaaaaaaaaaaatttctgcaattcttggcaaaccgttgcggtgctgaaggcaccgccgggaaatttttttttggaattatcaataaaatttgaaaaaacgcaaaatttggaattggcttttcctttcctcttcttgttccttttttaggggggggggggcacgcgagctctattttaatgtggacgacgaccaaaacgaagcaaccccagcggaggatctcaccatcgccacgctcgtagcacaaagggagggcactccctgttaaaaggaaaaatgacccaagtcggtgcttaaccgctgcaggaaatgggcaaaagttctccgcgtgactgcctgggacaggcgattcaccacgaatgctcgaaaacgctggcacaggaagcaaaaagtgagagcggaaactcccagccttgacacgggggaaaaaagccgcctgcggagcaaaaccaaacctggcggacaatcgttgtccgacccaagatgcgacgacctaacaagcgcccaatggacggttattcgtcgcagtccagctcactagccaaattcaggacaaaattcgggcggaaaaggatgaaaatgaggtacagagactgctcagccggatcggatgttgcgaagaaacgtaagggagccaaacagtgctactcccgagagggacaagagagggaggcactcatcatctatgac

SEQ ID NO: 11041 - DNA, 3041 bp, Heterodera glycines
ggtcgttgatcacgaatatggcatccatttcgattaattcggcatcccggcaccgaatttaaacaaagtcaaaatttgaatttcgaattttagttcgaatttgggttccgggttcgtaataggttaaaataattgtcatattcgtgatcagcaacctcgaaaatcctcgggtacttgttttcaggactttttaaagcgaaaaaaatttgaaaaattagaccaaaaaaagtgcaaaaaattttcaaaacagggctctttgtaaatagcgtcaaaaatttttagagggggggaggtaacaaaaagggtaagtgccccgctttcattctcccccccccccccctcccccgtcggtttgccacctttttcggcaccctgcgaacagtagcagcaaaagcagctaatttgcgcatttcctctgcgtcttcttccgctctttggaggtgttctttgagttttttgatttcgtcctcctgaaaatttaaaaaaaaaaatgtaaaagctgaatttgatttgatgggtcgaatgttgcaatttctatttgcactgaattttcgttttttgccgcctgaaaatttcattttttcgacccctccgttttttgccacctttttttccttgtcccttttcaatgctttgatttctttcgcttgcgcctccaaaagatcgtatctttcttcgtcttcttcctcaagcgacttaataaaatcttcttttttttgtatttggtttttcaaattttcaatgattttgtctttgtcgtcgtcagccataaaaggaaaaaaaattgaaaaatggctaaaaacgggggaatttaagacggtctacgtcagttcgggttcggccccagcgaatttttggactataacttttttctttatcatccatataaaacattgttaggtatcattcgaaagcccttcagatgctctattagcctgcaaatttccaaaaaatttcgtctattttcaacaaattttatgaccaaaaaattaggaaactctggtcttttgagttcttctggccataatttttttgaacctttacgaaatttttcaaaattttgcaggctaatagaggacatttacagcttccgaatgataccaacaatgtttgattttggatgacaaagaaaaaagttatagtcaaaaaagtggctggggctgaaccgtgcggggccgaactgacgggttccggatttaagaggcacaaatttgagtttaaacagggggacatttcatttttccataagggatgcggcgatttaagcacttaaatcacggatcaatgaaaatttgattttctttgttcaaagttttggaaaaaacatgagtacatttgaaaatttgtacgcagtaaaattttcttgaacttttacctggaagtaatgtaaaaaaaaaaaaattgctgaaaattcaggtgtttgtatcttttgtatcgactcattttttaaaatagaaataaacacaaaatcagggacaaatcgatgcaatttcaaagaaaattcgaacttttcaacacaagaattctttttgtttgtcaatttaatgattttgaataatttaagaaacaaaaaaaaattagaaaaaaatttctgatttttcgaacaaaaactttaaattttatttatcgatttgacccggtgtaccgacatttcgccaacttgacatctcgccaactgacatctcgccaactcagccaaaaacattcatttcgccaactcaaccaaaaacattcatttcgccaactcagccaaaaacattcatttcgcctactaagccaaaatttgacatttcgccaactgacatttcgccaaatagttaaaaaaattaaagaaaaaaagtaaaaagagtaaaaaaaatgctgtgttaatatcaaatacagccctattccagtttacacgtccaatcagtgaccatcatcatttcttatgtcctgttcggcgcgctttttcaactattgtcagcgcggcaccgcttggagttcaaggatggctggcgtattttgccaaaacctacattggcaccactcaattcgagattgatcgcggggcggagtcatttgaaccgcatgctgatgtcggacactttcttctgcgtcgcactcgaagcacaactcgtaaatgcacctattctgtcatgaaatttatgaaattttcaattttagcgttcagtatttcccaggcatccataatgacaggcagtggaccaatacaattcggactgcattcgccacaaccttcaactccaaccattccattgtcagaagaaagcagcttgcagcttattccacgctgggaacaagacatcgtctgtcctccacgtttcccgatctcgttttggaatgtatacaccagggctcaaatggcaattgagcgaacgaacaacggcatggaagccgcgcatggacaatttgcagtaaaaaatttcatcggaaaacattattttttggtattttcagcgtgagctcaaccatcatccatcattgagtgacttcattgctgcattcacgaaggacatcaacaaacagttggacatcggacgcgcagaacagctccagaaaagcactaaacgacgacaacggtacgtcatcaaagaacaaaatgtggtgcggatccttgacgaggccgactttgaatcggaagaaggattgacaaacgcctcgcatctgatcgggctcgtgatgcaagtctttgcggagggacttcacgtccgtggaaattcagagagtggtgaagaaactgaggccgatgaaaattgatttaaacattttcatattattgttttttttattgatattttatatatgttatgaagatttctttgcttgaagcacttttataataaatttaatatcattatatagttaaaattcaattttcgactagttggcgaaacgtcagattttggctgagttggcgaaatgaatgtttttggatgagttggcgaaacgtcaggttggcgagatgtcagttggcgagatgtaaagttggtgagatgtcagttggcaaaatgtctgattttggctgagttggcgaaatgaat

SEQ ID NO: 11042 - DNA, 1030 bp, Heterodera glycines
tgagaattaaaccccactttccgcgtcttaaaccgtccagataacctcttccttataataatatcccatcgctaccataaaaacttatgaatttgacttaactcaagagattgctggtgaggcaatattagcgccgcatttgtcctgtgttgtgggaaggttgctttcattttcaataaatgtaaaaatatattttttaatctaataatcccaatcatttggcataaatagtatctcaaactaaataattatagcaaaattacataaaaatgacctaaaagtaaaaagaagccaaaatatttattcatgacataaaaaaactcattcccattattttatatatccatttactaaattgcaaatttaacatctttagaattaagtaatccacttgcatctgttgatcaatcagttcacgacattgacaaatggatgttccagcttaaaatgttcgggctaatcaaaatgggatcaatgctaatgcctaagataaagcgtttttgtctgatcagttatcctgccgcttcccgcgttttccctgaaatttgttcggtcttttccttacctgctgatggtcccaaatagtgacaatacaccagtggcccacaggggctaagtgttaaaggaaagtctttgaaattagtcgttgaatctgacaaaaaagccgaagaaactatgtatttgcgagactaaataaatcaaagcttttgtttgatatataagcttaacaaaaattaaaaaattaaataaatgaattaagaaatgttttttataaatagggttataaattaaatggactagaaaacacgaaatatggacataaatatggactaaaaaagcccgaaatatggactaaaaagcacaaaaatggccaaatatgggccaaattatggactaaaaactgccaaaatatttgttttaaaccctaaaaattaagaaaaccctatttatattcaatatttgcttaaacagattaaaaatacgctaaaagctgccaaaaaatggatttaaccataaaaatgccaatttt

SEQ ID NO: 11043 - DNA, 1783 bp, Heterodera glycines
taaaaaaatttaacgtagtgctatttttgtgcccctttctttatagcatatgcgtagaaaaaaatatttaatttataaaagtttataaccctatttataaaatatataaatatttaaaagattgaaatttcgtctgagcaaacaaaaaacaagcagtgaatgattttgacagaactacagaatattattctttaaatccaaaccaaaattcctccctttactttaattgtgacaattttttaaaaatataattaaaaatgaatggcacgaaatttatatattataggcaaaatttgtgtctttataaaaaaaattttcataaggccacctttgaaaatggccaaaatctttttttggcccaatttgtaaaggggagatgggactattgaaagaacttaaaagaaaatttttcttcaaccaaactttttgattttttcactttctaaaagcggcagtactaattatggtattttctagtagtgaaaaaatactttctgtcctatgagcggactgaaccaaggcgaaactgaagagactgcaagcttatccattaggccaatataaatcaatttgagtgcagccctcacggttttttaaaatagtggtggttaacaaatccaatattaattaattttgaaaaaatatcaattattctgacaattaatttaatttccctaatgagttaagagaagttgctttcgtaagcttaacgatatttttgcactcgcctcaattgagcattaatcttcctcccgagaaagcttcttttctcagtcgtagttttaattttgtaaattttgattttccagacaattaataaatgaaataaacgaaatagagatttcatattcatttattatgaaacaagtattttttcggcattggcgaatcatggaagttttgcactatttcacttcacgcggatgggttttcgagtagcgaaatgcgctcaaaatgtgggaacggttaagcgaagaggacaaaaaggtggtaaccaaatgctcacaattaagggatgcgccatttccgatagatttggacggaattccgttctaaaaccattgggataccggcggaattcaatttgcattttcgtctaattacggaattaacggcttcctgatgcttttcccctcactcattatttccgtaaaatactatttttaatttttaataatttgcgataaagtaaagaatgtcggttttttgaaatcttctgattattaataaaattttatacagattctgtcataaaattgtaaatttgttgccaagaaatggcattctgtgacatctgtttaataaacaaatattaatttaacaatgttataacaaaggagtcattttcggccatttatatttcgctaccgattctaaatttaagtcttttaattaaatttttaaatttgattatttaccaacaaagcgccgaccacggcaccgggagagcaaaaagaatgttcagatgggaaaaaaatatcagccattgcgaatgtttcaatcagttcagaagcaacattcttaatgtgaaaacgcagtttggaagaattgaaatttgatttaattgatttttcaccaaggtgtccaacaaaaggttcatcaataagccgaatctgatgccaatctcggccatattgcctttgttttgtgcggccattgcgtgtaattccacaaaaaatgcattccgatgcgctttttgctgatcagacaatggcacaaaacgttcaactaatggaagaagtacaatttttgtagcaaaatacacagtaaaaacaatattaaa

SEQ ID NO: 11044 - DNA, 1774 bp, Heterodera glycines
tgagtctcgcaaaatggcgtgtcgccttcagcagaccttttaaaaaaatgcagcgaagtaaatctccgcggcacatcactttcttctttgtccctttcattcacttcaaactatttcttttttctttctgtggtgcactaatgagaatatttcgaaattctgccttttttaataacttttcgccagattttgaattttcttgcagaaaagtaagaataagagaagggatatacgttctatttgttttcctgacctctatatggtctgaaacggacgaaaaacatgctcaatactgaattggcttaatttttacttttttgaatacgttttgtattttacacccctaaattgaggttttattaggggttggggtcaattccctaccgccaattccctactaacctcgtttccccctctccgaaccaaaaaatttttcgaaaattttcggaaaaatttcaaaaacagaaaggggattttcaacattttgatgtttctcgtgaattataagactataaattttttgtttaatgttgcagagaagaaaattaaaatacttctaacaaaaaaagaaccgtacaaagcttcaaaacaatgaccattcatactttttcacaaatcgaagtaaaaattttaaaatagtgttttgtctattttagcagctttatccagtctccggattcttaaatttgatcgtgaattttttttcgaatttacaattgatttcaaatcgctttataggacttccaggggcccgaaaattaggaagtaaggccggggtttaattattcaaatttcatacaagcaggtactttacgaatccgaagtccctaaagctccgggattttgagcccggtttcgggttccccgggagttgcggaaatgggtttagaacctatttttaggagggttcaaaactcgaaaaattgagagatttgacacttctaacttttttaaaacgatcgaatcttgataaatttggtatcatccgaaagctcttgacgagctatctaaaaagcagtgaataaattttcttgtgtgttttactctcaatgtttatcaatattcaacacttttggtatggaaatggcccaaatgccttagtagggaattggcggtagggaattggcggtagggaattggcggtagggaatcggccggtagggaattggccggtagggaattggcggtagggaattggctggtagggaattggcggtagggaattggcggtagggaattggccggtagggaattggcggtagggaattggctcggtagggaattggcggtagggaattggcggtagggaattggctggtagggaattggcggtagggaattggccggtagggaattggcggtagggaatcggctggtagggaattggcggtagggaattggcggtagggaattggctggtagggaattggcggtagggaatcggctggtagggaatcggctggtagggaattggcggtagggaattggccggtagggaattggcggtagggaatcggctggtagggaattggcggtagggaattggcggtagggaattggctggtagggaattggcggtagggaatcggctggtagggaattggcggtagggaattggcggtaggaaatcggctggtagggaattgtcggtagggaatcggctggtagggaattggcggtagggaattggcggtagggaatcggcgggtagggaattgtcggtagggaatcggcgggtagggaattgtcggtagggaattggctggtaggaaat

SEQ ID NO: 11045 - DNA, 2036 bp, Heterodera glycines
ctcccccccccccacaaagtgtcagtgtccaagcctattcagaaacgttaatgtgcggcgaacaggaaggggataaatttgtttgggacacatcaggcagcgccacagggctactaaattaggggagacgagtaaatatgccgcggtatttggcaaatgaattaggaaacgggtataaaacaattcagaacaccgaaggggataaaaaaaaattgaaaatttaatacaaataagaaaaaagtgagagatgtaatgataggtaataattttcacgggatttatttaaatttttattcattaaataaaaatagaccaaaaaaaacccataaattctttttttttatcacaaagaataatacagtttccccctataaagaccattattaaacattaaacgggttttgttgaccatgccgaaaataatgcgacaaaaatttcacctacttagttatgagggagaaaaaggcaaatttcccttcaggggcggacaggtggcggcggcacacaaaaaagttgcgccgcaggcaattttgtttgccactttttttccttccaattgttcatcaaccgccgccagcgccgcacccatttgtacaccacaaaagtcagcgaccgcctcggctcaacttaatgcgattcatcgatggaggagggagttggggacggatgtgtgcgtgctttaatgcaggcggtcagtggcgcggcaaaagcagccaacactttacagccgcccgcgtcggaccctagcgctgggggctgggtgcggacggcggcgggcggagacgggggaaagtccacttgaatttttgttatggatttgaataggtatgctttttctctctaccgccccgctaaccggggacgaagagcggggagcggtagacggggaaagtgatttgaatgggtatgcttttcctctccaccaccgcggccggcgacggggagcggagcgggggcgggaggagacggggaaagcccacttgaatttttgtgttgtggattgcaatatgcttttcctcggcaattatcatccacgttgtgttgtcccctcttccgccgttgatgatcagccgatcgttggaagacgatcggtgctggactgaaggatgggaagaggaagaagggcgggaaggaggggtgggggatacacacattctgctggacaaatattatatttatgatagtttcttccgatgtgacggaggggagggggaggtgaatggtccgcgaaaggtgaggaagatgagatgatgatacggatgattgggatgggaaacaaggagacggaagtggcttgagatgtggcttattcgtgttttattgtttaaagcaaatctgccagaggctaaagccaaaaaaaaccggcaaaactttttgataaacccggaaaaacttgcaaataacaggttaccccaaaatggtgaccctgtgcccttgattcagggatcggccagccctaacaaaaagctaattttgcgcaacgcggagcaaaaaatgcgcccttctagcggttgtgatcccatcagaagatgaatagtgaaaagggatgtggccatgggaaaatgccttggattaagtaatcaaaaattatataatttggacgaagataaataatcgcttaactaattttttcggatttatttaattgggactatttgtttccattgttaattgtttgttgttataaaaatatatatataaaccatttttaaattaaaattttatttgttcgtgtgccatttgttatcagttattatcatacaattgtttcccgcttgaccatttttcgaattaaacattactaattgatttccattatcaaaaaaatgattaaaatcggggacgaaaagatgaaaagcaatttctccgattaagcatcgacatgatgaataataatcaccaatgcagctgagcaaaaacatcacacatttcattcattgcccgatcagactgatgactgttgagactaactgtcgtcggtctatggaaagaaccggcggcggggaagggggggggggggggggctatattggaga

SEQ ID NO: 11046 - DNA, 2257 bp, Heterodera glycines
  unsure (1)..(2257): unsure at all n locations
tggtcaaggggtaaataggaaaaatgagaaaattcgacgaaaactctctttcgcggggtaatgggatgggtaggggggggggtaaagtgcttcatcgaataaggggcagcttattgccaccgattcgatggggggagaggggggggggtgaaaagtgggggcaccggggggagaaagagacgcaaaattggcggtgaataggaaaaagcgatgtggatgaatggaaaatggaaaaaggtgatgatggaagaaggaagattcacaatatttttttttgttgagctttaactttaagaaaatgtttccatttttatttttaaacgatttttatttttttgaattttatatttaatacaaaaatggaaaatcgttgcaaattctgctgttgggttaagaaaacaaaagaaaatgagtaaaaaatggtggaggtaaaaatgatttatgagactgaaaatggaagatggaaaaaatggtgccggggagggaaatgaagaaaattttagaaaaaaataatcgtgcatagagatgattaatgatgaacggaaaatgaagaggaatgatgaaagggtaaggggatttttatgaaaaaaattttggtgtgtgaaaaatgaaggtgagaaaaaggatgatgatgaattggtgaagtaaaatgaagaggatgaaaggaaatgagaagaatagaaaattataaaaaaagggatataaatttggaggatgaaacaaatccaatacaaagaaaaatatggcttaaggagaatttgttgggtgaaaatggaggtgggaaaagggatgaagatgaagtgaaatttttgagggaaaacaaagaaaaaattatgacgaatagaaagatgaagaaagaagaattgttgaaagaaataaattcaaataaaaaacttaggatgtaaaagaaagtgccgattaaaaaaacggcactaaattggtaggaggaaattaaaaggaaggaaaatggcttagaaaggaagaagatgatgatgatgaattgatggaagaacaacaatggagctggaaaggttgacgatgaatataatgaagagggataaacactaaagggatggaaagaatagaaaattggcaccaaattttggaaggaaagatgaaagaggaaagggatgatgacgaagaagaaagaattgactggaagaaaaaaggaacaaacaaaaggaggtggaaaaaaaggagaaggatgatcaacgaggaagaggatgaaagggaattggaagaaagaatggaagagaaaagaaaatcttccaccgccgatcggtgcatcaaataataatgggaagaatggggagggggaagagattagacagactttggggcgccgggggcggcggatgatcgccctttgggaatgatgaatgaatgaatagactgatgtgctgctattgatgtgtgaagtgaagaataactagcaaaaagtaacaccacatcacccactttataagtgttttctgctgctgatgggttggggacacaattggcaatttgtgagactaatgactaatgatgatttagagagagagacccccgcttggggcgggaactgttttttgatggtgcggtgaatgtatggagaaaaatgggagagaggaaatgaaaattgaaatttgtaaagaaaatgatttgtatggttgcggtaaattcaaactaataaatttaatatttaattataattagaaataaaataaaaataaatgagaggagaaaatgaagaaaatttaattaaaaatttttttatgtttgaaatttatttaatttgaaaatattattaaatttatttatttaattcgattagatttagaaataaaatgaaaattgagaggagaaaataaaaaaaaatgaaaaaaattataaattaaagtatatctgacgtttagtaaatttagaactatttatttaacaattaattataattaattaactgaatgtttaaaataaacggaaattagagagatgcaaaatattaatttaatatttaattagattattaataatagaaaaattgttgtgttaaatttaaaaatgataacaggaaaaagctaattcgacatatcattttactgcgtacatagtttaaaaaaaaataaaataaaaaatgcccttttatatgcaaaactttaaacacaatatgcaaagatttaaaaaaaacccgcctttacacagcatttgcaattttcccattcccttaacattttgcccanatttttcattttccgcttccgnttataggatgacc

SEQ ID NO: 11047 - DNA, 1570 bp, Heterodera glycines
atgccatagtcgacaaatttaatgcgcaaaagtgctggtcgattggcattttggagactaaactggctgctgaccaggccaatggcgaaatttgctgtttcgctaacgacaaaaaatttcttgggaaatttccaatcgctgaaacgccgccgccgaagggattgaaggaattcaaaagcatttccctgaggtgatcagttgtgccacattttacaaaacactaattattcctcttttaagttactttgatagcactgtccttcaatttattcgcaatttgcggactctcttcgtaaagaatggcattaatttggttctgagtgtttgcaattacacgtgcggccgaacgccaaagtggtggcccatctcatcgcccgaagtttggcctctattggcacagaatgttgttaggttaaatttttcagaaatgtaaagatattttcaataatttaatatacaaagaataggtcgaaaatccgacaaatactaggttgaaaatgcttaggtatatccaaaaaattcggatgggcgcacctctgacggcatttcttcactatatttttgatattcgcattttaaaatggtaaaataatgccttttcattgtcagattggcaattttggatgactacgacttttgcagtccaattgaacgtttaccagtcgactttctgtgccaatgtgtgaatctttacctgatggactcccgggttggttttttaaccgaatacccaactttaaaaaaaaatttaatcttgaataaagatctaacttttgggggatttgctatcgtttctctctttttctgaatttgggtctcccgaaaatgacaactttgacttagagtgctgtttttagggtacaatctgaatgctttctccaatatttaaggacattttccccgattcatcgccggtcaacgccgtctcttcctctccaatttcgtctgcccatgccctgtggcaatggttgcattcgccgcggggggacgggcgacctaagattttgctgtgccaggaaatttggtcattcgctgacaaaattcgggaactaaaaacggtaattatcttaataaaatatgaatgtctccgctaataaaaaagattgccggctaaattgcaaattaaggcattttgcgacgcctctgcccccgttagtttcatcattcgtttgtctttgagcagttttgctggtatgtggcattttaaaaatttctagtatttaagacccccaaacatttgttgttttctgtgcaggtgaacagtttgaattgcgcaatgatcggaccggggaaatgttgagcatggaaatggtcgcgacagaggaagacggagaaggacaacaactacagcagatggaggaggaggacaacgacaatgccgacattctgacccactacatcaagccggagcgcaatttgtggttgttgaagcgtcgtccaaccgttgggggaggaaaatggcaaaaacagtgggcccaatgggaggcggaggcaatcggatggaattggaccaatgcatggaatgtgatcgaagttgccaatgaagaggacgtggacgtgatcgaagatg

SEQ ID NO: 11048 - DNA, 1321 bp, Heterodera glycines
  unsure (1)..(1321): unsure at all n locations
caatttttttttcaaaaaatccgtttagtgaatgtttatgagcctggccatggcatccctttgcatttggacgcccattccgcctttgaggagcccatttactcgctgagtttgctgtccgacgttgtgatggaattccgcgactgcgccaacagtgcccggcgcgcctctgcgcatttgcccaggcgtagcattctgtcgctgcgcggcgatgtccgatatcggcacaagcacgggtcagtcagcagaaaagcggacgaatgcactgaataatcgggggagctccatccgggaacagctcgtttcccccaccccccgccggtcccccccccctcccccgaaaacttagaaattttttaagaaaaaatcttattgttagaaagttttttcttaagaaaattctaagaaaaaaatttttttgagaattttcagcgatttttttgatttttttttgaaaaatcgtagtaattcaccataaaaatttctcgaaaaaatttttttatgaaaattcttctagctaaagtctaattactaaaaaaatcagggggcataggatagaaaatacgaaaccctatctaattcagattagtaattatgtctaatttggtccgagtaattctgggagagtggaccatttttttcaactggaattgaacgacaagtcttttaataattcaaaatggccgaaacgtcgtttctgttctccatttctcagaattctgacgcgtcagtacgacgtccatccgtcgtccaaccgtttgctgaaacggcagcgccgaatttccatcacttttcgcactgtccgtcgcgtgccatgccaatgtccgtacgtcgaattttgcgactgggaccgcgcgggtaggctgagaattccgagcgaagagtgcgacgggagacaaatggagcagcgatatgtgaccaaggtgggcaagagaaagttggttgattgccgatggcaattttagcaagttaatgacgggacgggtggggcacgttcaatgaatggcaaataatcatagacatgtacaaatcggggcataaaattcccatatattttgccattttccccaaaaaaggtgtatgatgccattgcgcctcactttgacttaactcggcactccaattggcactgtgtcgtcgcttttttggcctccctccccagcggcgcttctctgctcgacgtcggctgcggaaatggaaatatntgttgcattcggacgcactggacaaggtgggccacgacatttttattctttattccattaccctaattacgacatttttgtaaatggattttactgagaattgggtacttttttga

SEQ ID NO: 11049 - DNA, 1337 bp, Heterodera glycines
ggaaataaatatgaatgatttatttgactggtttgaatgcaaccgatatatgctggtttttttaaataaatttgtcctttccggtccattacggtgtatcagatctaagctatggcctcaaaaagcgaatggctgatttccttagaacactcactaaaattcttaaaattttgccgctgcggcacttatcggcaccgccggcccctaaatttccttaaaaaattgctcacaaaattggtcattttttgggaaaatcttttaacaaattgcgctcaaattttcaaaaaaaaaaatttcccgtcggcgtacaactccaacgatctaatcatcaacaacatcctcgcactgacaacctattcctcgcatttgacaagttttatgaattggctctgtaatgtggtcgaaattacagataaacttttcactctaataaatgtttcagcatacgaaaattagttaagaacaataattctaatcgttcgggggaggggggagggtcgagtggaaatgacacacaactagggttatcgctcgcttattttactgggattctttagccaagcttggctcaaatacatacaataaaattgatatccattcaaatgccaaaaaataaatacctaataaaaaaacattccaaaacatttcctctcaattcttcgatgaacatgccgcgcgggtctcgactaaaactttatgaaacagtactagttttgcccaattgtttcaatgtaccctcagtcatgaacaatgtggcccatcctttttcgttcatttttacaactttgtaagttgccggcattgtcagaaacacttcttgcaaaacagtaaatggcaattttatcgttctaatttgcaaacagtgcatctccaattcgggctttccctgctaaatttggaaattacattaaaataaactggctaatatttattaaaattggcgacggccaaaaggttttcttatgagaaaatcgaatttttttttgaaaattccccctccccttaaccaaatatccaagcgtgtggaggccagagtggcgcagacccttgcacatgtatagtctcaccgatgttcacgttgtcgatatcttttgaacaggctatttttcaaatgcccattttaacacgcgtccaccaacccagtgaagtggtcagcgacctaaattttgtcacgctggtttaagaataaattaaatttgattaaaaatcccagccatcatttgtcacttctacgtatagctagaacacataggatagggagtaaaaaaacgcaacatgattcaaactgggcctcttaaggggcgcaccaatgattgtgaacaccgaaaaaatagaaa

SEQ ID NO: 11050 - DNA, 2764 bp, Heterodera glycines
  unsure (1)..(2764): unsure at all n locations
attttcttttttgaatatttagattggaaggtataaaattttgaaaacgaccaaaaattccaattttctagcgcatttaaatggaatatgcaatcagaaaatatttatacattcatcgttcattttatagacaattttcctctttgtaatttagaccaaatgaccaacgaaaaagactctatttggttttattttgacaaaattcacaattcttattttacaaatgtgcgatccgcggcgttttttgcgcgatccgcgaccgcggcaaattgaatccgcgaccgcgggattttttttgcgcgatccgcgaccgcggcaaattgaatccgcgaccgcgggatttttctgtgcgcgccccacccctgttgccgacttgatgaaaaatctggtcaatagcagtacaataaaatttttacgaaataaagtctaagcttagggctaagcctaggctcaatcctaaacttaatccgaaagcttatgcatattctaaggcttttataaaaatgcctgaccaacttcagtttcttaaattgatatttttgacacgcaaaacttaaaaaagaatgcttaggcttaagctgttcaattcatatcaaatgtgtgttttatttaaatgaaagaggtcaacaaaagcatttcggagagaataaatgagagaatcaaatcaaattggtgagaacgattgtttctcaaatataattaattaatttccacgcaattagacgacattttcaaaaaatcactcattccgttaatccacttggcccgggagtcgtcgagaacatttcaatgttgctttgacacgcttctttttctttcgtccgctgggggcgacaatggcctaaaattaagagcaatttgaatcgggcatatatcaacaatttgacaaaaattcgcctaactaacaaaaaaaaaaaagagtattgaagcgaaaattaaaaaacatagacatgaagaaacagcagacacaatgagtcagagactacattaaaagttaatgaaaattaaatgggcgcccccacaaaaaatctcagcggcacctaacggatcccttttaaagatgattaggcagctcggtccctcctccatacatttcaatatctaaataatattaatttggccacatttttttctctttctcccctctctttaattttcgttaaaaattaatttttcgtcatttttttgtgtgtatttttttatgttttttgggtaatattttttctatttgttcatttctgcaggcacggattatgtgatgtatgtgctaattgttgcggaaaagccaactattgcagaggagattgcaaaaattttatcgaatggcaactacaaaaagctgagaggtgactaaattaattaaaaaataaaaacgagttgaaaaacattttatttttttgcaggatggaacagccatacttttgtttttgaatgccttggcaaattttatcaacaaattgtcactttccgaattacgtcgacttttgggcacattatgagtaagtcaaatggattttaacaaaccaatttaatatttattaatattaaatcgtaatttaaaattcgattacaatttcaaatttcagtaaaataactaatgaaaattcaaatttaattcaattttttgtcagtcgtccacttaattggtgctttaattcctgctttttagacacctcttttccccagaagttcacttcatggcaccgcgaagagccaaaggcgctgttcaagtgccccattgagccgagagtggccaacccaatgcacaatttgaatgaagtaagtgggtttttgcgccctaataacattttagaaattttgaaatataataaagtaagtcatggctcctaacaataagttacagaaattgttgtcggataaaaaattggtttgatgtatcacttattaggccacttttcgtcgaggtgcataaattcatttattttttttcaatctaacccaaaaattgaagacaatttgtcattttttggccaaaatctgttaataaatcagttttagacagctttatctcccccattttgttcagttcctcgctgccgaggcggccaattgcgagtttattttgttgtggttagattgtgacagagaaggggagaacatttgcttcgaagtgatcgacgccgtgcgcaaggaaatgtgcagggcgaagggactgacggaggaggaatttatggacagagtgttcaggtggacaaatggacgcattggggcaatgggtttctatgtatttaaatttctgttttttttttcattttaattttctttccccatttttaaaagctaaagacacaaataatttctgatagcgaaattccggcggtgaaattttggggtgcaccccttaaaaatgttagaccaaacgcaaaaacaaaatgccgccatttgcgtttcagggctcgtttttcatcgatcaccgccaaagagatcaaacgggcaatggctgatctgggcaagccgaacttcagcgtttcacagtccgtgcttgttcgacaggaactcgacttgaggatcggatgcgcattcacccgctttctgacgacgcattttcgggttttcaatttttgctatttttcaacaaaatttcattttttaatgcagcgtggttattgcgactttgacgacaattacgtttcgcttgggccatgccaaactccgactttggcattttgtgtgagacggcatgacgcaattggacagttcaagccccangccgtactgggtggtgcaagccgaggtagtcccc

SEQ ID NO: 11051 - DNA, 1679 bp, Heterodera glycines
aacacatttgttcaggtcgaattgccaaatggtggccaatcggtgacattggattggtgccgaacgaggcaatacagtcgcgaagctgcgcaaacactgctcaacaagatgaaagttcggcttgttttttatacgattcactgattatttcgctattttggttttacggagggggcagcggaagcggaacagaacaaaatttcgccgccaaatttttaaaaaagaacatttgcgcttatttgggaacattctaaaatataaattatgtcgcaaacgcgaaaaattgcgtaacaaattcattcacaagcatgagaaaatttgcattttatttacataatgccataatataatcaaaatatcgttgaaaattacaaagatttctcaaatttctttgaatttttttaaaacttttctaaatgttcattttcaaggacgtccttggcatccaaggacattttttattttcaagaaagagggcccaatttcaaggacgtccttgccattcaaggacggatgggaaccctgttctaatttattaacggactgtacaaatctccaattctcactcgagcatttaagtttaagctttttgtttcttttcttatttctactgcttttgcatgcgttcgtttttccctgttttttagagtgcctatatttttttcttttgaaatttccattaaatgtaatgcattgctcgccgattgggtacattaaacaccaacagcaagaacaacaacaacagcgtcttgctctttgtgttggcattacaagcaatgaatgccatttgctatttgttgatgatttgtccgccttgacaattcgtccccgttttgccaattgtcgttccggtcgatggtttcgcgttttgccatcgtcaaatcatcacagcatcaacaagcattcatcaaaccaattttctttgctcgacaatgaaaatgaatggccatttccgacccgttttgtggacaattccttcgcaaaatatgtccaggtttttgctaccgaaacgaatacaaagcattggcttagggggacagaaattttttggcactatttacaaagagcactattttgaaaattttttcaacttttttttggtcaaatttttttttgtttaaaaagtcctgaaaccaagtacccgggtgttttaaaggtcgctgatcacgaatatgacaattatttgggcctattaagcaaacttggcgctagttataaagtgatagattttgaattttatcaaaaaccataggggggacccttttgttttgtaaattttttttggataaaaatcgtgaatatacattttattcaccataaatgtgctgcatattacttaatattcatcatgatggggattcggatgataatcagcttgatgagctttatgcagatcaccaactcgttcaaatacatgcaaatgggaacaatgatcaccccgaaaatgacaatctttatgataacaataacacggataagtcaaaaataattgaccatgacaaggaattgcgggatcagtcccctgagctcaccaaagtgccagaattaaatggaggagagttggttgggatcctataaaatacacgaatcaccgaaaagcgacacccataaaaacaaggaaattaatagccggaaaagaaccttatcttaaagaatttaaaaatttaatgaagtttcgg

SEQ ID NO: 11052 - DNA, 3189 bp, Heterodera glycines
aattttcagcgcggtgtcaatgggagcgtgtcgtcattgcggaccgaagtgaaaatggtgcatgccgttggccagccgctttcactgcgcagcactgtcggccttggcattggcggcggacttgaggtgaacattttgtggaaaatgaaggaagcagtgggcgggggagggggggggcaacaaatcgtaagaacaacaaaaaaattgcaacaacatccccctcccatgatttaggcattgccgcgccgtgttcgtgaggctgttgcacaagtgaatgcgcagcaattgcagcgaatggcgagcaaacaacctgaattcgcgacggtcgtgccgccgattgccgagagcggattctcgaacatccattggctccttttggaatggaccgccgatatggttatgaagtgagttagttggaaaagggtcaaaaatggaattttttaattttaatttatttcaaattttacagcagaattgttgggctcgttgtgcttgccggcccattcaccacccaaagcgacatcaacggcttcgacgttcggctgatttttgaccagcagaacatggaccacgaattggcaatgcatggatggcaagaatgcgtggcgcggatgaacaacatttcgccgggacaaatcgtcgaattcacgcggctgaaagttcgtgaacaagggagaaatggaaatgtgaaggggagtttccccttcacgttgctgtacaacggcgagtcgcgccaccgtgtgctcggacaggcgcctacggcggtgacaaatgcgggtgagcaaaagggttgcgattttttttggggattcttatgactcaaaaatccaattttctgtcccttttccagtgtgttctccgaatttcaacacgcccatcattgttgaagcaaatgatcaacaccaacacagcagcagcaacggcacaatcattggcggcggcgaccgggacggaaacgatttgaacaaccccagcaacaatgacagcgccgacaatgacgcactgccggcacaactgaccaatcgcccggaccaagtgaacattagcgacattggtaagttgagcggaagcccgatcacagtaaaatgattgatcaaccgcccccccctcccatttcacaggcgatgagcagcgcctgcgcatccaaagcaacaatgaggacgccgaggacgacgattttgaccgcgcagggcacagcggcggcggcagcagcacgatgtcaaacggtgcgcttttttcggccatggcagcgccgggcactgttgttgtgcgcaatgaggacagcggctcgtcatcggtgagcggccaatgaagaaaagaaaggaaaaagtgacgaaagacaagaaagaaaagcaaagacaagaaaaacaaaaaacacataaaaatcaacatacagacagacacacacacattttcatacactcgcatacgcacatgttgttttttaaattttaaatacaactcagtcaaatttttgtgctttctgttgttttttgtccttttcattattctagtgggcagggtcagaggggtgattgattgttttttgtggggttttttgcggaaagccatgcgctttttttggatttaaattttgttttgttcgaaatcatccaaactggacccgttcaggcgtggctttccgcagcacgcccaccgccacgtagtcggcccgttgcctctacgtctccgtcgccctcgccacggccaaattcgccatcgctgccgggtcgctcctcgcctccaccggttcgcgcatgctctttgactgcacagcgcactatgaccgccattgtgcagcgcatgaatgtaattgaggcggaagtggcgcgcgacgagcgcctttctcgcgagcgtgatcgccgccgccgccgccgccgtcaacttctgcaagattgcccgcgctccacaccccgctcgtcgcgcggacaacacagcggacagcagcagcaccagcagcaacggcacgaaaatgtcatcaccattgagtccgatggcgaagaagcagcactgctcggtgttcaacagcagcagccgcttgcgtccgacgacgaagtgtactacaacgacgaactcctcacgattgaggaccaagtggcgcaggggctcgtggagggggcggccaacgaggtggtgatgatgggcaaccacccgttggcagccgccgaccgcgcctggctcatctcgacggcgttcaacctgcgcgcccttccctcgtcagtgaagggcgttgtcgagctcgacgaggaggggcgccgcaacctcgcctgttgcatttgtagggaatggttggttggcggcagccaacgggtggtgcgcccatcgtgcgaccatttcctccatgtcggctgcttcgaggctgaagcgaagcttcgccgtgtgtgcccgctttgtgccggccacttcatcagcggcaagcggatgagcccttagcggctaccgatgaaaaaaaataaaatttattttattttaattatttttaaattaaaaaaaaatttttcattttaattatttttaaatttataaaaattccattttaatttttttaaaacttgttcaattttatttatttttctttttttctccttgatcaattgttgtcaatttcaacttctaatgccattttaataaatttctatttctttttttcaaattgcatttgttccttttgtgtgtgtgtgtgtgtgtgtttcttatgtgattaggacgtatgaattcaataatttgggattgggggaagaatttggtgggggaaaatcgaaaaaggggaaaaggaaaatgggtaaaaaaaagctttgcatttatagtgcaatgcttggcgccaaatcgggcgcggccgtccgccgatcaccaaccggtccgggaacgacgacaataccagcagcagcaacactgaaactgccgccgtcacaacagtaagcgccaacagtgggcacagtgacgaccgagccggtgcccgcgactcggacgggcagagattggacagtttctgcaaagtcattggcgcctgggagcgcaccgaatgccgcagccgcaacacacgctgtgaggcggttgaggtgtcgctgcgcgggtgggagggggcgcgccgccccgacacactgttggcccgctgcattgagcatctgctgcagcgtgtgctgtccggcagtgcgccgccgatgcgcatcggcatgtcgtgccaaccac

SEQ ID NO: 11053 - DNA, 1193 bp, Heterodera glycines
aaatcccgctctacacatatttggaccaaagtttataaaacatatattcgtcctcttttagaatatgctcctgaaatttggaatccgtcatacaaaaaagatataaataaattagaaagatgccaaaaatattttacaaaaattgctttatttaaatgtaggcttccatatataccttatgaacaaagacttgatttattcaaactttagaagaaaggagaaaaacaattgatttagttcaggcattcaaaattattaatggtctcactcatcttaaaaaagatatatttcctcagttttctggtcacatcccttacaatcttagacgtaaagttgtgttaaaatcacaatccagtaaaacttcaaattcttttatcaacaggacgaccttaatatggtctaaactcaacaaagatataacagatgctccatctgttgacagtttcaaaaaacgtataaataaatggattgagttaaacaaaaatttagtctgtaaaagagctccttggacttgatactaatttactaaaatctaacgtgtaagtggtcacaccttcgttggatattttatttcttctgaataaataaataaataaaatggcaagctttgggttttggttgctatcttgttaatcgttttaatttggaaggtcaatcccttaatttgaaatccaatctaaagaacgccagaacaaaaatttttaatttaaaaactataaacaaaactttaaaaagtgcaaaaataagaatcaaaaagggcacaaatgccaaatattagacctatataattgaattccactttttcatccaacgaacgattgcctacttatttatcatgacggaattattgtttttaactaatactgatcaaacaaaacatacgaaaaaagaaatacgtgagaatggttacaaaattgaagagttaatgaaccgaaaattgacattcaatgggacagaaaataaaaagtgaaggggaaaacgggagggacgcgagattatccgagacagtccgctcaaataggcgtttatgtgctcagccatggccatagcattggtttgtttctcttccccaatgccattccccgatcgaattatgtttatgcaatgggatagcaacgtttgctgctgctggtgggcgaatgaatcacgtcgaatcagtcagtcaggccccgacaatcatcgccataacacat

SEQ ID NO: 11054 - DNA, 2510 bp, Heterodera glycines
  unsure (1)..(2510): unsure at all n locations
acctgcgcaaaaacggcaacttacggatcaatcgccagcaaccgatttcaattcgaagagttcagcaactgccgcgcgcccaacttcttccaagccgtaatcttcaattggctcatccggaacatgaacctcaacatttgatgtacaccccccccccccccnnccctccccgtcctatcccaatccatcataccatctaacaatgcttttacttgtaaaatgaaaaaactcccgcttttttcttttcaccgctgtttccttcaatttaaactcggcttcccatccgttttttgccttcgttgcattgtcctctttttacttgccattttcactatttggtacctgcaacttgctttttttcaaaagccaagtgacaaaagcatttcaaaagttagcaaatggagagtaatccaaaaaaatggcaaaagcacttggacaaagccgaggatgaaatgcgaaagagtgttcagtggggacaaagcactggtgcgacgaatggtgcgacgcagacggaaaatgagtgacccggctgagttggagatgaattgtgaggcgattaaagcgagacacggaggagatccagaacaagatgatcaaatgatcacaaaaatcacggagttggaacgacaaatgccaatggcattcgcccgagtgatttatacggtgagtgaccaatcgaccggcccattaagtcaaccgctcacatttcccaaggattacctcttcctggaggcggaattgctcgtcaattacgcgtccaataattggtactgttacgtgttggactcgaagtcctccactgtcttccaacttcggatgcggcaacttgcctcatgtttcgacaatgtgatcgtcgtggaccaaatgtttgacattgaaggtctcggggccaacatgaacaaggcggtgatggaatgtgtgcgtacgttgagcgacgagcgaaaacattggaaatatttggtgacgctgcaggtgaaatgagaagctgaaggaagagagacgaacgaacggctgactgtgttcagaaccacgatgtgcaggcgaagaccaacgcggaaatggcacagattttcacttggttgggcggggccaacgacgtcgaagtcgaattgcaattaccactgacgaagaagcgtttggaacactaccgaaaaaagttcaattggacttttgacgaactaatgctgtttaaggatggtgttgaccagaaacgagatggactaaatatcggaaatgcatctttcagaagcgatgaatcaccggactgacaaagaggggaaaccgttggcattggcactttccaaggggtacatggccgtgtcgttgagtcggcaatttgtggacttcgtggtcaacaagttgaacgttacgccattgttggagcaactgaacaaaggcttatttggagtggacgaacatttctggcagtctttgagctcaagcgaatcattggacgcccccgggggtttcccacacgaatgttttgtgaagggaattgatgagaaggacacgtcattcaggaagtacaagtacatcaccaggtgagcgacagggagagcgagggagaaggagttcacttataaaagtcacaatcctccactttagttcgcaattctcatcattattctgaaatttcatttaattgctgactttggacagatttgcgttgtgggccgacccgtccagcaaatgtcggagcggcaattggcgccacgccgtctgtgtgtttggcttggaagatttgatgggacccgacaacgaaatccgccgacttccccacctttttgtgaacaagctgatgcaagaattcgatttcgatgctatcctttgttggcaccaatggatgcgcgagaggctccgatcgggcagaatggagttggacagagatttttacaaagaatggcctcaggtggggggggggaggggtggcgagacgggaaaaatgaatgaatgcatgatcaacgaactgatcaaacagacgcggtaccaaatggagcgcagccgcctagggaaagaagcgggcgagcagaagacagcggtggactgcgaatcgggaattatccaaatgaaaatgaagagagagagggaaataagaggaaagcggaagaaagaaaaaagggaaaaagagcgaggaaaggaagcggaaacaaaagggatgggaggaaggaaagcgaaggaagaaacaaaagcagacagtgtcgtgaaccaattttgaattgtctgttttaattttgtaccaggaatgtctcctcccagcccctgtagcaagaagaatttatcacatttttagggtctttcccccatttccttttttttttacaaacgccattttaaacatgcacactgtaactgactgtataatgttacttgtatatttattggggcaaagcattattgagattaatgttacaaataagtagcaatttgaattgttcgggagaaggacagttgattgtcagtcaaaatagatttgtaaattaaaatggtcgttcaacataaaatcaaaggat
